United States Patent Application Publication US 2025/0018062 A1 - sequence listing, part 7

SEQ ID NO: 9626 - DNA, 8832 bp, synthetic construct
  misc_feature 1..8832: note = source = /note="Description of Artificial Sequence: Synthetic coding sequence"
  source 1..8832: mol_type = other DNA
atgaccctgcgcctgctggtggcggccctgtgcgcaggtattctcgcagaagcaccgagagtgagagcacaacaccgggaacgcgtcacttgcactcgactttatgcggcggacatcgtgtttctcctggatggttcgtcatcaatcggaagatcgaactttcgcgaagtgcggtcgtttctcgagggtcttgtgctgcctttctcaggagcagcctcagcacagggcgtgagatttgcaaccgtgcagtactctgatgatcctcgaaccgaattcggacttgatgcccttggttccggtggcgatgtgattcgtgcaatcagggaattgtcgtacaaaggaggcaacacccgcaccggagccgcgattctccatgtggcagatcacgtattcttgcctcaactggcaagacccggggtccccaaggtgtgtatcctcatcactgacggaaagtcacaagaccttgtggacacggcagcacaacgcctgaagggtcaaggagttaaactgttcgcagtgggaatcaaaaacgctgatcctgaggagcttaagcgtgtcgcatcccagcctaccagcgacttcttcttttttgtgaacgattttagcattcttcgcaccctcctgcctcttgtgtcacggagggtctgtactacggcagggggagtgcccgtgactaggccccctgatgactccacttcggcacctcgtgatctggtgctttccgaaccttcgtcccaatccctgagagtgcaatggactgcggcatcgggccctgtgactggttacaaggtgcaatacactcccttgactggacttggacagcctctcccctcggaacgccaagaggtcaatgtgcctgcaggcgaaacgtcggtcagactgagaggactgcgacccctgacggaatatcaggtgactgtcatcgcactgtacgctaattcgatcggtgaagctgtgtcgggaactgcgaggaccactgcacttgaaggtcctgagctcactatccagaacaccaccgcacattcacttttggtggcgtggagaagcgtcccaggcgcaaccggctatcgcgttacctggcgagtgctgagcggtggtcccacccagcaacaagagttgggcccaggtcaaggatccgtgctgcttcgggatctggaacccggtaccgattacgaagtgaccgtctccacgctgttcggcaggtcggtcggaccggccacctccttgatggcgcgaaccgatgcatccgtggaacagacccttagacccgtgatactcggtcccacctccattctgctgtcatggaatctcgtgcctgaggcacgaggctaccggctggagtggcgccgtgagactggacttgaaccgccacagaaagtggtgcttccctcggacgtgactaggtaccagctggatggactgcagcctggtactgagtacagactcactctgtacactctgctggaagggcatgaggtcgcaacccctgcgaccgttgtcccaacgggccctgagctccccgtctcgcccgtgactgatcttcaagcaacggagctccctggacaacgtgtgagagtcagttggagcccagtccctggagcaactcagtataggatcattgtcagatcgacgcaaggcgtcgaaaggaccctggtccttcctgggtcccaaactgcatttgatcttgacgatgtgcaggccggactctcatacaccgttagagtgtccgccagagtcggccccagggaaggttcagccagcgtcctgaccgtccgaagagagcctgaaacgccattggccgtgcctggcctgagagtggtggtgagcgacgcaactagggtgcgggtcgcctggggccccgtcccgggagcttcgggattccgtatttcgtggtcaactggatccggacccgaatcatcacaaaccctgccacctgatagcactgctactgatataaccgggctccagccaggtaccacctaccaagtggcagtcagcgttctccgggggcgcgaagaagggcctgcagcagtgatcgtggcacgcaccgacccccttggccccgtgagaacggtgcacgtgacccaggccagcagcagctcggtgaccattacctggacgcgggtgccaggcgcaaccgggtacagggtatcgtggcattcggcacatgggccagaaaagtcccaacttgtgtccggagaagcaactgtggccgaactggacggtcttgaaccagatactgaatacaccgtgcatgtacgggcgcatgttgcgggggtggatggacctcctgccagcgtcgtcgtccgtactgcacctgaaccagtggggcgagtgagtcggctccagattcttaacgcatcatctgatgtgctgcgtattacttgggtgggtgtcaccggggccacggcataccgactggcgtggggtcgaagcgagggtggacctatgcggcaccagattctccccggcaacactgattccgccgaaatccggggacttgaggggggcgtgagctacagcgtgcgtgtgacggcgctggtgggcgatagagaaggtactcccgtgtcgatcgtggtcaccacgccccctgaagcacctcccgcacttggtactcttcatgtggtgcaaaggggtgagcattcgctcaggctgaggtgggagccggtcccaagggcgcaaggtttcctcctgcattggcaaccggagggtggtcaggaacaatcccgagtgctcggacctgagctgtcctcctaccatctggatggtctggaacctgcaactcaatacagagtcagactttcggttcttgggcctgcaggtgagggtccctccgcagaggtcacggctagaactgaatcgcctcgagtgcccagcattgaactgagggtggtggacacctcgattgactcagtgactctcgcatggactccagtgtcgagagcatcttcgtacattctctcatggcggccactgcgcgggcctggacaagaagttcccggaagtccccaaactcttccaggtatatcctcttcccaaagagtcactggactcgaaccgggcgtttcgtacatcttttcactgactccggtgttggacggggtgcgcggcccagaagcctccgttacccagaccccggtctgtcctcgcggactggcagatgtggttttcctcccacatgctacccaggataacgcccatagggcagaggctaccaggcgagtccttgaacgcctggtccttgctctggggccccttggaccccaagcagtccaggtggggctccttagctactcacatagaccttccccgttgtttccgcttaacggaagccacgaccttggcatcatactccagcgcattcgcgatatgccttacatggacccatcgggcaataatctgggaaccgcagtggtcactgcacatcgctacatgctggcccctgatgcacccggtcggcggcagcacgtgcctggagttatggtgctgctcgtggacgaaccccttagaggcgacatcttttcgcctatacgggaagctcaagcatccggccttaatgtggtcatgctcggaatggccggggcagacccagaacaacttagacggctggcaccagggatggattcggtccagacttttttcgcagtggatgatgggccgagccttgatcaggcagtgtcagggcttgctaccgcgctctgccaggcatcgtttacgacccaacccagacctgaaccatgtccagtgtactgcccaaaggggcaaaaaggggaacccggagaaatgggattgaggggacaggtggggccaccaggtgaccccgggctgccgggccgtaccggtgcgccaggaccacaaggccctccaggaagcgcaacggccaagggtgaacggggttttccaggggccgatgggaggcctggatcgccaggtagggcaggaaacccaggtacgccgggtgcgccaggacttaagggttcgcctggactccccggacctaggggcgaccctggcgagcgcggtcctcgtggaccaaagggtgaacctggcgcccctggtcaagtgattggtggtgagggtcctggtctgccaggtcgcaaaggcgaccccggacccagcggacctccggggccaagaggaccactcggagatcctggcccaagaggtcctcccgggctccctggtaccgctatgaaaggagataaaggagatcgtggagagcggggcccacccggtcctggtgaaggtggtatcgcacccggtgagccagggctgcctggcctgcctggtagccctggcccgcagggacctgtaggacctccaggcaaaaagggagagaagggagatagcgaagatggagcacctggactcccggggcagccgggttcacctggcgaacaaggccctcggggtccgcctggagccattggcccaaagggagatcgtggatttccagggcctcttggtgaggcgggagaaaagggtgagcggggtcccccgggacccgcaggatcaagaggactgccgggtgtggcgggaaggcccggagcaaagggcccagaggggccccctggaccaactggaaggcagggtgagaaaggtgaacccgggcgcccaggagatccagccgtggtgggcccggctgtggccggacctaagggagagaagggtgacgtgggaccggcaggtccacgtggtgccactggggtgcaaggcgaacgtggtcctccagggctggtcctgccgggtgacccaggaccaaaaggcgatcctggtgatagagggccgattggactgaccggtcgggcaggaccgccaggtgactccggaccaccgggcgagaaaggggatcctggtcgaccggggcctccaggtccagtgggtccccgcggccgggatggcgaagtgggggaaaaaggagatgaaggtccaccaggagatcctggcctcccaggaaaggcaggagagagagggctgaggggtgctccaggcgtgcgggggccagttggagaaaagggggaccaaggtgatccgggtgaagatggccggaacggtagccccggatcaagcggtccgaagggggacaggggtgaacctgggcctcctgggcccccaggccgcctggtggatactggccccggtgcaagagagaagggggaaccaggggaccgggggcaagagggtcctagagggcccaaaggcgaccccggactgcccggtgctccgggagagagaggtatcgagggatttcgcggtccccctgggccccagggtgaccctggagtccgcggccctgcgggtgaaaaaggcgaccgcggccctcctggcctggatggacgctcggggttggatggtaagcctggtgcagcaggcccctcgggaccgaatggagcggcgggcaaggctggtgaccccggtagagatgggctcccaggattgagaggagaacaaggactgcccggtccttctggtcccccgggccttccgggcaagcctggagaagatggaaaacctggacttaatgggaagaacggcgaacctggcgatccaggcgaggatggaagaaaaggggaaaagggagatagtggagcctcgggtagggaaggacgcgatggcccaaaaggcgagagaggagcacctgggattcttggacctcagggaccccctggcttgcccggcccagtgggaccccccggtcagggtttcccgggtgtcccaggtggaacgggcccgaagggtgatcggggggagactggatcgaagggagagcagggattgccaggtgaacgaggccttagaggagaaccagggtctgtcccaaatgtggatagactgttggaaaccgccgggataaaggcctctgcccttcgcgagatagtcgaaacctgggatgagtcgagcggctcatttcttcctgtccccgaacggagaagaggccctaagggggactccggagaacaggggcctcctggaaaggagggccctattggcttccccggggagcggggtcttaagggcgaccgcggtgacccaggtccgcaaggcccgcctggactcgctctgggggagagaggccccccagggccaagcggacttgctggagaacctgggaagcccggaattcctgggttgccgggacgcgcaggaggagtgggagaagcaggtagacccggggaaagaggggaacgcggcgaaaagggagaacgcggggaacaggggcgcgatggacctccaggtttgccagggacgccaggacctccggggccccctggtccaaaggtatctgtggatgaacctggccctggactttcgggcgagcaaggaccaccggggctgaagggtgccaaaggagagccaggaagcaacggcgaccagggccctaaaggagatcgtggtgtgccgggcattaagggtgaccgaggagagccgggccctcgcggacaggatggaaatcccggccttcccggcgagcgaggtatggcaggacccgaggggaagcctggtctgcaaggaccccgcggacctcccggacccgtcgggggtcacggtgacccaggacctcctggtgccccaggtctggctggaccagccggaccacagggaccctcgggcctcaagggagaacctggagaaactggtccgccgggacgagggctgaccggaccgactggtgcggtcggacttccaggtccacctggtccctccggtctggtgggtccccaaggctcccctggtctgccgggacaggtgggcgagacgggtaagcctggggcacctggaagagatggcgctagcggaaaagatggcgacaggggatccccaggagtccctggatctcccgggttgccaggtcctgtgggacctaagggtgaacctggacccactggcgcccctggacaagcggtggtgggactgcccggcgctaagggagaaaagggcgcacctggaggactcgcaggtgatttggtcggggaaccaggagcaaagggtgaccggggactgccgggcccccgaggagaaaaaggcgaggcaggacgggcgggcgaacctggtgaccctggcgaggacggccaaaagggtgcccctggccccaagggattcaagggcgatcctggggtgggagtgcctggctcgccaggccctcctggtcctcctggtgtgaagggagatctcgggctccctggacttcccggggcgcctggagtggtgggatttcccggacaaactggtcctcgtggggaaatgggtcaaccaggccctagcggagaaagagggctcgcagggcccccaggaagagagggaattccgggaccactggggccacccggccctcctggatcagttggaccgccaggagcatcaggacttaagggcgataagggagatcctggtgtcggactcccggggcctcgcggggagcggggagaacccggcattcgaggcgaagatggcagacctggtcaagaagggccccgcggccttactggccctcccggctcaagaggggaacggggagaaaagggcgatgtgggaagcgccggacttaaaggggacaagggagattccgctgtcattttgggccctcctggaccacggggagcgaagggagatatgggcgagaggggtcctcgaggcctggacggagataagggacctcgtggagataacggagatccgggcgacaaaggatccaaaggggaaccaggcgacaaaggttcagcaggacttccaggccttagaggcttgttgggtccacaaggacaaccaggggctgcggggattcctggggaccctgggagccctgggaaagatggagtccctggaattcgaggagaaaagggagacgtgggttttatgggcccacggggacttaagggagaaagaggcgtgaaaggggcctgtggacttgatggtgagaagggagacaaaggagaagctgggccacccgggaggccgggtctggcgggccacaagggtgaaatgggggagcccggtgtgcctggacaatctggtgcacctggaaaggaaggactcatcggccctaaaggtgatcgtgggtttgatggacagcccggtccaaagggggatcaaggtgagaagggagaacggggtacgccaggcattggaggattccccggcccatccgggaacgatggctccgccggtccccctgggccgcctggatcggtggggcctagaggtccagaaggcttgcaaggtcaaaagggtgaaagaggtcccccgggtgagcgtgtggtgggggcgccgggcgtgcctggtgcccctggtgaacggggcgagcagggacgcccagggccggcaggtccccgcggggaaaaaggagaagcggcccttaccgaagatgacattcgtggatttgtccgccaagagatgtcccagcactgtgcatgtcaaggacagtttatagccagcggatcacgtccactgccttcgtacgcggcagataccgcaggctcccagctccacgccgtcccagtcttgagggtttcccatgcagaagaagaagaaagggtccctcccgaagatgatgaatactcagagtacagcgaatactcagtggaagagtaccaggacccggaagcaccatgggactcggacgacccctgttcccttcctctggacgaaggatcatgtactgcctatacgcttagatggtaccatagggccgtgaccggctcgaccgaagcatgccacccctttgtctacggaggttgtggagggaacgcaaatagattcggtaccagagaggcatgcgagagacgctgtccccctcgtgtcgtgcagtcccagggaaccggaactgcacaggat

SEQ ID NO: 9627 - DNA, 8832 bp, synthetic construct
  misc_feature 1..8832: note = source = /note="Description of Artificial Sequence: Synthetic coding sequence"
  source 1..8832: mol_type = other DNA
atgactctgcgcctcctggtggcagccctgtgcgcgggaatcttggcggaagcccctcgcgtccgcgctcagcaccgcgagcgtgtgacttgcacccgcctgtacgccgctgacatcgtgtttctgctcgatggctcgtcgtcgatcggtcgctccaacttcagagaagtgcgatccttcctcgaaggtcttgtgctcccgttctcaggcgctgcctccgcgcagggagtgagatttgctaccgtgcaatactccgacgaccctcggaccgaattcggcctggacgccctcggctcgggaggagacgtcatcagggccatccgggagcttagctataagggtggaaatacccgcaccggggcagcaatcctccacgtggccgaccatgtgttcctcccgcagctcgcccggccaggggtgccgaaggtctgcatcctcatcacggacggcaagtcgcaagatttggtcgataccgcggcccaacgccttaagggacagggagtcaagctctttgcggtgggaatcaagaacgcagatcctgaagaattgaagagggtagccagccagccaacctcggacttcttctttttcgtcaatgacttctccattctgcgcacgctcctcccgctcgtctcgcgcagggtgtgcactaccgccggaggcgtgcccgtgacccgaccgccagatgatagcacttcagcaccacgggacctggtgctgtctgagccgagctcacagtcgctgcgagtgcagtggacggccgcatcgggaccggtgacgggctacaaggtccagtacactcctctgactggcctgggccagccactcccaagcgagagacaggaggtcaacgtgcctgcaggagaaactagcgtccgccttcgtggactccgcccactgactgagtaccaggtcaccgtcatcgcgctgtacgccaactcgatcggggaggccgtcagcgggaccgcgcgcactacggccctggagggaccagaactgactatccagaacactaccgcccatagcctgctggtggcgtggcggtccgtgccaggtgcgaccggctaccgcgtcacttggcgcgtcctgtcaggcggaccgactcagcaacaggagctcggccccggccagggcagcgtgctcttgagagatttggaaccaggaaccgattacgaagtgaccgtgtcaactctgtttggccggtcggtgggaccagctaccagcctcatggcccggacggacgcgtccgtggagcaaactttgcggccggtgattcttggtccgactagcatcctgctgagctggaatctcgtgccagaagcacgggggtaccggctggaatggagacgggaaactggactggagcccccacaaaaggtggtcctcccgtcggacgtgaccagataccaactggatggactccaaccgggaaccgaataccgcctcactttgtacactttgctcgaaggtcacgaagtcgccacccctgcgaccgtggtgccgaccgggccagaactgcccgtttcccccgtcactgacctccaggcaaccgagctgcctggacaacgggtgcgcgtgtcgtggagcccagtgccaggcgccactcaataccggatcatcgtccgctcgacccagggagttgaacggacgctcgtcctgccaggctcgcagaccgcctttgacctcgatgacgtgcaagccggactgagctacaccgtccgggtgtccgcccgcgtcgggcctagagagggatcggcgtccgtcctgacggttcgccgcgaaccggaaactcccctcgcagtgccgggcctgcgcgtggtggtgtcggacgccaccagagtgagagtggcttggggaccggtgcctggagcctcgggattccggatctcatggtcgaccggctcgggaccggagtcgtcccagacccttccgcctgattcaaccgctaccgacattactggactccagccaggaaccacgtaccaggtggcagtgtccgtgctgcgcggccgcgaggaaggcccagcggccgtgattgtggcgcgcactgacccgctgggcccggtgcggacggtccacgtgacccaggccagcagctcttcggtgactatcacctggacccgggtgccaggggccaccggatacagagtgtcgtggcattccgcccatggcccggaaaagtcgcaactggtcagcggggaggcgaccgtggctgaactggatgggctcgaaccagatactgaatacaccgtgcacgtgcgggctcacgttgctggcgttgacggacctccggcgagcgtcgtggtgcgcaccgcaccggaaccggttggccgcgtgtcccgtctccaaatcctgaacgcctcgtcggacgtgctccgaattacctgggtcggggtcaccggagctacggcctacagactggcatggggccggtcagagggaggtccgatgcgccaccagatcttgcccggaaataccgatagcgccgaaattcgggggctggaaggaggggtgtcctacagcgtgagagtgactgctctcgtcggcgaccgggagggcacgccggtgtccatcgtggtgaccactccgccggaagctccccctgcgctgggaactcttcacgtggtgcaacggggagagcattcccttcgcttgcggtgggaacccgtcccacgggctcagggattcctcctgcattggcagccggaaggaggacaagaacagtcgagagtgctgggaccggaactctccagctatcacttggacgggctggaaccggcgacccagtacagagtcaggctgagcgttcttggcccggccggagaaggaccttcggcggaggtaactgcgagaaccgagtccccgagagtgcctagcatcgagttgcgcgtggtggacactagcatcgattcggtcactctcgcctggaccccagtctcgcgcgcttcttcttacatcctcagctggcggccgctgcgcggaccgggacaggaggtgccaggatcgccgcagaccctgccaggaatctcaagctcccagagagtgactggcctcgagcctggcgtgagctacatcttctcccttaccccagtgctcgacggagtccgcggcccagaggcgtccgtcactcagacgccagtgtgtccacgcggactggcggacgtggtcttcctgcctcacgccactcaggataacgctcacagagctgaagcgacccgcagagtgctggagcggctcgtgctggccctcggaccacttggaccgcaggcggtgcaggtggggcttttgagctacagccaccgaccgagcccgctgttcccgctgaacggatcgcacgatcttggtatcattttgcaacgcatccgcgacatgccctacatggacccctccggaaacaaccttggaactgcggtggtgactgcccacaggtacatgctggccccggacgccccgggaagaagacagcatgtgccaggtgtgatggtgctgctggtggacgaaccactccggggggatatcttctcaccaatcagggaagcccaagcctccggcctgaatgtcgtcatgctgggaatggccggcgcagaccccgagcagctgcgccggctggcaccgggaatggattcggtgcagacctttttcgccgtcgacgacggaccatccctggaccaggctgtcagcgggctggcaactgccctttgtcaggcgtcgttcaccacccagcccagacctgagccatgcccagtgtactgtccaaagggacagaaaggcgaacctggagaaatgggcctcaggggacaggtgggaccgccgggcgacccgggactcccgggtaggactggggccccaggaccacagggacccccgggatcggccaccgccaagggagaacggggcttcccgggggctgatggaagaccaggatcacctggaagggcgggaaaccccggcaccccaggagccccgggactcaaagggtcgccgggcctgccgggaccacgcggagatccgggcgaacgggggccacgcggtccgaagggagagccgggagccccaggacaagtgattggcggggaaggaccaggtctgccaggtcggaagggggaccctggaccgtctggtccgcctggaccgcgggggccactgggagatccaggaccgcggggcccccctggcttgccaggcaccgcaatgaaaggcgataaaggcgatcgcggtgagaggggaccgccgggacctggggagggcggaattgcccctggtgagccgggactcccgggcctgccggggagcccaggaccacaagggccggtgggaccgccggggaagaagggagaaaagggagactccgaggacggggccccaggactgcctggacagccaggctccccaggcgagcagggaccgcggggacctccgggcgcaattggaccaaagggggatcgcggattcccggggcctctgggagaagcaggcgagaaaggagaacgcggaccacccgggccggccggatcccgcggattgccgggagtggcgggacgccccggagcaaaggggccggaggggcctccgggccctactggaaggcaaggcgagaagggagaaccgggccgccctggagatcccgctgttgtgggaccagccgtcgccgggccaaaaggggagaagggcgacgtgggcccagcaggcccgcgcggtgcgaccggagtgcagggagaaaggggacctcctggactggtgctgcctggtgacccgggaccgaaaggcgacccgggagatcgggggcctatcggactgactggaagagccggaccgcctggggactcaggcccaccgggagaaaagggagatccgggacggccgggacccccggggcctgtgggcccgcgcgggcgggatggagaggtgggagagaagggggacgagggaccaccgggggaccctggactgccaggcaaggcaggtgagcgaggactcaggggagccccgggagtgaggggccctgtgggcgagaagggcgaccagggagatccaggagaagacggacgcaatggatcacctggttcgagcgggccgaaaggtgaccggggggagcctgggccacctggtcctccgggtagactggtggacactggaccgggagcgagggagaagggtgagccgggagatcggggtcaggagggacctcggggaccgaaaggtgaccctggactgcctggcgctccaggtgaaagaggaatcgaaggattcagaggaccgccaggaccacagggagatccgggagtgagaggcccagccggcgaaaaaggagacagggggccaccgggacttgacggaagatctggcctggatggcaaaccgggcgccgccggcccgtcgggaccgaatggagccgccgggaaggccggggacccgggccgagatggactgcctggcctcaggggagaacaaggcctcccaggaccttcaggcccgccgggactgccaggaaaaccaggagaagatggaaagcctggactgaatggtaagaacggagaaccgggagatcccggagaagacggacgcaaaggtgagaaaggcgactccggggcatccggacgggagggacgcgacggacccaagggggaaagaggcgcccccgggatcttgggaccacagggaccaccaggattgccgggacctgtgggacccccgggacaaggattcccgggagttccgggaggcaccggcccaaagggcgacaggggagaaactggtagcaagggtgagcaggggctcccaggtgagagaggcctgcgaggagagccgggatccgtgccaaacgttgatcgcctcctcgaaaccgcaggcattaaggcgtccgctctcagagagattgtggaaacctgggatgagtcaagcggatcattccttccggtgcctgaaagacgaagaggaccgaaaggggactcgggagaacaaggtccacccggaaaagagggaccaatcggattcccaggggagcgagggctgaaaggagacaggggcgatcctggaccgcagggaccgccggggctggcccttggagaaagaggcccgcctgggccgtcgggcctggctggggaacctggaaaaccggggataccagggctgccgggccgcgctggaggggtgggggaggcgggaagaccgggcgaacggggagaacgaggtgaaaagggagaacggggagaacagggtcgcgacggaccaccagggctgccaggaaccccgggaccaccgggaccgcctggccccaaggtcagcgttgacgaaccgggtccgggactttccggagaacagggaccgcccggattgaagggcgcaaagggggagcccggctcaaacggtgatcagggaccaaagggagacaggggggtgccggggatcaagggagatcgcggagagccagggccgcgggggcaagatggaaatccaggactgccgggtgagcgcggcatggcggggcccgaaggaaagccgggactgcaaggacctagaggaccgcccggcccggtgggcgggcatggagatccaggacccccaggagcgccgggcctggcggggccggcgggaccgcaaggaccatcgggcctgaagggcgaaccgggagaaactgggccgcctggcagaggactgaccggacctactggagcggtgggactgccaggaccaccaggaccttccgggcttgtcggaccccaggggtcgccgggactcccaggccaggtcggggagactggaaagccgggcgccccagggagagatggggcgtcaggcaaggatggggatcgcggttccccgggtgtccctggaagcccaggactgccgggaccggttgggccaaaaggtgagccggggcccactggcgcccccggacaagccgtggtggggctcccaggtgcgaagggcgaaaaaggagcgcctggaggactggccggcgaccttgtcggagagcctggtgccaagggcgatcgcggtctgcctggacctagaggcgagaaaggagaagcaggacgggcgggagagcctggcgatccgggagaggacggacagaagggagcaccggggccgaaaggattcaaaggggacccaggagtcggtgtcccgggttcccccggcccgcctggcccgcctggagtgaagggagatctgggactgcctggcctgccaggcgctccaggagtcgtcggattcccgggacagactggaccacggggagaaatgggacaaccaggaccctcgggagaacgcggcctcgctggacctccggggagagaggggatccctggtccgctcgggccgccggggccgccaggatctgttggaccgccaggagcgagcggcctcaaaggagacaaaggagatcctggggtgggactcccaggaccgagaggagagcggggggagccaggtatcaggggggaggatggacggccaggacaagaaggacccaggggattgaccgggccgccgggatcacggggagaacgcggagaaaagggagacgtgggaagcgccggccttaaaggtgacaagggagattccgctgtcatcctcggaccaccaggaccccgcggtgccaaaggcgacatgggggaaaggggtccgaggggactcgacggagataaaggaccgcggggagacaacggcgaccctggagataagggctcgaagggagaaccaggagataaagggtcagcagggctgcccggactgcggggactgctgggaccgcagggccaacctggcgcggcggggatccctggagatcctgggtcaccgggaaaagatggagttccaggcattcgcggcgaaaagggcgatgtgggctttatggggccacggggactcaagggagaaaggggggtgaaaggcgcatgcggactggacggtgaaaagggagataagggcgaagctggaccaccgggacgcccgggcctcgcaggacacaaaggtgaaatgggtgagccgggagtgccaggacagtccggcgccccgggaaaggagggtttgattggaccgaagggagatcgcggattcgacggacagccgggacctaagggtgatcagggagagaagggggagcgcggaacccctggcatcgggggattcccgggaccatctggcaatgatggaagcgcgggtcctccggggcccccgggatccgttgggccgcgcggtccggagggcctccagggacagaagggagaacgcggcccaccgggtgaacgggtggtgggagctcccggagtgccgggagcgccgggggaacgcggagaacagggaagaccgggcccggccggaccgcggggcgagaagggcgaagctgccctgactgaagatgatattagggggtttgtcagacaggaaatgtcccagcactgcgcttgccaaggacagtttattgcctccggatcacggccgctgccttcgtacgccgctgacaccgcgggaagccaactgcatgcagtcccggtgctccgcgtctctcacgccgaagaggaggagagagtgccgccggaagacgatgaatattcggagtactcagaatacagcgtcgaagaataccaagatcccgaagcaccgtgggacagcgatgacccttgctcgttgccgctcgacgagggatcgtgcaccgcgtacactctccgctggtatcaccgcgcggtgaccggaagcaccgaggcctgtcatcccttcgtgtacggtggctgcgggggaaatgccaatcgcttcggcactagagaagcgtgcgagcggcgctgcccgccccgcgtggtccaatcgcagggaaccggaactgcccaggac

SEQ ID NO: 9628 - DNA, 8832 bp, synthetic construct
  misc_feature 1..8832: note = source = /note="Description of Artificial Sequence: Synthetic coding sequence"
  source 1..8832: mol_type = other DNA
atgactttaagactgctagtggctgccctgtgcgccggcatcttggcagaagctcctagagtgcgggcccagcatcgagagcgcgtgacttgcactcggctttatgccgccgacattgttttcctgttggatggctcttcttcaattggtcggtcgaattttcgggaagtaaggagttttctggagggactggtgttgcctttctctggagccgctagtgctcagggcgtgcgctttgctacggtccagtactcagacgatcctagaaccgagttcgggttggacgctctggggtccggcggcgatgttattcgcgctattcgcgagctaagctacaaaggcggtaatacacgcactggcgccgctatactccacgtcgccgatcatgtgttcctgccgcagctggcgcgtcctggcgttcctaaggtgtgcatcctgatcacagatggtaagagccaagacttagtcgacaccgccgctcagcgtctcaaagggcagggcgtgaagctcttcgcagtggggatcaagaatgcagacccagaagagttaaaaagggtggccagccagccaacctctgatttttttttctttgtaaacgatttttccatcttgcgaacgctcctccccttggtatcacgcagggtttgcacaacagctggcggcgttcccgtcactcgacccccagatgattcgaccagcgcgccccgggatctggtgctttcagagccctccagtcagtcactgagagtccagtggaccgcggcatctggtcctgtgacaggttacaaagtgcagtacaccccgttgactggactcggacagcctctgccgagcgagagacaggaggttaacgttccagccggcgagacgtctgtccggctcagagggctgcggcccttgactgaataccaggtcaccgtaatcgccttgtacgccaatagcatcggggaggccgtatccggaactgcccgcacaaccgcgctggagggtcccgagttaaccatccagaacactacagcgcattccctgttggtggcgtggcggtccgtcccgggtgctacaggttacagagtgacctggagggttctgagtgggggtcctacccaacaacaggaactgggaccaggacaaggttcagtcttgctccgcgatctcgaaccaggcacggactatgaagtgaccgtgtcaactttgtttggccgctctgtgggacccgcgacttctctgatggcacggaccgacgcgtccgtagagcagactcttcggcccgtgatcctaggccccacttctatcctactcagttggaacctggtaccggaagcgcgagggtataggcttgagtggaggagggaaacaggcttagagccccctcaaaaagtcgttctgccttccgatgtcacccggtaccaactggacgggctgcagccagggactgaatacagactcactttgtacacattgctggagggtcatgaggtggccacaccagccacagtggtcccgaccggacctgagctgcctgtgtctccagttactgacttacaggcaacagaactgcccggccagcgagtgcgagtgtcatggtcacccgttcccggcgccacacagtaccgaatcatcgtccggtcgacccagggtgtcgagcgaaccctggtcctgccaggctctcagacggcattcgacctggacgacgtgcaggcaggactcagctacactgttagggtctccgcgagggtagggccaagagaggggtcggcgtcggtcctcacagtgaggcgcgagcctgaaactcctctcgcagtaccaggccttcgagtggtggtcagtgatgccacgcgcgtgagagtcgcgtgggggcccgtgcccggagcaagcggattccgaatatcctggtccactggtagcggccccgagtccagtcagaccctcccacccgactctacagccaccgacataaccggtctgcaaccagggaccacttatcaagttgccgttagtgtgttaagggggcgtgaagaagggcctgccgctgtgatcgtagccagaacagatcctctaggacctgttcgtactgtgcacgtgacacaggcttctagtagcagtgtgactataacctggacacgcgtcccaggggccactgggtatcgggtcagctggcacagcgcacatgggcctgaaaagtcacagctagtcagtggggaagctaccgtggcggaactggacggcctggagcccgacaccgagtataccgtccatgtgcgtgcccatgtcgccggtgttgatggtccacctgccagcgtcgtggttcgaacggcccctgagcctgttgggcgagtatcaaggttacagatcttaaatgcatcttctgatgtgctgcggatcacctgggtgggcgtcaccggcgcaacagcttatcgcctggcgtgggggcggtctgaaggaggccccatgaggcatcagatcttacctgggaatactgacagcgcagagatcagaggcctggaaggcggcgtgtcctattctgtcagagtcactgccttggtcggtgaccgcgaggggacacccgtcagtatagtggtaacgacccctccggaagctccccctgctctgggcactctgcacgtcgttcagagaggggaacatagtctgagactccgatgggaaccagttcccagggcccaaggctttttgctccactggcagcccgaggggggacaggagcagtctagggtcttgggacctgagctgtcctcttatcatctggatgggcttgaacctgcgacccagtatagagtgcgcctcagcgtgctaggacccgccggagagggacccagtgcagaggttaccgcccgaactgaaagccccagagtcccgtctatcgagttacgcgtagtggacactagtatcgactccgttacgttggcctggacacctgtgagccgggcatcatcatatattctgagttggcgccccctgcggggtcccgggcaagaagtgccagggtccccgcaaactctgcccgggatcagttcaagccagagggttaccgggctcgagcccggggtttcttacatttttagccttacacctgtgctcgacggcgtacgcggtccggaggcaagcgtgacccagacccccgtttgccccaggggactggccgatgttgtatttttaccacacgcaacacaggataacgcccatcgcgctgaggccacgcggagggtgctggagaggctggtgctggctttaggcccactgggcccccaggctgtccaggtgggtctgttatcctactcccataggccctccccattattcccattgaacggctcccatgatttgggtattattctccaacgcattagagacatgccctacatggacccctctggaaacaatctgggcactgctgtggtcaccgctcacaggtacatgcttgcgcctgatgcgcccgggcgaagacagcacgtgccaggggttatggtgctattggtggacgaaccacttcgtggtgacatttttagccctatccgcgaggcacaggcgtccggactaaatgtggtcatgctcggaatggccggagccgacccggagcagcttagacggctcgcaccaggaatggattcagttcagacattcttcgcagtggatgatgggcccagccttgaccaggctgtgtctggtctggcgaccgcactatgccaagcttcatttaccacgcagccgcgacctgaaccttgcccagtctactgtccaaaaggtcagaagggcgagccgggcgaaatggggctgcgtggtcaagtgggccctcccggggaccccgggttgcccggtagaactggtgcccctgggcctcaggggccacctgggtccgccactgcgaaaggggaaagaggattccccggcgcagatggcagaccaggaagcccaggaagggccgggaacccagggacccctggtgcgccagggctgaagggatcccccggactacccggtccacgcggcgatccaggagaaaggggtcctaggggccccaagggcgaaccaggagcccctggccaggtaattgggggtgaagggcccggactgcctggaagaaagggcgaccccggtccctccggaccccccggtccacgggggccgttaggtgatccaggccctcgaggaccgccaggattaccggggaccgccatgaaaggcgataagggcgatcgcggcgaacgggggccgcccggccctggcgagggcggaattgcccctggggagcctggcctccccggtctccccggatccccagggcctcagggccctgttggcccacctgggaagaagggtgagaaaggtgattccgaagacggtgctccggggctcccggggcaacctggatcacctggcgagcagggaccacgcggaccaccaggggctattggcccgaaaggggatcgggggttccctggcccgcttggggaagccggagaaaaaggggagcgggggcctcccgggcctgcggggagcagaggcctgccgggtgtagccgggcgacctggcgccaaggggcccgaagggcctcctggacccaccggaagacagggagaaaagggcgagcctggtaggcccggagaccccgccgtggttggacccgctgtggcgggccctaagggcgagaaaggggacgtgggccctgctggccccaggggggccactggcgtgcagggagagcgcggcccgcccggcctcgtccttcctggcgatcctggccctaaaggcgatccaggagaccggggcccaatcggtcttactggccgagcagggcctcctggagattctgggcctcctggggagaaaggggaccctggcagacccgggccacccggaccggtgggtcctcggggacgggacggcgaggtaggggagaaaggtgacgaaggaccacctggagaccccggactgccggggaaggcaggggagcgcgggttgagaggcgccccaggagtgcggggaccagtgggcgagaagggcgatcagggggacccaggcgaagacgggagaaacgggtcacctgggagtagcgggccaaagggtgatagaggggagcccggaccacctgggcctcctggccggttggtcgatactggaccaggcgctcgagagaaaggcgagccaggtgacagggggcaggaggggcctcgcggccccaaaggggacccaggcctccctggcgccccaggcgagcgggggattgagggttttagaggaccaccagggccacagggggatccaggtgttagaggcccagccggcgaaaaaggtgacagggggcccccaggcctcgacggtagatccggcttagacggaaagccgggagccgccgggcccagtggtcctaatggcgccgctggcaaggcaggggatccgggacgcgacggcctacctggattgcgtggcgagcagggtctacctggtccaagcgggcccccgggactgccaggaaagccgggcgaggatgggaaacctggattgaacggcaaaaatggcgaaccaggggatccaggtgaggacggccggaaaggggagaagggtgatagtggtgcttccggcagagagggacgagacggccccaagggggaacgcggggctccagggatcctaggacctcagggcccgccagggctgccgggcccggtcgggccacctggacaggggtttcccggtgtccccggggggactggccctaaaggggatcgcggagagaccgggtccaagggtgagcagggtctgcctggagagagaggtttaaggggggagcccgggtccgttcctaacgtagatcgcctgctcgagaccgccggcataaaggcttctgcacttcgcgaaattgtggaaacctgggacgaatctagcggcagttttttacccgttcctgaacggcgacgaggtccaaaaggcgactctggagagcaagggccgccaggcaaagagggccccataggttttccgggggaacgcggattgaagggggatcggggggacccggggccccagggaccaccagggctcgcactgggcgaacggggccccccaggaccctctggactggcaggtgagccaggtaagcctgggattcccgggctcccaggccgagctggtggagtcggggaagccgggcggcctggggagcgcggcgaacgcggagagaaaggtgaaaggggcgaacagggtcgggatggcccccccggtttgccaggcacccctggaccgccaggtccccccgggcccaaagtcagcgtcgatgaaccgggtccagggctctctggggaacagggcccacccggactgaaaggcgctaagggagagccagggtcgaacggggaccaaggtccgaagggcgaccgcggggtgcctgggatcaaaggagaccgaggcgagccagggccccggggacaggacggtaacccaggattgcccggtgagagaggaatggctggcccagagggcaaacctggattacagggtccaagaggaccccccggtccggtcggcggccacggagatcccggtcccccaggagctcccgggctggctggtcctgccggacctcagggcccctccggattgaagggtgaacccggagaaacaggaccgccgggccgggggttgacgggacccactggcgccgtcggactgcccggccccccggggccatccggactagtgggtccccaaggatctccaggcttacccggccaggttggtgaaactggaaagcccggcgcacccggtagagacggcgcaagcggtaaagacggagaccgcggatctcccggtgtaccaggctctcccgggctgcccgggcctgtcggtcccaagggcgagccaggtcccaccggagctcctgggcaagcagtcgtgggcttgccgggtgccaaaggagagaaaggggcccctggcggattggctggggacttggtcggtgagcccggcgccaaaggggatagaggacttcccgggccaagaggagagaagggagaagcaggccgcgccggggagcccggagatcccggagaagacgggcagaaaggcgcaccagggcctaaaggtttcaaaggagacccaggggtcggggtccccggtagccccgggcctcctggtccaccaggagtaaagggtgatcttggccttcctgggctccccggcgctcccggggtggtcggcttccctgggcagaccgggccgcgcggggagatgggccaaccagggccttcgggagaacgcggactggccggccccccagggcgggaaggaatacctggtccgctgggccccccaggccccccggggtctgttgggccccccggcgcctctggccttaaaggggacaagggagatccaggtgtcggtcttcccggacctcggggtgagaggggtgagccaggtatcaggggcgaggatggacgccccgggcaggaaggtcctcggggattgactggcccacccggcagtagaggtgaaaggggcgaaaaaggggacgtgggctccgctgggttaaagggggataagggcgattcagcagtgattttgggcccacccggacctcgaggcgctaagggcgacatgggtgagagaggtccgcgcggactcgatggagacaagggacccagaggcgacaacggtgatccaggagataagggaagcaaaggtgaacccggagataaggggagcgcgggcctgcccgggcttcgtggactacttggaccacaaggacagcctggagcggccggcatcccgggggacccaggctctcctggcaaggatggggttcctggcatcagaggggaaaagggggacgtcgggttcatgggaccccgcggtcttaagggtgaacgcggtgtaaaaggcgcttgtggcctggacggagaaaaaggggacaaaggcgaggctggacctccgggccggcctgggctggccgggcacaagggtgaaatgggcgagccaggtgtcccagggcaaagtggtgctcccgggaaggagggactgatcggccccaaaggggacagagggtttgacggacagccagggcccaaaggcgaccaaggcgaaaaaggcgaaagaggcacccctggcataggcggttttccagggccttccggcaatgatggatctgccggcccccccgggcctcctggaagcgtgggtccacggggacctgagggtctccagggccagaaaggcgagagaggccctccaggcgagcgggtcgtgggagcccctggcgtgcccggagcacccggcgagaggggagagcaggggaggccgggacctgccggtcccaggggggagaaaggcgaagctgctctgaccgaggatgacatacgcggtttcgttcgacaagaaatgagtcagcactgtgcttgccagggccaatttatcgccagtggaagtcgccccctcccttcctacgccgctgataccgccggaagccagctgcatgccgtacctgtgctccgcgtgtcgcatgctgaggaggaagagagggttccccccgaggatgatgaatacagcgaatactccgaatacagtgtggaggagtatcaggatccagaagcgccttgggattccgatgacccatgttcacttcctctggacgagggctcatgtacagcttacacactgagatggtaccatagggctgttaccgggagtacagaggcgtgtcacccgttcgtatacgggggctgcggtggcaacgctaatcggttcgggactagggaagcttgcgaacggagatgcccccctcgtgtcgtgcagtcccagggcactggcactgcccaggac

SEQ ID NO: 9629 - DNA, 8832 bp, synthetic construct
  misc_feature 1..8832: note = source = /note="Description of Artificial Sequence: Synthetic coding sequence"
  source 1..8832: mol_type = other DNA
atgaccttgagactgctagttgctgctctgtgcgcgggcatcctggcagaggccccacgcgtgagggcgcaacaccgtgagcgcgtgacttgcacaagactgtacgccgcagacatcgtctttctgctagacgggtcttcgtccatcgggagaagtaattttagagaagtcaggtcttttcttgaggggctggtcttgccattttccggcgccgcatcggcccagggggtgcgcttcgctacggtgcaatactctgacgacccccgtaccgagtttggcctggatgcactcggttctggaggcgatgtaatccgggctatcagagagctttcttataaagggggaaatacacggactggcgctgccattttgcatgtggccgaccacgtgttcctgccccagctggctaggccgggcgtacccaaagtgtgtattctgatcaccgatggaaagagccaagacttggttgacaccgccgcgcaacgcctgaaggggcagggggtcaaactgttcgctgttgggataaagaatgcagaccccgaagagctcaagcgggtggctagtcagcctacgtctgacttctttttttttgtgaacgatttcagtattctgagaacattgctccctctcgtgagccgtcgagtctgcacaactgcaggtggcgtccccgtgacccgccccccagacgatagtacaagcgctccccgcgatcttgtactatcagaaccaagttcccaaagcctgagggtgcagtggactgctgcgtctggtccagtcaccggatataaggtgcaatatacaccactgacggggctggggcaacccttgcctagcgaaaggcaagaggttaatgtgccggctggcgaaacatctgttagactcaggggactgagacctctgactgagtatcaggtcacagtgattgccttatatgccaattctataggagaggcggtttctggaacagctaggacaactgcgcttgaagggccagaactcaccattcagaacaccaccgcccattccctgctggtggcctggaggtcggtgccgggtgccacaggttatagggtgacctggcgcgtgctgtctggcggacctacacaacaacaagaattaggccctggccaggggagtgtcttgcttagagacctggagccaggaactgactacgaagttaccgtatccaccctctttggaagatccgttgggcctgctacttcactgatggcccggacggatgcctctgtagagcagaccttgcggcctgtcatccttgggcccacatctatccttctctcgtggaaccttgtgccggaagctcggggctacagactcgaatggcgtcgtgaaacaggtttggagcccccgcagaaggttgtgctcccctctgatgttacccggtaccagctggatggcctgcagcctggtactgagtacaggctcacactgtacacactgctggagggtcacgaggttgcgaccccagcaactgttgtgcctacaggccctgaactccccgtaagtccagttacagatctgcaggcgacggagctaccaggacagcgggtgagggtctcctggtcaccggtgccgggagctacacaataccgtataatcgtgcgaagtacccagggggtagagaggaccctagtccttcctggcagtcagacagcgtttgatctcgacgacgtgcaggcagggctatcctataccgtacgagtgtccgcccgcgtgggaccgcgtgagggtagcgcgagcgtcctgacagtgcgtagagagccagaaaccccgttggcagttcccgggctgcgagtggtcgtctctgatgcaactcgggtgagagtggcttggggtcccgtgcccggagcaagcggattcaggatcagctggagcacagggagtggccctgagtcgtcgcaaaccctgcctccagattccaccgcaacagatattactgggctgcagcccggcaccacatatcaggtggctgtttcagtccttagaggtcgagaggagggtcccgccgccgtaatcgttgctcgcacggatccacttgggccagttcgcaccgtccacgtgacacaggcctcttcttcttccgtaaccattacctggactagggtgccgggggccaccggttatcgggtttcatggcactccgcccacggtccagagaagagtcagttggttagcggcgaggccactgtggccgagctggatgggctcgagcccgataccgagtacaccgtgcatgtgcgagctcatgtcgccggagtggacggaccccctgctagtgtcgtggttaggacagcccccgaacctgtggggagagtctcaagactgcagattctcaatgcaagctcggatgtccttagaataacttgggtcggtgttaccggtgctaccgcatacaggctggcctggggacgaagtgaaggaggacctatgagacatcaaattcttcccggcaatacagattcagccgaaattaggggactggagggaggagtgagctacagtgttcgggtgacggccctcgtgggtgacagggaaggtacacccgtgagcatagtggtgactaccccccctgaagctccacccgctctgggtacactgcatgttgtgcagagaggagagcattccctgcgactcaggtgggaaccagtcccgcgagcccagggcttcctactccattggcagcccgaaggcgggcaagagcaatccagagtgctcggacctgaattgtcctcctatcacctggatggtctcgagcccgcaacacagtatagagtcaggctttcagttctgggaccagcaggtgaggggccttctgccgaggtgacagcccgaacagaatctccccgcgtccccagcatagaactgagggtggtggataccagcatcgatagcgtgaccctggcctggactcctgtaagcagagcaagctcctatatcctaagctggagacctcttagaggacccggacaggaagttccagggtctcctcaaaccctcccgggcattagctcatctcagcgggtaacaggcctcgagccaggcgtttcctacatattctctctgacccccgtcctggacggtgttcggggcccagaggcttccgtgacccaaactcccgtctgcccccgtggcctggccgacgtcgtgtttttaccgcacgccacccaggataatgcccaccgagccgaggcaacccgacgagttctggaacgcctggtgctagctctggggcctctcggtccacaggccgtgcaagtgggcctgctgtcttactcacaccgacccagccctctattcccgctgaacgggagtcacgatctgggaataatcctgcagcggataagagacatgccttacatggacccttcagggaacaatctcggcactgcagtagtcaccgctcaccgttacatgcttgcgccagatgcaccgggcagaaggcagcatgtgccgggcgttatggtactgctggtggacgagcccctgaggggagacattttctcgcccatacgggaggcccaggcgtcggggctgaatgtggtaatgctgggaatggccggcgctgatccagagcagctgagacggcttgcaccaggaatggactctgtgcagaccttctttgccgtggatgacggccctagcctagatcaagcagtgtccgggcttgccaccgccctttgtcaggcttccttcaccactcagcctcgccccgaaccctgcccagtttactgcccaaaagggcagaaaggggagcctggtgaaatgggactgcggggacaagtggggcctcccggcgatccgggactgcctggtcgcacaggcgctcccgggccgcagggtccccctggaagcgcaactgccaaaggggaacgtggtttcccaggtgcggacgggcgtcctggatccccaggaagagctggtaacccaggcacgccaggagcaccaggtctgaagggtagtcctggactccctggacccagaggtgatcctggcgaacgggggccccgcggaccaaaaggagagcccggagcaccagggcaagtcattggcggtgagggtcctgggctacctggtcgcaagggagatcctgggccaagcggcccaccagggccacgggggcccctcggagacccaggcccaagagggccacctggcctgccaggcacagcgatgaagggggacaagggcgaccgaggcgaaagagggccacctggccctggcgaaggaggaatagcccccggagagcccgggctccctggattgcccggttccccgggaccccagggccctgttggacctccgggcaagaagggcgagaaaggcgattcagaggatggggcacccggtctgccaggacagccggggtcacccggcgaacaggggccaagggggcccccaggcgcaattgggcctaaaggggatcgaggatttccaggacctctcggggaagcaggcgaaaagggagagcgcggccccccaggaccggccggctctcggggactgccaggtgtggccggtagaccaggggcaaaggggcctgagggcccccccggtcctacaggccgccagggcgaaaaaggagagccaggacgcccaggggaccctgcagtggttggacccgcagtggcggggcccaagggcgaaaaaggggatgtgggaccggcaggcccccggggagccaccggagtgcagggcgaacgggggcctccgggtctggttctgccaggagatcctggtcctaaaggagacccaggggatagaggaccgatcggactcacgggccgcgctggcccccctggtgatagcggtccgcctggggagaagggtgatccaggtagacctggcccccctgggcccgttggacccagaggcagggacggtgaggtgggggaaaagggagacgagggtccaccaggtgaccctggactccctggtaaggctggcgagcgtgggctgaggggggcgcctggcgtccggggtcctgttggggaaaagggagaccaaggggaccccggcgaagatggtcggaacgggtccccaggatccagtggacccaagggagacagaggggagccaggcccccccggaccaccagggcgtcttgtagatacaggtcccggcgcaagggaaaagggcgagcccggcgaccgggggcaggaggggccgcgaggcccaaagggtgatcctgggcttccgggagccccaggcgagaggggaatcgaaggcttcagaggacctcccggtccacagggagaccctggagtcaggggccccgccggcgagaaaggggaccgaggaccaccggggctcgatggtagatcaggcttagacggcaaacctggagctgccgggcccagcggacccaacggcgctgccggcaaggccggtgaccccggccgggatggactacccggcctccgcggggagcaaggtcttccaggcccttctggaccccccgggctccctgggaaacctggcgaggacggcaaacctggactgaatgggaagaatggcgagcccggagacccaggagaggacggccgcaagggcgagaagggcgatagtggagcttcgggaagagagggacgggacggacccaagggcgaacgtggagcccctggtatactgggtccccaaggcccccctggcctgccaggccctgtggggccacccggtcagggattcccaggcgtgcctggtggcactgggcccaagggtgataggggcgagacaggcagcaaaggagagcagggactgccaggcgagcgggggttaaggggcgaacccggctccgtcccaaatgtggaccgactgctggaaacggcaggaattaaggccagcgccctcagggagattgtcgagacctgggacgagagtagcgggagcttcctccccgtgcccgagagacgaaggggccccaaaggggacagcggtgagcagggcccacctggcaaggaagggcctatcggcttccctggcgagcgaggactgaagggggataggggcgatccgggcccacaaggaccaccaggattggccctgggggaaagaggaccccctggaccgtcaggcctcgctggagagccaggcaagcccggcatcccgggactgcccggccgagcaggaggcgtgggggaggccggtcgtcctggcgagcgtggggaacgaggggaaaaaggggagagaggtgagcagggcagggacggtccacccggccttccgggcacccccggaccgcctggtccgcctggcccaaaagtgtccgtggatgagcccggcccaggacttagcggcgagcagggacctcctgggctgaagggcgccaaaggcgagcctggctcaaatggagaccaaggccctaagggcgataggggggtaccaggtatcaagggagaccgcggcgaaccaggtccaaggggccaggacgggaatcctggtctgcctggggagagggggatggcagggcctgaaggaaagcctggcctgcaaggacctcgaggccccccaggccccgtgggagggcatggggatccaggccctccaggcgcgcctggcctggccggccccgccgggcctcaggggccttctggcttgaagggagagccgggggaaaccgggcctcccggcagaggtctgacaggacccactggagctgtcggactgcccggaccacctggcccgtccgggcttgtgggtcctcaaggctcgccaggcctccctggacaggtcggcgagaccggcaagccgggtgctcccggcagagatggagccagtggcaaggatggagaccgtggcagtcccggggtccccggctcacctggccttcccgggcctgtaggcccaaagggggagcccgggccgactggcgcgcccggccaggcagtggttgggcttcccggggcaaagggcgaaaaaggagcgcccggcgggctggctggggatcttgtgggtgagccgggggcaaagggtgatcgaggtctccctgggcctcgaggtgagaagggagaagccggaagagccggcgagccgggggaccccggagaggacggtcagaaaggcgcccccgggccaaagggttttaaaggggatcctggagtcggtgtccccggtagtcctgggccacccggcccacccggcgtcaagggcgacctggggttgcctgggttaccaggggctcccggtgtggtcggcttccccggacagaccgggccccgtggtgagatggggcagccaggcccttccggggagagggggttggctggcccccctgggcgggaggggatccccgggcctctgggcccccctgggccacccggatctgtcggtccccctggtgcctcgggcctaaagggggataaaggggatcctggcgttggtttacctggaccacgaggagaacgtggggagcccggcatccggggtgaggacgggaggccgggtcaagagggcccacgtggcttgaccgggccacccggatccaggggggagcgcggcgaaaaaggagacgtcggatcagctggtctgaagggggataaaggcgattccgcggttatcctcggaccaccgggaccaaggggagcgaaaggcgacatgggcgagagaggacctagaggcctggacggagacaaaggaccacgcggggataatggtgaccctggggacaagggtagcaaaggagagccaggagacaaaggcagcgctgggcttcctggactgagaggcctgttgggccctcaggggcagccaggtgcagctggtatcccgggcgacccagggagcccaggcaaagacggggtgccgggaatcaggggagagaaaggagatgttggctttatgggaccacggggcttgaagggtgaaaggggagttaaaggagcctgtggcttggacggcgaaaagggcgataagggggaggccggccccccaggcagacctggacttgcaggccacaagggcgaaatgggggagccgggggtaccggggcaatctggagcccctggtaaagagggcttgattggccccaaaggtgaccgagggttcgacggccagccaggacctaagggcgaccagggagagaaaggtgaacgaggcactcctgggatcgggggcttccctggccctagcgggaatgatggaagcgcgggtccgcccggtccgccaggctccgttggaccgagagggcctgaagggctccaaggccagaaaggcgaacgtggccctcccggagaaagggtagtgggtgcccctggagttcctggcgcgccgggtgagcgtggagagcagggacggccaggacctgcaggtcctaggggcgagaaaggcgaggctgcgctgactgaggacgatataaggggcttcgtgagacaggagatgtcgcagcactgtgcatgccagggtcagttcattgcttctggatctagaccactgccgtcctacgccgcagacacggccggaagccagttacacgctgttcctgtgttaagagtgagccacgccgaggaagaagaaagagtgcctccagaggacgatgagtactctgaatacagcgagtacagtgtcgaagaataccaggaccccgaagccccctgggatagtgatgatccctgtagtttgccgttggacgagggatcatgcactgcctatacactgagatggtaccaccgggcggtgacaggctctacggaggcgtgccaccccttcgtctacggcggctgtgggggaaatgcaaacaggtttggtacacgggaagcttgcgagaggagatgtccccccagggtggtgcaaagtcagggcaccggcaccgcccaggac

SEQ ID NO: 9630 - DNA, 8832 bp, synthetic construct
  misc_feature 1..8832: note = source = /note="Description of Artificial Sequence: Synthetic coding sequence"
  source 1..8832: mol_type = other DNA
atgactctccggctcctggtggccgctctctgtgccggtatcttggccgaggcaccgcgcgtgagggcccagcacagagagagggtgacttgcacccgactttacgccgctgatatcgtctttctgctggacggctcgtcgagtatcgggcggagcaacttccgggaggtgcggagcttcctggaaggccttgtgttgcccttctctggagccgcgagcgctcagggcgtcagattcgctactgtccagtactcagacgacccgagaaccgaattcggacttgacgctctgggctcaggaggagacgtgattcgcgcaatccgcgaactctcatataaaggcggaaacacgcggacgggagcggctatcctccacgtcgcggatcatgtgttcctgccgcagctggcacgcccaggagtgccaaaagtgtgcatcctcattaccgatggaaagtcgcaagacctggtggacaccgcggcacagcgcctgaagggccaaggagtgaagctgtttgctgtgggtatcaagaacgcggacccagaagaactgaaacgcgtcgcgtctcagccgacttcggactttttctttttcgtcaatgatttctccattctgaggactttgctccctcttgtgtcacgccgcgtctgcactaccgccggaggagtgcctgtcacccggccgccagacgattccacctcagcaccgagagatcttgttctgagcgagccgtccagccagtcactgagggtccaatggaccgccgcttcgggaccagttaccggatacaaggtgcagtacactcctttgaccggactgggacaacctttgccgtccgaaagacaggaagtgaacgtgccggccggagagacttcagtgcggcttcgtggactgcgcccactgaccgagtaccaagtcacggtgatcgcgctttacgctaattctatcggagaggccgtgtcgggcactgcgcggaccaccgctctggaggggccggaactcacgatccaaaacactacggcgcatagcctcctcgtggcctggagaagcgtgcccggcgcaaccggataccgagtgacctggagagtgctgtccggcggacctacccaacagcaagaattgggtccgggacagggatccgtgttgcttcgggatctcgaaccaggcacggactacgaggtgactgtgtcaactctgttcggccggtccgtcggtcccgccacctcgctgatggcgagaaccgacgctagcgtggagcaaaccctgcggccagtcatcctcggtccaacttccatcctcctgtcctggaatctggtcccggaggcgaggggctaccggctggagtggagacgcgaaactggcctggagcctccgcaaaaggtggtcctgccaagcgacgtgactcggtaccagttggacggtctgcagccaggaaccgagtaccggctgaccctctacaccctccttgagggacacgaggtggccactcctgccaccgttgtgccgaccggtccagagctgccggtgtcgcctgtgaccgaccttcaggctactgagctcccgggtcagagagtgcgggtgtcgtggagtccggtccctggcgctactcagtacagaatcatagtccgcagcactcaaggcgtagaacgcaccctggtgctcccgggatcgcagaccgcgtttgatctggacgacgtgcaggcaggactctcctacactgtgagggtttccgcgcgcgtgggtccccgggagggatccgccagcgtgctcacggtgagaagggaaccggaaactcccctcgctgtgccgggactgcgcgtcgtggtgtcggacgccaccagagtgcgggttgcctggggtccagtgcctggagcctcgggattccgcatttcctggtccaccgggagcggaccggagagctcgcagaccctgcctccggactcgactgcaaccgatatcactggactgcagccgggcactacctaccaagtggcagtctccgtgctgcggggtcgcgaggagggaccggcagccgtgattgttgcacgcactgacccgctcggcccagtcagaactgtccatgtgactcaagcgtcgtcgtcgtcagtcaccatcacctggaccagggtgccgggggccaccggctaccgagtctcgtggcactccgcccacgggcccgagaagtcccaactggtcagcggggaggccactgtggcagagctggatggacttgagccggacactgaatacactgttcacgtgcgggctcatgtcgctggagtggatggcccaccagcatccgtcgtggttcggaccgcccctgagcctgtcggaagggtcagccgactccagatcctgaacgcatcctcagatgtgctgagaatcacctgggtcggggtgactggcgctactgcgtatcgcctcgcctggggaaggtccgaagggggaccgatgagacatcaaatcttgccaggcaatactgatagcgcagaaatccgcggcctcgaaggtggtgtttcatactccgtccgggtgacggctctcgtcggggaccgggagggaacccctgtctccatcgtggtgactacccctcccgaggcaccaccggccctgggaactctgcacgtcgtccagcgcggtgagcattcccttcgcctcagatgggaaccggtgccccgggcgcagggatttctcctgcactggcagcctgagggtggccaggagcagtcccgggtcttgggaccggaactgtcgtcctatcatctggacggacttgaaccggccacccaataccgtgtgcgcctttccgtgttgggaccagcgggagaaggaccatcggctgaagtcactgcccgcactgaatccccgcgcgtgccttcgattgagttgcgcgtggtggacacttcgattgactccgtgaccctggcgtggaccccagtgtcccgcgcatcctcatacatcctctcgtggcgcccgctgcggggacctggccaagaagtgcctggctcgccccagactctgccaggaatctccagctcgcagagagtgaccggactggagccgggagtctcctacatcttctctctgaccccggtcctggatggcgtgcgagggccggaagccagcgtgacccagactccagtgtgtccgaggggactcgccgatgtggttttcctgccccacgccacccaggacaacgcgcaccgagccgaagcgactcgccgcgttctcgaacgcctcgtgctcgccctgggaccgctgggcccgcaggccgtgcaagtgggactgctgtcctactcacaccggccgtccccgctgttcccgctgaacggttcacatgatctcggcatcatcttgcagagaattcgggacatgccgtacatggatccgtccggaaataatttgggaacggccgtggtgactgcccacagatacatgctggcaccagacgcccccggacgcagacagcacgtgcctggggtcatggtgcttctggtggatgagccccttcgcggtgatatcttcagcccgatccgtgaggcccaagcctcaggactcaatgtggtgatgctcggaatggccggcgccgatccggagcaactgcggcgcctcgccccaggaatggactcggtgcagaccttcttcgcggtggacgacggaccgtcactcgaccaggccgtgtcgggactcgcgaccgccctctgccaggcgagcttcaccactcaacctcgcccggagccttgtccagtctactgccccaagggacaaaagggtgaaccaggggagatggggctccgcgggcaagttggccctcccggcgacccgggtctgccaggaagaaccggtgcgcccggcccgcaaggaccgccaggatcagccaccgccaagggagaaaggggatttccgggagccgacggccggccgggaagcccaggccgcgccggtaaccccggaactcctggcgccccaggtctgaagggaagccctggactgccaggcccgcggggcgacccgggcgaaaggggaccgcgtggcccgaagggggagcccggggcaccgggacaggtcatcgggggagaaggtccgggattgcctggcagaaagggggacccagggccgagcggccccccaggaccgagagggccacttggtgaccccggaccacgcggaccaccaggactcccgggcactgccatgaaaggagacaaaggcgacagaggagaacgaggaccacctggacccggcgaaggaggaatcgctccgggcgagccaggattgcctggactgccaggttcaccaggaccccaaggaccggtcgggcctccaggcaagaagggcgagaagggagactccgaagatggagcccctgggctgccggggcaacccggatcgccaggtgaacagggccctcggggccctcctggagcgatcggtccaaagggagatcggggattcccggggcctctgggcgaggctggagaaaagggagaacgcggaccaccggggccagccggttcgcggggtctgcctggtgtcgccggtagaccaggcgctaagggtccggaaggaccgcctggaccaaccggacggcaaggcgagaagggggaaccggggcggccaggagatcctgccgtggtgggcccggcagtggccggtcccaaaggtgaaaagggcgatgtggggccagccggaccgaggggagccactggtgtgcaaggagaaaggggtccaccgggattggtgctgccgggcgatccgggccccaagggagatcctggggacagaggaccaatcggtctgaccggaagggcgggaccaccaggagactcgggaccaccgggcgagaagggcgacccgggaaggccgggcccaccgggcccggtggggcctcggggtagggatggagaagtgggcgagaaaggagatgaaggaccgccgggggatcctgggctgccgggaaaggcaggggagcgcggcctcagaggtgcgccgggagtgaggggcccagtcggagaaaagggggaccagggcgatccaggcgaggacggccgcaacgggagcccgggttcctcgggaccgaaaggtgaccggggagaacctgggccgccgggtccccctgggagactggtcgacaccggccctggagcccgggaaaagggtgagccgggggaccgcgggcaggagggccctcggggcccaaagggggatcctggactgccgggcgctccgggagaacggggaatcgaaggatttcggggaccgccgggcccgcagggggacccaggggtgcggggaccagccggtgagaagggtgaccgcggcccgcccggactcgacggtagatccgggctggatggaaagcctggagcggctggcccgtctgggccgaacggagcggcgggaaaggcaggagatcccggacgcgacggactccctggactccggggagaacagggattgcctggaccgtcagggcccccaggcttgccgggaaagccgggagaagatggcaaaccagggcttaacggcaaaaacggagaaccgggggacccgggagaagatggtagaaagggcgaaaaaggagactcaggagcatcgggacgggaaggccgggacggacccaagggcgaacgcggggcgccaggaatcctgggaccgcagggacctcctggcttgccaggccctgtgggccccccgggccaggggttcccaggcgtgcccggagggacgggcccgaaaggagatagaggagaaaccggttcaaaaggagaacagggtctgccaggagaacggggactgagaggagaaccgggaagcgtcccgaatgtggataggttgctggaaactgcaggaatcaaggcgagcgcactgcgcgaaatcgtggaaacttgggatgaaagctccggatcattcctgccggtcccggagcggcgccggggacccaagggtgattctggcgaacagggccccccggggaaggaagggcctattggattccccggcgaacgcggactgaagggggatcgcggcgacccaggaccgcaaggcccgccaggcctggcgctgggagagcgcggaccgccgggtccatcaggactggcaggagaacccggaaagccggggatcccaggactcccgggccgcgcaggcggcgtcggcgaagccggacgaccaggagagcgcggggagagaggagaaaaaggagagcgcggcgagcaaggacgggacggcccgccagggctgccaggaaccccgggccctccggggccgccagggcctaaggtcagcgtggacgaaccgggaccgggcctctcaggagagcagggaccgcccgggctgaagggcgcaaaaggcgagcctgggtcgaacggggatcagggcccgaagggagatcggggcgtgcctggaattaagggtgaccggggtgagccgggaccgcgcggtcaagacggaaacccagggctccctggggaacggggcatggctggacccgaggggaagccagggctccaggggccacgcggaccgccgggcccggtgggaggacacggcgacccgggaccgccaggcgctccaggactcgctggaccggccggcccgcaggggccgtcgggtctgaaaggagaacccggagagacgggaccgccggggcgaggacttactggccccactggcgcagtgggcctgccaggtccaccgggaccttcaggtcttgtgggaccccagggctcccctggcctgcccggacaggtcggagaaactggaaagcctggggcgcccggaagagatggcgcatcgggaaaggacggcgaccgcgggagccccggtgtgcccggatcgcccggcctcccgggacctgtcgggccaaagggagaacctggacctactggtgcaccgggacaggcggtggtgggactgccgggagccaaaggagaaaaaggagcgccgggaggtctggctggtgatctggtgggggaacctggggccaagggcgaccggggacttccgggaccgagaggagagaaaggagaggccggccgcgccggagaacccggagatcctggagaggacggacagaagggagcgcctggaccgaaaggattcaagggagatccgggagtgggcgtcccgggttcaccaggaccgcccggccccccgggagtgaaaggtgacctggggctgccgggtctgccaggcgcgcccggggtcgtaggattccctgggcaaaccggaccgcgcggagagatgggacaaccaggcccatcaggggagcgcggactcgcgggaccaccgggtcgcgagggtatcccgggccccctcggaccacctggtccaccgggatcggtgggaccgccgggggcaagcggcctcaaaggcgacaagggagatccaggagtgggcctgccaggacccagaggcgagcgcggagagccgggaatccgcggggaggatggaaggccgggccaggaaggaccacgggggctgaccgggcctccgggctcgcgtggagaacggggagagaagggggacgtgggatcagctggactgaagggcgacaagggagacagcgcagtcattctggggcctccgggacctcgcggggccaagggagacatgggcgaacgcggaccgaggggtctggacggggacaagggaccgcggggcgataatggggatccaggcgacaagggatccaagggagaacctggagacaagggatcggcaggcctcccaggactgcgcggtttgctgggcccacagggccagccaggagccgccggaatcccgggtgaccctggctccccggggaaagacggagtgccaggaatcaggggagaaaaaggggacgtgggcttcatgggacccagaggcctcaagggcgaacggggagtgaagggagcgtgtgggctcgacggagagaagggagacaaaggtgaagccgggcctccgggtcggccgggcctggcaggccacaaaggcgaaatgggcgagcctggagtccccggacagagcggagccccaggaaaagaagggctgatcggaccaaagggagatcgaggcttcgacgggcaacctggcccgaagggtgatcagggagaaaaaggagaacgcggtaccccaggaatcggaggctttccaggaccctcaggcaacgacggaagcgcgggcccgccaggaccgccagggtcggtgggaccgagaggacccgaaggactgcagggacagaaaggcgaacggggacctccaggtgaacgcgtggttggtgcgccgggagtaccgggcgctcctggtgaaagaggtgagcagggacgcccgggacccgccggacctcgcggagagaagggagaagcggctcttaccgaggatgatatccggggattcgtgcgccaggaaatgtcccaacactgcgcctgtcaaggccaatttatcgcctcgggttcgaggccactgccgagctacgcagctgatacggccggatcacagctgcatgcagtcccggtcctcagggtgagccatgcggaagaggaagaacgcgtcccgccggaggacgacgaatacagcgagtattccgaatactcggttgaagagtaccaagaccctgaagcaccctgggattcggatgacccgtgcagcttgcctctggacgaaggctcgtgcacggcttacaccctccggtggtaccaccgcgccgtcaccggttcgacggaggcatgccatccttttgtctacggcggatgcggtggcaacgcgaatcggttcggaaccagggaggcctgcgagagaagatgcccaccgagagtggtccagtctcaaggaacggggactgcccaggat

SEQ ID NO: 9631 - DNA, 8832 bp, synthetic construct
  misc_feature 1..8832: note = source = /note="Description of Artificial Sequence: Synthetic coding sequence"
  source 1..8832: mol_type = other DNA
atgaccctgagactgcttgtcgcggccctttgcgccggcattctcgccgaagccccccgtgtgagagcgcagcaccgcgaacgtgtgacctgcacgcgattgtacgccgcggacattgtgttcttgttggatggttcgtcctcgattggacggtctaattttcgagaagtgcgcagcttcctagagggactagttctgcccttttcgggtgccgccagcgcacagggagtccgcttcgctacagtgcagtacagcgacgacccacgaacagagtttggactggacgcgttaggtagcggcggggatgtgatccgagccattagggagctgtcttataaaggaggtaatacgaggacaggggcagctattttgcatgtggccgatcatgtgtttctcccgcagttggctcgcccgggcgtaccgaaggtgtgcatattgataactgacggtaagtcccaggatcttgtcgatactgccgctcagcgattgaagggacagggagtaaagttatttgcagtaggaatcaagaacgcggatccagaagagctgaagcgggtagcctctcagcccacgtcggatttctttttcttcgtgaatgacttctccatccttcgcaccctgttaccgctggtgagcaggcgtgtgtgtaccacggccggtggagtccctgttacacgtccaccggacgattcgacatccgccccccgagacttggtgctaagcgaaccgtccagccagtcgctgcgagtgcagtggacggcggcctctggcccagttaccggctacaaggtacagtacacgccgctgacaggactgggtcagcccctcccgagtgagaggcaggaagtaaacgtgccggccggcgagacttccgtgcggctgcgcggattgcgccccctcacggagtatcaggtgacggtgatcgctttgtatgcgaacagcatcggcgaggcggtgtcaggcacagcgcggaccactgctcttgagggacccgagcttactattcagaatacgacggctcacagtctgctagtagcctggcgcagcgtccctggtgccacaggctaccgcgtgacatggcgtgtcctatcgggcggaccgacgcaacaacaagagttgggaccaggacaggggtcggttctgttacgcgatctagagcccggaaccgattatgaggtgactgtctcgaccctgttcggacgctccgttggccccgcaacgtcgttaatggcgcgcacggacgcaagtgtggaacagaccttgcgtcccgtaatcctgggtccgacgagcatcctgctgagctggaacctagtgcccgaggcccgcggataccgtttagaatggcgtcgtgagaccggcctcgaaccaccgcagaaggtagtgctgccaagcgatgtcacacggtatcagctggatggactgcagcccggaaccgagtatcggctcactctgtacaccctattggagggacatgaggtagccaccccggccacggtggtgcccactggccccgagctgcccgttagtccggttaccgatctgcaggccactgagctccccggccaaagggtccgtgtgagttggtcccccgtgcctggcgctacccagtaccgcattatcgttcgtagcacacagggcgtggaaagaacactggtgctccccggctcccagacggccttcgatctcgatgatgtgcaagctggccttagctacaccgtgcgggtgtctgcacgtgtaggaccaagggagggatctgcatccgtactcactgtccggcgcgagccggagacccccctggctgtgcccggcctgcgagtagtcgtttcagatgcgactcgtgtgagggtggcatggggcccagtccctggcgcctccggattcagaataagttggtcgacaggatccggtccagaatccagtcagaccttgccgccggactcaaccgcaacggatattaccggcctgcagcccggtaccacctatcaagttgcggtttccgtgttgcgcggccgcgaggagggccccgccgcagtgatcgttgccaggacggaccccctgggcccggtccgcacagtccacgtgacgcaagcttcgtcgagctctgtaactatcacctggacccgagttccaggagccacgggctacagggtaagttggcactcagcgcacggtccagagaagtcccagttggttagcggagaagcaactgttgccgaactggacggtctggaacccgatacagagtataccgtgcatgtgcgcgcccacgtggcgggggtggacggcccccccgcgagtgtcgtggtgcgcacggccccggagcccgttggtcgtgtgtcgcgtctacagatactgaacgcttcgtccgacgtcctccgaataacgtgggtcggcgtgaccggagccaccgcatacagattagcatgggggcgctccgaaggtggacctatgcgccaccagatcctaccgggcaacacagattcggcagagatccgcggtttggaaggtggcgtcagctactcggttcgagttacggcactcgtaggcgatcgcgagggaacccccgtcagtatcgtggtgacaaccccgccggaggcccccccagctctggggaccctccacgttgtgcaacgcggcgaacattccctgcgcctgaggtgggagccggttccaagagcccagggattcttgttacattggcagccagagggaggtcaggaacagagtcgagtgctcggccccgagctttctagctatcacttggacggactggagcccgccacgcagtatcgggtccgcctgtccgtgttgggccccgcgggtgagggaccgtccgccgaagttacggcccggaccgagagtccgcgcgtgccatcgattgagctgcgcgtcgtggataccagcattgacagtgtgacgctggcctggacacccgtctcgcgcgccagctcgtatattctgagttggcgccccctgcgcggcccaggtcaggaggtgccgggaagtccgcagacactgccaggaatcagctctagtcaaagagtgacgggcctggagccaggagtgtcctacatcttttctctgacccccgtgttggacggtgtgaggggcccggaagccagcgtcacgcagacacccgtgtgccctcgaggcctagcagatgttgtgttcctgccccatgccactcaagataacgctcaccgcgctgaggccacacgacgggtcctagagaggctggtcctggccctcggccccctgggcccacaggccgtccaagtgggtcttttgtcatacagtcacaggccaagcccactgttcccactgaacggtagccacgacttgggtataatactccagcgtatcagggatatgccctacatggatccatcaggaaacaatctgggcacggcagttgtaacggcgcatcgttacatgctggctcccgacgcaccaggtcgcaggcagcacgtgccgggcgtgatggttctgctggtggacgagccactgagaggcgacatcttctcgccgatccgcgaagcccaggcgagtggcctgaacgtggttatgttgggaatggcgggtgccgacccggaacagctgcgacgactggctcccggaatggattcggtgcaaacatttttcgccgtcgatgatgggcctagcctagatcaggccgtgtctggactggctacggcgctgtgccaagcatcgttcaccacccagccgcgccctgagccgtgtccagtgtattgcccaaagggccagaagggtgagccgggcgagatgggactcagaggacaggtgggaccccccggcgatccaggactgccgggacgaactggtgctccgggaccccagggccctccgggctcggccaccgcgaaaggcgagaggggctttcccggagcggacggacgtcctggctcgcccgggcgtgccggaaatcccgggacaccaggtgctccaggtctaaagggaagccccggcctcccgggaccacgcggtgatccaggagagcgagggccgcgtggcccgaagggcgaaccaggcgccccaggccaggtcatcggaggagagggccccggtctaccgggacgcaagggcgacccgggcccgtcaggaccccccggtccccgaggacctctgggagaccctggccctcgtggtcccccaggcctacctggtaccgcgatgaaaggcgataagggggatcgtggggagcgcggcccgccaggcccgggcgagggaggtatagctccgggagaaccgggactgccgggtctcccaggctccccgggaccacagggtccagttggtcccccgggaaagaagggcgagaaaggcgatagcgaggacggtgctcctggactgcccggtcaacctgggagcccgggagaacagggcccccgcggacccccgggcgcaataggcccgaaaggggatcgcggattccccggcccgttaggcgaagccggcgagaagggcgagagaggccccccaggcccggcgggctcccgcggtctgccgggcgtcgccggtcgcccgggcgctaagggtccggaaggcccccctggtcccacaggacggcagggtgagaagggcgagcctggacgcccgggtgatccggcggtggtaggaccagcggtggctgggccaaagggagaaaagggcgacgtaggccccgcaggtccccgaggagccaccggggttcaaggcgagcgaggccctccgggtcttgtgctgccaggcgaccctggacccaagggggatcccggagatcgcggacctattggactgacgggacgtgccggaccacctggagattctggtcctccgggagagaagggcgacccaggccgtccgggcccaccgggaccggtgggtcctcgtggccgggatggggaggtaggtgagaagggcgacgaagggccaccaggtgacccaggactcccgggaaaggccggagagcgcgggctgcgcggtgccccaggggttcgcggacctgtgggcgagaaaggggaccagggtgatcctggcgaagacggtcgaaacggttcgcccggatcctcgggcccgaagggtgaccgtggcgaaccgggaccgccgggcccgcccggccgcttggtggacactggaccgggcgcgcgcgaaaagggcgagcctggtgaccgaggacaggagggcccgcgcggcccaaagggagatcccggactacccggcgctccaggcgagcgtgggatagagggttttagaggaccgccaggaccacagggggaccctggcgtgcgtggtccggccggagaaaaaggtgaccgcggcccccccggattggacggacggtcggggttggatggcaagcccggggctgcgggcccgtcaggaccaaacggcgcagcaggtaaggctggcgatcccggtcgggacggactgcccggcctccgaggcgaacagggtctgccggggcctagcggaccccccggattgccgggaaagcccggcgaggacggaaagcccggcctgaacggtaagaacggagagcctggagatccaggagaggacggccgcaagggcgagaagggcgattccggcgccagcggccgcgaggggcgcgatggacccaagggagagcgcggtgcgccgggcatcttaggcccccagggtccgccgggtctgccaggtcccgtgggtccgccgggacagggcttccctggagtgccaggaggcacagggccaaagggcgatcgcggagagactggttcaaagggtgagcagggcctgcccggagagagagggctgcgtggagagcccggtagcgtaccaaacgttgatcgcttgctggagactgctggcattaaagccagtgctttgcgtgagatcgtggagacatgggacgagtcgtcgggcagcttcctaccggtgccagagcgtcgacgaggcccaaagggggattccggcgagcagggcccccccggaaaggaaggcccaatcggtttcccgggagagcgggggctgaagggcgatcgtggagaccccggaccgcagggaccgcccggcttggcactgggcgagcgtggcccacccggcccgagcggtctggcgggcgagcccggaaagccgggtattccaggcctccccggacgcgcaggcggcgtgggtgaagccgggcggcccggagagagaggagagaggggagaaaagggggagagaggcgaacagggccgcgatggacctccgggcctccccggcaccccgggtcctcccggacccccgggcccgaaggtgagtgtcgatgagcccggcccaggtctgagcggagagcagggaccaccaggtctgaaaggcgcgaagggagagccgggcagtaacggcgatcagggacccaagggagatagaggcgtgcctggaatcaagggcgatcggggagaacccggcccccgcggccaggatggtaatccgggattacctggcgagcgcggaatggccggccccgagggcaaacctggattgcagggcccccgaggaccaccgggtcccgttggtggacatggagatcccggcccgccgggagcgcccggcctcgcaggtccggctggccctcagggcccaagcggattgaagggagagccgggcgagacgggtcccccgggacgtgggctgacaggcccgaccggcgccgtgggactgccaggacccccaggccccagcggtttggtgggaccacaaggctcgccaggcctgccaggccaggtcggcgaaaccggcaagccaggtgcgccaggacgcgatggggcatcgggaaaggatggtgaccgaggtagccccggcgtacccggaagccccggcttacccgggcctgtgggaccaaagggcgagcccgggccaaccggcgccccaggccaggccgttgttggtctccccggtgccaaaggcgagaagggcgccccgggaggcttggccggtgacctggtgggtgagccgggggccaagggagaccgaggactgcccggcccacgaggtgagaagggggaagctggccgtgcaggcgagccgggagatcccggagaggacggccagaagggggcacctggtccaaaaggcttcaagggcgatccgggcgtgggagtgccaggatcgcccgggccaccgggcccccctggtgtcaagggtgacctgggcttgccgggcctgccaggagcgccaggcgtggtcggattccccgggcagacaggtccgcggggcgagatgggacagcccggcccaagcggcgaacgcggcctggcgggtccgcccggccgtgagggcatacctggccccctggggccaccgggaccccccggctccgtgggacccccgggcgcttcgggtctgaagggcgacaaaggagatcccggcgtgggactgcctggcccgcgaggagagagaggcgagccgggaatacgaggagaagacggtagacccggccaggagggtcctcgcggcctgacgggacccccgggaagtcgaggagagcgcggagaaaagggcgatgtcggtagcgcaggcttgaaaggagacaagggcgattcagcagttatcttaggaccgcccggcccacggggcgccaagggagatatgggtgaacgcggaccccgcggcctggacggggacaagggtcccagaggcgataatggagatccgggcgacaagggaagcaaaggtgagcctggcgacaagggctcggccggcttaccgggccttcggggattgctggggccccagggccaacctggcgcggccggcatcccgggcgatccggggagcccaggaaaagacggagtgcccggcatccggggagagaagggggatgtgggctttatgggcccacggggactgaagggcgagagaggcgtgaagggtgcttgcggacttgacggcgagaagggcgataagggtgaagcgggtccgcccggccgaccaggactggctggccataaaggtgagatgggagaaccgggtgtgccgggacagtcgggcgcgccgggtaaagagggcttgatcggccctaaaggtgatcgcggttttgacggccagccaggcccgaagggcgatcagggtgagaagggtgagcgaggcacccccggcataggcgggttccccgggccctccggcaacgacggatcggcgggcccgcctggacctcctggttctgtcggcccgcggggacccgagggactccaaggccaaaagggagagcggggtccacccggagagcgtgtagttggcgcgcccggcgtacccggagctccgggcgagcgcggggaacaaggccgccccggcccggctggcccccgaggcgagaagggggaggcagctctcaccgaagacgacatacgaggctttgttcgtcaggagatgtcgcaacattgtgcgtgtcagggtcaattcatcgccagcggctcccgtccgctcccgtcctacgcggccgacacggccggatcccaactgcatgcggtccccgtgctacgagtgtcgcacgcagaggaggaagaacgcgtgccgccagaggatgatgagtattcggagtatagcgagtacagtgtcgaagagtatcaggatcccgaggctccatgggattcagatgacccctgcagcttacccctggatgaaggatcctgtaccgcctacaccctacgatggtatcaccgtgccgtgaccggttccaccgaagcatgtcatcccttcgtctacgggggatgtggcggtaatgctaaccgcttcggcacccgcgaggcttgcgaaaggcgctgcccgccacgagttgtgcagagtcagggtacaggaacggcccaagat

SEQ ID NO: 9632 - DNA, 8832 bp, synthetic construct
  misc_feature 1..8832: note = source = /note="Description of Artificial Sequence: Synthetic coding sequence"
  source 1..8832: mol_type = other DNA
atgactctgaggctgctggtggccgcattgtgcgctggaatcttggccgaagctccgcgggtgcgcgctcaacaccgggaaagagttacctgtacccggctttacgccgcagacatagtgttcctgctggacggcagctccagcattggaagatcgaactttcgggaggtacgatcgttcctggaagggttggtgctgccctttagtggagcagcctccgcccaaggagtgcggttcgccaccgtgcagtacagcgatgatccccggaccgaattcggattggacgcgctcggatcagggggagacgtcatccgggccattcgcgagctctcctacaagggagggaacactcggactggagctgccatcctgcatgtggcggatcatgttttcctgccccagctggcccgaccaggagtccccaaggtctgcatcctcataaccgacgggaaatcccaagacctggttgataccgccgcccagcgcctgaagggacagggtgtgaagttgttcgcggtaggaattaagaatgcggatccggaggagctgaagagagttgcctcccaaccaacgtcagacttcttctttttcgttaacgacttcagcattctcaggaccttgctgccgcttgtgtcaagacgcgtttgtaccactgccggcggggtgcccgtgactcggccgcctgacgacagcacttccgcaccgcgcgacttggtgctcagcgaaccaagctcgcagtcgctgagagtgcagtggactgcggcgtccgggccggtcactggatacaaggtgcagtacactccgcttaccggactcggccagccgctgcctagcgagcgccaagaagtcaacgtgccggccggggaaacctcggtccggttgcgcgggctgcgcccgctgaccgagtaccaggtgaccgtgatcgcattgtacgccaattcaattggcgaagcggtgtcgggaactgctagaaccactgccctcgaaggaccagaactgaccatccaaaacactaccgcgcattctcttcttgtcgcctggcgatcagtgcctggcgccacgggttaccgcgtgacttggcgcgtgctctcaggcggtccgactcaacagcaagaactcggcccaggacaaggttcggtgctcctcagggatcttgagccagggaccgattacgaagtcaccgtgtccactctgtttggacgctctgttggcccagccactagcctgatggccagaacggacgcaagcgtggaacagaccctgaggcccgtgattctcggacctacttcaatcctcctgagctggaaccttgtaccagaggcccggggttacaggctggaatggcgacgcgaaaccggattggaacctccacaaaaggtcgtgctgccaagcgacgtcactcgataccagctcgacgggctgcagccaggaaccgaatacagactgaccctctataccctgcttgagggtcacgaggtggcaaccccggccacggtggtcccaaccggcccggagttgccggtgtcgccagtgaccgacctccaggcgaccgaactgccgggacagagggtccgcgtctcgtggtcgccggtgccgggcgcgacccaatacaggatcatcgtcagatcgacccaaggcgtggagcgcaccctcgtccttccgggatcgcagaccgcgttcgatctcgacgacgtccaggccggactttcctacaccgtgagggtgtcagctcgggtggggccccgggagggatcggcatcggtgttgaccgtgcgccgcgaaccagaaaccccgctcgctgtcccgggcctgcgggtagtggtatcagatgcaactcgcgttcgggtcgcctggggcccagtgcctggagcctccggattccggatctcgtggtccactggaagcggccctgagtcctcgcaaaccctgccaccggacagcactgctacggatatcaccggactgcagcccggtactacctaccaggtggctgtatccgttctccgtggaagagaggagggcccggcagcagtgatcgtggcccgcactgaccccctgggaccagttcggaccgtgcacgttacccaggcttcgtcctcgagcgtgacgattacttggacccgcgtgcccggagctacgggttatcgagtgtcgtggcactcggcccacggacctgagaagtcccagctcgtgagcggcgaggccactgtcgcagagctggacgggctcgaacctgatactgagtacaccgtgcatgtgcgtgctcatgtcgcaggggtggatggacctccggcatcggtggtggtgcggactgccccggagccagtcggaagagtctcgaggctgcagatccttaacgcttcaagcgatgtgcttcgcatcacctgggtcggcgtaaccggagcaaccgcctatcgcttggcttggggccgctccgaaggaggacccatgagacaccaaatccttccaggcaatactgactccgccgaaatcagggggctggaaggtggcgtctcgtactcagtgcgcgtgacggcactggtgggtgaccgggagggcacgccggtcagcatcgtcgtgactactccaccggaggcaccgcccgccctgggaactctgcacgtggtccaaaggggcgaacatagcctgcgcctccggtgggaacctgtgccgcgggcccaaggattcctgctccattggcagcctgagggaggccaagaacagagccgggtgctgggaccggaactgtcctcctaccatttggacggtctggagccggccactcagtaccgcgtccggctgtctgtgctcggaccagccggagagggccccagtgcggaggtgacggccagaactgaatccccgagagtgccgtcgatcgaacttagagtcgtcgacacctccatcgatagcgttactctggcgtggactcctgtgtcaagagcctcatcgtacattctgtcctggcggccgctgaggggaccgggccaggaagtccctggcagtccgcagactttgcccggtatctcctcatcacaaagagtgactggactggaacctggagtgagctacatcttttccctcacccctgtactggatggcgtgagaggacctgaggcctcagtgacgcaaacccccgtctgtccgcggggcctggcagatgtcgtgtttcttccgcacgctacgcaggacaacgctcaccgcgccgaggccacccgccgcgtgcttgaaaggctggtccttgccctcggaccgttgggtccgcaggcagtgcaggtgggacttctttcctactcacaccgcccttccccactgtttcctttgaacggatcacacgatctgggaatcatactgcagagaatccgcgacatgccgtacatggacccgtcgggtaataacctgggaactgctgtggtgaccgctcatagatacatgctggctcccgacgcaccgggccgccgccagcacgtgccaggagtgatggtgctgttggtggacgagcccctgcggggggacatcttcagtcccatcagggaggcccaggcatcggggctgaacgtggtcatgctgggaatggcaggggcagaccctgagcaactccggcgactcgcaccgggtatggattcggtgcaaaccttcttcgcggtggatgatggaccatcgctggatcaagctgtcagcggactcgcgacggccctctgtcaggcttcgttcaccacccaaccccgccccgaaccctgccctgtgtactgcccaaagggacaaaaaggtgagcctggcgaaatggggctgcggggtcaggtcggcccgccgggagatccggggctccccgggcggactggggccccgggaccacagggcccccctgggtccgctaccgccaagggcgagagaggtttcccaggcgcggatggccgcccgggaagcccaggacgcgccgggaaccctggtactcccggagctccgggactcaagggatccccaggattgcctggaccgcggggggaccctggagaaaggggacccaggggaccaaagggcgaaccaggggccccgggccaggtgatcggcggagaggggccgggcctgccgggaagaaagggtgacccgggacctagcggaccccctggaccgcggggcccgttgggagatccgggtccgcgagggccgccgggactcccgggcaccgcgatgaaaggagacaaaggtgaccggggtgagcgcggccccccggggccgggcgagggtggcatcgccccgggagagccggggctccctggactcccagggtccccgggaccacagggccctgtcggcccgcctggcaagaagggcgaaaagggagactcggaggatggagccccaggactgccgggacaacctggttcccctggtgagcaagggccgcggggaccgcctggcgcgatcggaccgaaaggagatcgtggatttccaggtccgctcggtgaagcgggagaaaagggcgagcgcggcccacccggcccggcgggaagcagaggccttccaggagtggcgggtagaccgggcgcgaagggcccggaaggtccacccggacctactgggagacagggggaaaaaggcgaaccgggacgtccgggggaccctgcagtggtcggacctgctgtggccggacctaaaggtgaaaaaggcgacgtcggacctgcaggcccgaggggggcgactggcgttcagggtgagcgaggaccacccggactggtgttgccaggcgaccctggacccaaaggcgatccgggcgaccggggacccatcgggctcacgggacgcgcgggaccgcctggggattctggaccaccgggtgaaaagggggaccccgggcggccgggccctccgggaccagtcggaccgagaggacgtgacggagaggtcggtgaaaagggggacgagggaccgcctggcgacccggggctgcccgggaaggcaggagagcggggtcttaggggcgcgcctggcgtgcgcggacccgtcggggaaaaaggagatcagggggatcccggagaggacgggcgcaatggctcgccaggaagctccggtcccaagggagatcgaggcgaaccaggacctcccggacctcccggccgcctcgttgacactggtccaggagcccgggagaaaggagaaccgggggataggggccaggagggcccacgcggcccaaagggagatccaggccttcctggcgcgcccggagaacggggaatcgagggttttcgcggtccgccaggtccgcagggggacccaggagttcgaggaccagcaggtgaaaagggtgacaggggacctccgggacttgacggtcgctccggactggacggaaagccgggagctgccggaccatcgggccctaacggtgcagccggtaaggctggtgacccgggccgagatggacttcctggactccggggggaacagggactgccaggaccgtctgggccccctggacttcctggaaaaccgggagaagatggtaagccaggactcaacggaaagaatggagagccgggcgacccaggagaagatggacgcaaaggggaaaagggcgactcgggagcctccggacgggaaggacgcgacgggccgaagggagaacggggagctccggggatccttggacctcagggcccgcctggactgccgggacctgtcggtccgccagggcagggatttccaggtgtgccaggaggtaccggcccaaagggagatcgcggtgaaaccgggtcaaagggcgagcaggggctgccgggtgaaagaggactccgcggagagccagggtcggtgcctaatgtggatcggctgctcgagacggcgggtattaaggcgtccgcgctccgggagattgtcgaaacctgggatgagagctcaggatccttcctgccggtcccagaacgcagaagaggaccgaagggggacagcggggaacagggcccgccgggtaaggagggcccgatcggattccctggcgagagagggctgaagggtgacagaggggaccccgggcctcaaggcccgcctgggctcgcgctcggtgaaaggggacctccgggaccgtccggtctggcaggtgaacccggtaagcccggaattccaggactcccgggacgcgcaggtggtgtcggtgaagcaggacgcccgggcgagaggggagaaagaggggagaagggagaacgcggggaacaaggacgggatggcccgccgggactgccgggcactcccggacccccgggcccacctggacccaaggtgtcagtggacgagccaggacctgggctctcgggggaacaaggcccgccgggactgaaaggcgccaagggagagccgggatctaacggggatcagggaccaaaaggggaccgcggcgtgcctggaatcaaaggtgacaggggagagccgggaccacggggacaggacggcaaccctggtttgccgggagaacggggaatggctgggcctgaaggaaagccgggactgcagggtccgcggggaccacctggcccggtgggaggccacggcgacccgggccctccgggggcaccaggactggccggcccagcgggccctcaaggcccgagcgggctcaagggggaacccggagaaactggcccgcctggtagagggctgactgggccaaccggagcggtcggactgccaggacctccggggccttccggactggtggggccccagggaagccctgggctgcctggacaggtgggagaaaccggcaagccaggggcgccaggccgcgacggggcctcgggcaaggacggtgaccgcgggtcccctggagtcccgggatccccagggcttcccggaccggtgggacccaagggagaacctggtccgaccggtgctccgggccaagcggtggtgggactgccgggggccaagggagagaaaggcgcgccgggagggctcgctggtgacctggtcggcgaacctggagcaaaaggcgatagaggactcccaggaccgcgcggtgagaaaggggaagcgggaagggcgggggagccgggcgatcccggcgaagatggtcagaagggggcaccgggaccgaaaggctttaagggcgatccgggagtgggagtcccagggtcgcctgggcccccgggcccacctggcgtgaaaggagatctggggctgccgggcttgcctggggctcccggagtcgtcggcttcccgggacagactggcccgcggggtgaaatgggccagccggggccgtccggcgaaagaggtctggctggtccgccgggtcgcgaaggaatcccgggcccactcgggccaccggggccaccaggttccgtcggtccccctggagcatccggactgaagggagataagggggatccaggtgtgggactcccgggcccgcggggagagagaggagagccaggaatccgtggcgaggacggccgccctggccaagaaggacctcgcggccttactggaccgcccggatcgcgcggcgaacgcggagagaaaggagatgtgggaagcgcgggactgaagggcgataagggggactcggccgtgatcctgggacctccgggccctcggggcgccaagggagacatgggtgaaagaggacctcggggacttgacggagacaagggacctcggggagacaatggggaccctggagataagggcagcaaaggagaacccggcgacaaagggtcagctggactcccgggcttgaggggcctgctcggaccacaaggacagccaggggccgccggaatcccaggcgacccgggaagccctggaaaagacggcgtgccaggaatccggggcgaaaagggcgacgtgggattcatgggaccgagaggactcaagggagagcggggcgtgaagggcgcctgcggcctcgacggagaaaagggcgacaaaggagaagcgggaccgccaggccgcccgggactggcaggacataaaggagaaatgggggaaccgggcgtgccaggacaatccggagcaccaggaaaggaaggcctgatcggaccgaaaggtgacaggggattcgatgggcagccgggccccaagggcgatcagggggagaagggagagagagggactccgggaattggaggattcccggggccgtcagggaatgacggaagcgccggcccgccaggtccaccaggatcggtgggtccgcgcggcccagaaggactgcagggacaaaagggtgaacggggacctcctggagagcgcgtggtgggagctccgggagtgcctggtgctccaggcgagaggggcgagcaaggacggcctggtcctgcgggcccgcgcggtgagaaaggggaggcggcactcacggaggatgatatcagaggattcgtgcgccaggagatgtcgcagcactgcgcttgccagggacagtttattgcgtccggctcgcgcccactgccgtcgtacgccgcggacacggcgggctcgcaactgcacgcagtgccagtcctgcgggtgagccatgcagaagaggaagaacgcgtcccgccggaagatgacgagtactcagaatactcggaatactcagtggaagaataccaggatcctgaagccccatgggactcggacgacccctgcagtctcccgctggacgaaggctcatgcactgcttacacgctgcggtggtatcaccgggccgtcactggctctactgaggcgtgccatccgttcgtctacggaggatgcggcgggaacgctaatagatttggaactcgcgaggcgtgtgaacgaaggtgcccaccgagagtggtgcaatcccagggcacgggtaccgcccaagat

SEQ ID NO: 9633 - DNA, 8832 bp, synthetic construct
  misc_feature 1..8832: note = source = /note="Description of Artificial Sequence: Synthetic coding sequence"
  source 1..8832: mol_type = other DNA
atgacgttgcggctgctggttgctgcgctttgtgccggtatcctggcagaggctccacgagtgcgtgcgcagcatagggagagggtcacttgcacgcgcctgtatgctgcagacatcgtatttctcctcgacggctcatcaagtattggcagatccaatttcagagaagtccgaagttttctggagggactggtgctccctttctctggtgctgcgagcgcgcagggtgtcagattcgctaccgtccagtacagcgacgatccgcgcacagagttcggcctagatgctctcgggtcaggaggcgatgtgatccgtgccattagggagcttagctataaaggagggaatacccggacgggtgccgccattttgcacgtggccgaccatgtttttctgccacagctcgcccgccccggggtgccaaaagtttgtatcctcattaccgacggaaagagtcaggatttggtggataccgccgcgcaacgactcaaggggcaaggagtcaaactcttcgcggtgggaattaaaaacgcggatcccgaagaactcaaacgggttgccagccagccaacttctgatttcttcttctttgtaaatgacttctcaatcctgagaacactgctccctctggtttccaggcgcgtgtgtaccactgccggcggagtgcctgttactcgcccccccgacgatagcacaagcgcacctagggatttggtgctcagcgagcccagcagccaatctctaagggtacagtggacagcagcatctggtccagtaacgggatataaggttcaatacactccattgaccggtctgggtcagccactgccttccgaacggcaggaagtgaacgtaccagccggcgaaacatccgtccggttaagagggcttaggcctctgaccgaatatcaggtcaccgtgatcgcactgtacgccaacagtattggagaagccgtgtcaggcaccgcaaggactactgctttagagggacccgaattaactattcagaatactacagcgcactctctgctggtcgcatggcgctcagtgcctggcgccacgggctatcgggtgacctggcgcgtcttgtcgggtggccctacacagcaacaggagctcggtcctgggcagggatcggtactgctgagggacctcgagccaggcactgactacgaggttacagtgtccaccctgttcgggcgcagcgtcggcccagcaacttccctaatggcacgtacagacgcctcagttgagcagaccctgcggccagtgattctaggcccaacaagtatcctgctgtcatggaatcttgtacctgaggcgcgcgggtatagactggaatggaggagagagaccggtctggagccaccacaaaaggtcgtccttccaagcgatgtaacccgttatcaactggacgggttgcagcccggcacagaatatagactaacactgtatactctgctcgaaggacatgaggttgcgacaccggcgaccgtcgtccctaccggccctgagctccctgtcagcccggtcaccgatctgcaagccactgaactcccagggcagcgtgttcgggtgtcatggagccctgtgccaggggctactcaataccgcatcatcgtgagaagcacccaaggtgttgaacgaactttggtactccccggatcacagacagctttcgacctcgacgatgtgcaggcgggactcagttataccgtccgcgtctccgcgcgagttggacctagagaaggaagcgcgagcgtcctgacggtccgccgcgagccagagacccccctggcagtgccggggttgagggttgtagtgagtgatgctacacgagtgagggttgcatggggtccagtgccaggcgcttcagggttccgcatttcctggtccactggtagcggccctgagtcatcccagaccctgcccccagactccaccgccacggatatcacaggtcttcagccaggcacgacctaccaggtggcagtttctgtgcttcggggccgagaggagggtcccgccgcagtcatagtggcacgcactgacccgcttggacctgtgcgtaccgtgcatgtgacgcaggcaagtagctccagcgtgactatcacttggaccagagtccccggggccactgggtatagagttagttggcatagcgcgcacggaccggaaaagagccagttggtctcaggtgaagcgactgtggcagaactggacgggctggagcccgatacagagtacacagtgcatgttagggcccatgtggccggggtggatgggccgcctgcttcggttgtggtgcggacggcccctgagcctgtggggagagtgagccggcttcagatactgaatgcctcttctgacgtcctacggatcacttgggtgggggtgactggggcaacagcttaccggctggcatggggacgaagtgagggagggccaatgagacaccagatattacccggaaatactgactccgccgagataagggggctggagggtggagtcagctactcggtgcgagtgaccgcgctggtcggagaccgagagggaaccccagtgtctattgtcgtcactaccccccctgaggcccccccagctttaggtacgctgcacgtggttcagcgaggcgagcactctctacgtcttaggtgggaaccagtgcctcgcgcacaaggattcctgctgcattggcagccggagggggggcaggaacagagtcgagtcctcggccccgaattaagcagctaccatctggatggccttgaaccggcaacccaatacagggtccgactatccgtgcttggacccgcaggggagggcccatcagctgaggtgacagcccgcaccgaaagccctcgggttccatcaattgagctccgggtggtggatacatcaatcgatagcgtcacacttgcttggacacccgttagccgggcttcatcttatattctgagctggcggcctctgcggggacctggacaagaggttccgggttctcctcagaccctccccgggatcagcagttctcagcgggtcactggccttgagcccggtgtttcctacattttctcgttgacaccagtgctcgatggcgtgcgaggaccagaggcctctgtcacgcagacccctgtatgtccgcgcggtctggcagatgtcgttttcttgccgcacgcgacccaggacaatgcccacagagccgaggcaacccggcgggtccttgaaaggctggtgctcgcgctagggcctctgggaccccaggcagtccaggtgggtctgcttagttatagtcaccgcccctctccattgttccctctgaacggtagtcatgatttagggataatactgcagcgcatcagggacatgccatacatggatccatctgggaacaacctgggcactgccgttgtgaccgcccaccgctacatgctagctccagacgctcccgggagacggcagcacgttcccggggtcatggtgttgctggtggatgaaccgctgcggggtgacattttttcccccatccgggaggcccaggcctctggactgaacgtcgtcatgcttggaatggcgggtgcagaccccgaacagctgcgtcgtctcgctccaggaatggattcagtccaaacgttcttcgcggtggacgatggcccctctctcgatcaggctgtctctggtctggccaccgctctgtgtcaggctagctttaccacacagccccggccggagccatgtccggtgtactgcccgaagggtcagaagggcgagcctggggagatgggtctgcgggggcaggtcggcccgccaggggacccagggttaccagggaggactggcgcacctggccctcagggtcctccgggtagcgctacagccaaaggtgagagaggttttcccggagccgatgggaggccaggcagccctggccgcgccggcaatcccggaacccctggcgccccaggcctgaagggaagtccaggtctgccgggtccacggggagaccccggcgaaagaggccctcgcggcccgaaaggcgagcctggcgcaccgggccaggtgattggaggcgaggggcctggactgcccgggaggaaaggggaccccggacctagcgggcctcctgggcctagaggaccccttggtgatcctggcccccgggggcctcctggcctcccgggaacggcaatgaagggggataaaggggaccggggggaacgcggacctccaggacccggtgaaggcggaattgcgccaggagagccagggctgccaggactccccgggtcccccggacctcagggcccagtgggcccaccaggaaaaaaaggagaaaagggagatagcgaggacggcgctccaggcttgccaggccagcctggaagtcctggagaacaggggccaaggggtcctccaggagccatcggccccaagggggatcgggggtttcctggacctctgggagaggctggtgaaaaaggagagagaggccctcctggacctgcagggtcaagaggacttcctggcgtcgccgggaggcccggcgccaaaggtcccgaaggtcctccgggcccgactgggcggcagggcgagaaaggcgaaccaggtcgacccggtgatcccgcagtggttggccctgcggtggccgggccaaagggagaaaaaggcgacgtaggacccgccggacccaggggagccaccggcgtacagggagagagggggccccctggtctcgtacttccaggcgatcccgggccaaagggggacccgggggacaggggaccaattggcctgactgggcgagctggccctcctggagattcagggcctcccggggaaaaaggcgacccgggacgcccaggcccgccggggccagtaggccctcgcggacgagacggcgaggtaggcgaaaaaggtgatgaggggcctcctggtgatcctggcctgcccggtaaagcaggggagcgaggactaagaggcgcccctggggttcgcggcccggtgggagagaaaggagatcagggggatcccggagaggacggaaggaacggctctcctggcagtagcggacctaagggtgacaggggagagccaggacccccaggtccgcccggacgtctcgtggataccggacccggtgctagggaaaaaggcgagcctggagacaggggtcaggagggtccacgggggcctaaaggtgacccaggccttccgggtgcccccggggagagggggattgaggggtttcgcggtccacctgggccgcagggagacccgggcgtgcgtggccctgctggcgagaagggcgacagaggcccaccagggttagacgggcggagcggactcgatggcaagcctggggccgccggaccaagcggtcctaatggggccgcgggtaaggcgggtgacccaggtagggacgggctgccaggcctacgcggcgaacaaggacttcccgggccatccggtcctcccggtttaccgggaaaaccaggggaggatggcaagccagggctgaatggaaaaaatggcgaacctggggaccctggagaggacgggcggaagggcgaaaaaggagattcaggggcatccggtagagaagggagggatggccctaagggggagagaggagccccagggatcttagggccgcaggggcctccaggcctgccaggaccagtcggaccaccaggacaggggttcccgggcgttcccggaggcactggccctaagggggatcgaggcgagacgggatcaaaaggagagcaaggcctgcccggagagcggggactgaggggcgagcctggctcggttcccaacgtggatcggctgctggaaactgctggaatcaaagcttctgctttgagagagatagtggagacctgggacgagagcagcggctcctttcttcctgtgccagagaggagaagaggtcccaaaggtgactcaggcgaacagggacccccaggcaaagaagggcctatcggtttccctggcgaaagagggctgaaaggagatcgaggtgaccctggtccccagggcccaccagggctagctctgggagagaggggcccacccggacccagcggcctggcgggtgagccaggtaagccaggcatcccaggcctccctggccgtgctggtggcgttggggaagccggccggcccggcgagaggggggaaagaggcgagaagggcgaaaggggcgagcagggcagggacggacccccaggactgcccggcactccaggccccccgggaccccccggacccaaagtgtcagtcgatgaaccaggtccaggcctcagtggggaacaaggacccccaggtctgaaaggcgctaaaggggaacctggatctaatggcgatcaagggcccaagggagaccgaggcgtccctggaattaaaggggatcgcggtgagcctgggcccaggggccaggatgggaatcctggactccctggagaaagaggaatggcggggccagaggggaagcccggtcttcagggcccaagaggcccaccaggcccagtgggcggtcatggggatccaggaccacctggggcccctggcttagcgggccccgccgggccgcagggccctagcggactgaagggggagcccggagagaccggcccccctgggagaggcctaacgggtcctaccggagccgtgggcttacctggtccaccagggccaagtggactggtgggccctcaaggtagcccagggctcccaggtcaagtgggagagaccgggaaacctggtgcaccaggcagagatggagcttctggaaaggatggggaccgcggaagtcctggggtgccgggctccccaggtctgcccgggccagtcggtccgaagggggagccgggccccaccggcgctcccggacaggcagtggtggggctcccaggggcaaaaggggaaaaaggcgcacctggcgggttggccggcgatctggttggtgagccaggcgccaagggtgatcggggcctgcctgggccgcggggggaaaaaggcgaagcagggcgtgctggtgaacctggcgatccaggcgaggacggacagaaaggcgctcccggacccaaagggttcaaaggcgatccaggggtcggggtgccaggctccccagggccccctggcccgccaggcgttaaaggagacctcggattgccaggcctcccaggcgcccctggagttgtaggctttcctggccagaccgggccgcgcggcgaaatggggcagcccgggccaagtggtgaaagggggcttgctggtcctcccggaagagagggcatccctggccctctgggcccacctggaccacccggctctgtcggaccaccaggagcctcagggctgaagggggataagggagaccccggggtgggactgcccggcccaaggggcgagcgcggtgagcccggaatccggggggaggacgggcgtcctgggcaggaaggaccacggggcttgacgggccccccagggagcaggggcgagcggggtgagaagggcgacgttggatctgcgggcctcaagggcgacaaaggagatagtgccgtgatacttgggccccctggccctagaggagccaaaggagacatgggggaacgggggcctcgcgggctcgacggtgacaagggacccaggggcgataacggagatcccggtgataaaggctctaaaggagagcctggagacaaggggtctgcagggctgccaggcttacgcgggttgttgggaccccagggacaacccggtgcggccggaatccccggagaccccggctcaccggggaaagatggtgtgccaggaatacgcggcgaaaaaggggacgtgggcttcatggggcccaggggcttaaagggcgagcggggcgttaagggggcttgtggcctggatggtgagaaaggagacaagggggaagcaggaccacccggcaggcccggtctcgcagggcataaaggggaaatgggcgaacccggggtgccaggacagtccggggcccccggaaaggagggtctgatcggacctaagggagaccgcggtttcgacggacagccagggccaaagggtgaccagggcgagaagggagagaggggcaccccgggcattggcgggtttcccggcccgtccggcaacgacggatccgctgggccccccggacctccaggcagcgtggggcctagagggccagaaggactgcagggccaaaagggggagagagggccccccggagaacgagtagtaggtgcaccaggggtcccgggagcacccggtgagcggggggaacagggcagacctggccctgcagggccaagaggcgaaaaaggggaggccgcgcttaccgaggatgacattcgcggtttcgtcaggcaggagatgagccagcattgcgcttgccagggtcagtttattgcaagcggatccagacccctgccatcatacgctgcagacacggcaggctcccagttgcatgcggttcctgtgctacgggtgagccatgcagaggaggaagaacgcgtgcctccagaagacgacgagtacagcgagtattccgagtacagcgtggaggaatatcaggacccggaggccccctgggacagtgacgacccttgcagcttgcccctggatgaggggagctgcaccgcatataccctgcgatggtatcatcgggccgtgacgggtagcacggaagcctgtcatccctttgtatacggcggctgcggcggtaacgcaaataggttcggaaccagagaggcctgcgagcgccgttgccctcccagggtggttcagagtcagggcacaggtacagctcaggat

SEQ ID NO: 9634 - DNA, 8832 bp, synthetic construct
  misc_feature 1..8832: note = source = /note="Description of Artificial Sequence: Synthetic coding sequence"
  source 1..8832: mol_type = other DNA
atgaccctccgtctgctggtggccgcattgtgcgcggggatccttgcagaagccccccgcgtacgcgcccagcacagggagcgggtgacatgtacacggttatatgctgcagacattgtatttctgctcgacgggtcatcttctataggccgtagcaactttagagaggtcagatcgttccttgagggtttggtcctccccttcagcggggctgcctccgcccaaggggtgaggtttgcgaccgtccagtattctgatgacccacgtaccgagtttggattggatgctctcggtagtgggggcgacgtgatccgcgccatcagagaactgtcgtataaaggtggaaacacaagaactggagccgctatactgcacgtggccgatcatgttttcctcccacaactagccaggccgggcgttcccaaggtgtgtattctcataacagacgggaaaagccaggatctagtggacacagccgctcagcgccttaaaggacagggagtgaagctcttcgctgtggggatcaagaacgccgatccggaggaacttaagagagtcgcctcccaacccaccagcgactttttcttcttcgtgaacgatttctcgattcttagaaccctactgccacttgtgtcacggagagtatgtacgacggcaggtggagtaccagtaactcgacccccagatgattccaccagcgcacctcgagacctggtcctgagcgagccctcatcccaaagccttagggttcaatggaccgctgcctcagggcctgtcactgggtataaagttcaatatacacctctgacaggcctgggtcagccactcccatccgagcggcaggaggtgaatgtacccgccggcgaaacaagcgttagactaaggggtttgaggcccctaaccgaataccaggtgaccgttatagcgctgtatgccaatagcattggcgaagctgtgtccgggaccgcacggacaacagcactggaaggccctgagttgactatccagaacaccaccgcccactctctactggtggcctggcgctctgtgccaggagcaacaggttaccgggtaacctggagagttctatccggcggccccactcagcagcaggagctcggccctgggcagggaagtgtgctcctgagggatctggagcccgggacagactacgaagtgacagtgagcaccctgtttggtaggtccgtggggccagccacaagccttatggcccggaccgatgcaagcgtcgagcaaactttgcggcccgtgatactaggcccgactagcatcttgctgtcttggaacctggtcccggaagccagaggctatcggctggagtggcggagagaaaccggccttgagccaccccagaaagttgtgctgccatcggatgtaacacgataccagctggatggattgcagcccggcacagaataccgcttgacactgtataccctgctggaggggcacgaagttgctacccccgctacagtggtgccgaccgggccagagctgccggtctctcctgtaaccgacctacaggcgaccgagctccctggtcagagggtgagggtttcatggagtcctgtgccaggcgcgacgcagtacagaattatcgttaggtcgacacagggtgtcgagcgtactctcgttcttcctgggtcgcaaacagccttcgacctggacgatgttcaggccggcttaagctataccgttagggtgagcgccagagttggccctagggaaggctctgcatcagtgctcactgtgagaagagaacctgaaacaccccttgctgtgcccgggctgcgggtggtggtcagcgatgccacccgggtaagagtggcctggggaccagtgcctggcgcctccggctttcggatctcctggtccaccggctccggcccagaaagcagtcagaccctccccccagacagcactgccaccgatattactggcctgcagccgggaacaacctaccaggtggctgtcagcgttctgcgtggacgggaggagggacccgccgcagttattgtcgctcgcactgaccccttgggccccgttaggactgtacacgttacgcaggctagttcctctagcgtgaccataacatggacccgggtacccggggctaccggctatcgtgtgtcctggcacagcgcacatggacccgagaagtcgcagctcgtgtccggcgaagccactgtcgcagaactggatggacttgagccagacacagagtatactgtgcatgtgagagcacatgtcgcaggcgttgacggcccccccgcatccgtggtggtcagaacagcaccagaaccagtcgggagagtatctagattacagattttgaacgcatcaagcgacgtgcttcgtatcacttgggtgggcgtgacgggcgcaaccgcttatcggcttgcttggggacgatctgagggcgggcccatgcggcaccagattctccccggcaacaccgactccgccgagatcaggggtttagaagggggcgtgtcttacagcgttcgagtgaccgctttagtcggcgatagggaagggactccagtcagtattgttgtgacaacgccacccgaagcgccccctgcattggggacactgcatgtcgttcagcgaggagagcactcattgcgtctgcggtgggagcccgtgcctcgagcccagggctttctcttgcactggcagcctgagggcggacaggaacagagtcgcgtcctaggcccagagctgtcatcttatcacttggacggactggagcctgcaacgcagtacagggtccgcctgagtgtgctcggcccagctggagagggaccgtcagcagaagtcacagcccgtacagagtccccaagggtcccatcaatcgaactgagagtggttgatacaagcattgattcggttactctggcttggactccagtgtcccgtgctagtagttacatcttaagctggaggccacttcggggcccaggacaggaagtcccaggttcaccacaaacactgcccggcatctcatccagccagagagtcactggcctggagccaggcgtgtcctacatttttagtttgacgccggtgctggatggtgtgcgaggccccgaggcaagtgtgacacagacccctgtatgtcctcgcggtctcgctgacgtagtgttccttccacatgccactcaggacaatgcccatcgagcagaggcaactaggagggtcctggaaagactcgtcttagcactgggaccactcggtccacaggccgtacaggtgggcttgcttagttatagccaccgcccctcaccactgttccctcttaacggatcgcatgatctgggaatcatcctgcagagaatcagggacatgccatatatggaccccagtggaaataatctgggaacagcagtggtgaccgcacatagatacatgttagcacccgacgcaccaggcaggcgccagcacgtcccgggagtcatggtgctactggtcgatgaaccgctgcgaggtgacattttttcccccatccgcgaagcacaagcctctggcctcaatgtcgtgatgctcggaatggctggggcagaccctgagcaactgcggaggcttgctccgggcatggatagcgttcaaactttttttgcagtggatgacgggcccagccttgatcaagccgtgtccggcctggccactgcattgtgccaagcaagttttactacccagcctcgccctgagccatgccccgtgtactgtccaaagggccaaaaaggcgagcccggtgagatggggctgagaggacaggtagggcctccaggcgatccggggctgcccgggcgtaccggcgcccccggaccgcagggcccacctggtagcgctaccgccaaaggggaacggggatttcccggcgctgacggtaggcctggctccccagggcgcgcgggaaacccaggcactccaggcgcccccgggctgaaaggatcgcctggactgcccggtccccgtggagacccaggtgaacgagggccgaggggccccaagggtgagccaggcgcgccaggtcaggtcattggtggcgagggccctggattgccaggacgaaagggggaccccgggccctccggtcctccaggccctaggggcccgctcggcgacccaggcccaaggggtccgcccggcctgccaggaactgctatgaaaggcgataagggcgataggggggagagagggcccccagggcccggggaaggcggaatcgcacccggggagcctggacttccaggacttccagggagccccggtccacagggacctgtgggacctcctggtaagaaaggagagaaaggggactccgaggacggggctcccggcctgccgggtcagccggggtcccccggagagcaaggcccacgcgggcctcccggcgcaatcgggccaaagggggatcggggctttcctggaccacttggtgaggcgggtgagaagggggaacgcggaccaccagggcccgctggctctagaggcctgccaggggtcgcaggtagacctggcgcaaaggggcccgagggaccacctgggcctactgggagacagggagagaaaggggaacccggacgtcccggcgatccagcggtggtgggtccagctgttgccggcccaaaaggagaaaaaggggatgtgggtccggccggtccccggggagcgacaggcgtgcagggagagcgagggccccccggcttagtgcttcccggagaccccgggccaaagggagaccccggagaccggggcccaatcggtctgacaggccgggccggtcccccaggcgattcaggtcctcccggcgagaaaggcgaccccgggcgcccgggccctccagggccagtagggccccgtgggcgcgatggtgaagtcggagagaaaggggatgaagggccaccaggggatcctggtcttcctgggaaagcgggagagcgcggtcttcgcggcgcaccgggggtccgaggtcctgttggagagaagggggaccagggcgacccgggtgaagacggaaggaacggcagcccgggctcatccgggcccaaaggcgaccgaggcgaacccggaccaccaggaccccctggacgcttagtggatacaggaccaggggcccgcgaaaagggcgagcctggagatcggggccaagagggccctaggggacctaagggcgaccctggtctacctggggctcctggggaacgggggatcgaaggctttcggggaccccccggcccccagggcgatcccggcgtacggggacctgccggagaaaaaggagacagaggtccccctggcctggatggaagatccgggctggacggaaagccaggcgccgctgggccaagtggaccgaacggggcagctggcaaggctggggacccaggacgggacggtctccccggactgcgaggcgagcagggtttaccaggaccatcggggcctcctggactccctggcaaaccgggggaggatgggaaacccggactcaatggcaagaatggagagccaggcgacccaggagaggatgggcggaagggagaaaagggtgactcaggcgcttctggaagggagggtcgggatgggcccaaaggggagaggggtgcgcctggcattctcggcccccagggaccgcccggtctgcctggccctgtcggaccccctgggcagggcttcccgggcgtgcctggcggtaccgggcctaagggggataggggcgaaacaggctctaagggcgaacagggcctgcccggtgaacggggcctcagaggtgagccgggcagcgtacctaacgtggacaggctgctggagaccgcaggaattaaggccagcgccctgagagaaatcgtggagacctgggatgaaagcagcgggtctttcctccccgttccggagcgcagacgaggtccgaaaggcgactccggcgagcagggaccgcctggcaaagaggggccaatcggtttccctggtgagcggggtctcaagggggatagaggagatcccggtccacagggtccaccagggctcgcacttggtgagcggggcccacccgggccaagcggactggccggagagccagggaaaccagggataccgggtctgcccgggcgcgcagggggcgtgggggaagccggccggcccggggaaagaggggagagaggagagaagggagagcgaggcgaacaggggcgggatggccctccaggcctccctggcacaccagggcctcccggtccacccggacctaaagtttcagtcgatgaacccggtcctggtctgtcaggagagcagggtccccctggccttaagggcgctaagggcgagcccgggagcaacggtgatcaaggaccaaagggggatcggggcgtgccgggcattaaaggagacaggggtgaacccggcccacgggggcaagatgggaatccagggctccccggagagcgaggcatggcaggacctgagggaaagccaggcctgcaaggcccccgtggaccccccggcccagtggggggccatggcgatcctgggccaccgggcgccccagggctggctgggcctgctggccctcaggggccaagtggcctcaagggggaaccaggcgagactggtccgccagggcggggactaacaggccccacaggggccgtaggcctgccaggtccgcctggccccagcggtctcgttggcccacagggcagccccgggctccccggtcaggtcggggaaaccgggaaaccaggagcccctgggcgggacggggcctccggaaaggatggggacagaggatctcctggagttcccggcagccctggacttcccgggcctgttgggcccaagggcgaacccggtcctacaggagctccaggccaggcagttgtgggtctgcccggagcgaagggagaaaagggggcacccggcggactggccggagacctggtaggagagccgggagctaagggcgatagaggtttgccgggccctagaggggagaaaggtgaagctggacgagcgggggagcccggcgatcctggcgaagacgggcagaaaggcgctccagggccaaaaggattcaagggtgaccctggggtgggggtgcccggcagccctggtcctccagggccccccggtgtcaagggagaccttggtctccctggtctgccaggggcccctggagtggtcgggttccctggccagacagggccccgaggggaaatgggccagcccggaccaagcggtgagcgcgggctcgcgggtccgcctggccgtgagggcatccccggacccctgggcccaccaggcccccccgggagcgtggggccacccggcgcgtcgggactaaagggcgacaaaggcgacccgggggtggggctccccgggccccgcggagagcgcggcgagccaggcatccggggagaggacggccgtcccggccaagagggaccgcgggggctgacaggaccaccaggatccagaggagaaagaggcgagaagggggacgttggtagtgccggcttgaagggagataagggagactctgctgttattctcgggcctccgggcccccgcggggctaaaggcgacatgggggagagggggccccgggggctggatggcgataagggcccgagaggggacaatggggatccaggcgataaaggttccaagggggagcctggggataaaggatccgcgggacttcccgggctccggggcctgctcggaccgcagggtcagcccggtgctgccggtattcctggagatcctggatcacctgggaaagacggagtacccggtatccgaggtgagaagggcgatgtcgggttcatgggtccccgagggctgaagggggagcgtggcgtcaaaggcgcctgcggcttggacggagaaaagggcgacaagggggaggccggaccgcccggccgcccggggctggccggtcataagggggaaatgggggaacccggcgtccctgggcagtctggggcgcctggcaaagagggcctgattggcccgaagggagaccggggatttgatggccagccaggccctaaaggtgatcaaggagaaaagggggaacgtgggacgcccggaattggcggatttcccgggccctctgggaacgacgggagtgccggacctccagggcccccaggaagcgtgggaccacgggggcccgagggtcttcaaggccaaaaaggagagcggggcccacccggggagcgggtggtaggagcgcctggagtaccgggcgcgcctggtgagcgaggcgaacaggggcgcccgggacccgcaggtcctagaggagaaaagggcgaggcagcgctgactgaagacgatattcggggcttcgttagacaggaaatgagccagcactgcgcctgccaaggccagttcatcgcctcagggtccagacctctgccttcctatgcagctgatactgctgggagtcagctgcacgcagtgccggtcttgcgcgtgagccacgccgaggaggaagagcgcgtcccccccgaagatgatgagtactctgaatacagtgagtattcagtggaggagtatcaagatccagaagccccctgggacagcgacgatccatgcagcttacccctggatgaaggctcatgcacagcatataccctgaggtggtaccaccgtgctgtcacaggaagtacggaggcctgtcaccctttcgtctacggcggatgtggcggtaatgcaaatcgatttggaacgagagaggcgtgcgagcggcgatgtcccccacgggtggtgcaatctcaaggtactggtactgcacaagat

SEQ ID NO: 9635 - DNA, 8832 bp, synthetic construct
  misc_feature 1..8832: note = source = /note="Description of Artificial Sequence: Synthetic coding sequence"
  source 1..8832: mol_type = other DNA
atgactctgagactgctggttgcagcactgtgcgccggtatccttgccgaggccccgcgcgtgagggcccagcaccgcgaacgcgtgacctgcacccggctgtacgccgcagatatcgtgttcctcctggatggatcttcctcgatcggccggtcgaactttcgcgaagtccggtccttcctcgaaggactggtcctgccgttctcaggagcggcaagcgcccaaggtgttcgttttgctactgtgcaatactccgacgacccgcgcacggagttcggactggatgcgcttggatccggtggagatgtgatccgggccatccgagagttgagctacaagggaggaaacacgcggactggcgctgcgatccttcacgtcgctgaccatgtgttcctccctcagctggctcgccccggggtgcctaaggtgtgtatcctgatcacggacggaaagtcacaggatctggtggatactgccgcacaacgccttaaggggcaaggggtcaagctgtttgccgtgggaatcaagaatgcggatcccgaagaactcaagagagtcgcatcccaaccaaccagtgacttcttcttttttgttaatgattttagcatccttcggactctcctgccgctcgtgagccgccgggtctgcaccacggcagggggcgtccccgtgactcgtccaccggatgacagcacctcggctccacgggaccttgtgctgtcagaacctagctcgcagtcgctgagggtgcagtggacggcggcctcgggaccggtcaccggatacaaggttcagtatactccgctcaccggcctgggtcagccgctgccgtccgagaggcaggaagtcaacgtcccggccggagaaacgtccgtccgcctgcgggggctccgccccctcactgagtatcaagtgaccgtcatcgccctgtacgccaattccatcggggaggccgtctcgggtactgcgcgcaccactgccctggagggaccggaactgaccatccagaataccaccgcacacagcctgctggtggcctggcgcagcgtcccaggcgccaccggttacagagtgacctggagagtcctgtcggggggacccacccagcagcaagagctgggacctggacagggctcggtgctgctgcgcgacttggaacctggaaccgactacgaagtgacggtgtcgaccctgttcgggagaagcgtcggtcctgctacctcactcatggcgagaactgatgcttccgtggaacaaaccctgcgcccggtgattctggggccgaccagcattctgctctcgtggaacctggtgccggaggcccgaggctaccggctcgagtggcggagagagactggactggaacctccgcaaaaggttgtgctgccgtcggatgtgactcggtaccaactggacggcttgcaacctgggactgagtatcggttgactttgtatactctcctggaagggcatgaagtcgctaccccagccaccgttgtgccgaccggaccagagcttccagtgagcccagtgaccgacctgcaggcaactgagctgcccggccagcgcgtgcgggtgagctggtcccctgtcccaggagcaacccagtaccggatcatagtccggtcgactcaaggtgtggaacggacgctggtgctgcctggctcccagactgccttcgatttggatgacgtgcaagccggcctttcgtatactgtgcgggtgagcgcacgagtgggaccgcgcgagggatcagccagcgtgctgactgtgcgccgcgagccagagactccactggctgtgccaggtttgcgcgtggtggtgagcgacgcgacccgggtgcgggtggcctggggtccggtgccaggagcgtcgggattcagaatctcctggtccaccggatccggaccggaatcgtcccaaaccctgccgccagacagtaccgcaaccgacatcactggacttcaaccggggaccacgtaccaggtcgccgtctctgtcctgagaggtagggaggaagggcctgccgccgtgatcgtggcccgcaccgatcctttgggacctgtgagaactgtccacgtgactcaggcctcctcatcgagcgtgactattacttggaccagagtgccgggagcaaccggttaccgggtttcatggcactccgcgcatggaccagagaagtcgcagcttgtgtccggcgaggccaccgtggccgagctggacggactggagcctgacactgagtacacggtgcacgtgcgggctcacgtggcgggggtggatggacccccagcctccgtggtcgtgagaactgcgccggaacctgtcggaagggtgtcccggctgcaaatcctcaatgcctcctcagacgtgctgcgcatcacgtgggtgggtgtgacgggagcaaccgcataccgcctggcatggggccgctcagagggaggcccgatgcggcatcaaatcctgccgggaaacaccgattcagctgagatccgaggactggagggaggagtgagctacagcgtgcgcgtgaccgctctggtgggggaccgggagggcactccggtgtctatcgtggtcacgactccgcctgaggcgccgccggcgctcggaaccctccatgtcgtgcaacggggagaacactcccttaggctccggtgggagcccgtccctagggcccagggattcctgctgcactggcagccagagggtgggcaagagcagtctagggtcctgggacctgaattgtcctcataccacctggatggactggaaccggccacccagtaccgtgtgaggctgagcgtcctgggaccagcgggggagggaccatcagctgaggtgaccgcacggacggagagcccgcgcgtcccctcaatcgaactgagagtggtagacactagcatcgattccgtgaccctggcgtggaccccggtgtcaagggccagctcttacattctttcgtggcgacctttgcggggccctggtcaggaggtgccaggttccccgcagactctcccaggcatatcaagctcccagcgcgtcaccgggctggaaccgggagtgtcatacatcttctcattgactcctgttctcgatggagtgcgaggccctgaggcttcagtgacccagactcctgtgtgcccccgaggactcgccgacgtcgtgttcctcccacacgcgactcaagacaatgcgcaccgagcagaggcaactaggcgcgtgctggagagactggtgttggcattgggaccgctgggaccgcaggcagtgcaggtgggactgttgtcctacagccaccgtccgtccccactcttcccgctcaatgggtcacacgacctcgggattatcctgcagcggattagagacatgccgtacatggatccgtccggcaacaacctgggaactgcagtggtgaccgcgcatcgctacatgctcgcaccggatgcccccgggaggcggcaacatgtccctggcgtaatggtgctcctcgtggacgaacctctgaggggagacatcttcagcccgattcgggaagcgcaggcgagcggactgaacgtcgtgatgctggggatggctggcgcagaccccgagcagctgcggagacttgcacccggcatggatagcgtccaaacttttttcgcagtcgacgacggaccgtcgcttgaccaagcagtgtcgggtctggccaccgcactgtgtcaagcatccttcactacccagccgcgccctgaaccatgcccggtgtactgcccgaagggccaaaaaggagaaccaggtgagatgggattgcggggacaggtcgggccgccgggagatccgggtctgccaggacggactggtgccccaggaccccagggacctcccggatcagcgactgcaaaaggggaacgcggctttccgggagcagatggccgcccaggatccccaggccgggcaggaaaccctggcaccccaggcgcccctggtctgaagggctcaccaggactgccgggccctcggggtgaccctggcgaaagggggcctagaggacccaagggagaaccgggcgccccgggacaggtgatcgggggcgaaggcccaggcctccctggacgcaagggcgacccaggacccagcggaccgccaggccctagagggcctttgggtgaccccggaccacgcgggccgcctggcctgccaggaaccgccatgaaaggcgacaaaggggaccgcggagagcggggcccgccgggtccgggagaaggtggaatcgccccgggagaacccggcctgccgggactccccggctcgccgggtccgcaaggaccggtgggtcctcccggcaagaaaggcgaaaaaggagactccgaagatggagctcctggattgcctgggcaaccgggttcgccgggggaacaggggccgcggggaccaccgggcgcgattggaccgaaaggtgaccgcggattcccaggaccactgggagaggcgggggagaagggagaaagaggaccgccgggtccggctggatcacgcggcctccctggagtggccggcagacctggagcaaagggacctgaaggaccgccgggaccaaccggccggcagggagaaaagggcgaaccgggaaggccgggagatcccgcggtcgtcggacctgccgtggctggcccaaagggagagaaaggcgatgtgggaccggcgggaccccgcggagcgaccggggtccagggagagcgcggacctccgggactggtgctgccgggagatccgggaccaaagggagatccgggggatcggggcccaatcggattgactggaagagccggcccacctggcgactccggcccgccgggagaaaagggggatcctgggcggcctggaccgccgggccctgtcggaccgcgcggaagagacggagaagtgggagaaaaaggtgacgaagggccaccgggggacccgggccttcctggaaaggcaggagagagaggactgcgcggcgccccaggagtgagaggcccagtgggagaaaagggggatcagggggaccctggagaggacggaagaaacggtagccccgggagctccggtccgaaaggagacagaggcgaaccaggacccccagggccgccgggtagactggtggatacgggacctggtgctagagaaaagggagagcccggtgacagaggccaggaaggaccgcgcggcccaaagggcgacccaggcctcccgggcgcccccggagaaaggggtatcgaaggtttcagaggaccacctggacctcagggagatcccggcgtgagaggaccggctggagagaagggagatcgtggcccgcccgggctcgatggcagatcaggactggacggcaagccgggagcagctgggccaagcggacctaacggagcggccgggaaagctggcgacccaggccgcgatgggctcccaggactgcggggagagcaaggtctgccaggccctagcggaccgcccggactccccggaaagcctggagaggacggcaagcctggactgaacggaaagaatggcgagccgggcgaccctggcgaggatggacggaagggagagaagggagactcgggagcctcgggacgcgaaggacgagacggaccaaaaggggaaagaggagctccaggaatcctgggcccgcaagggccaccaggcctgccgggcccggtggggccaccaggccaggggttccctggcgtccctggaggcaccggaccaaagggagatcgcggagagacgggaagcaagggagaacaggggttgcctggagagcgggggctgaggggagaaccaggcagcgtccccaatgtcgacaggcttctcgaaaccgccggaatcaaggcaagcgccctccgcgaaatcgtcgaaacttgggacgaaagctccggatcattcttgccagtcccggagcggcggagagggcctaagggagattcgggcgagcaaggacctccaggaaaggagggaccgataggatttccgggagaaagaggcctcaaaggagacagaggggacccgggtcctcaaggaccaccgggtctggccctgggagagcgcggcccgcctggaccgtcgggactggcaggcgaacccggaaagcctggaatccccggactgccaggcagagccgggggcgtgggtgaggccggtagaccgggcgaaagaggcgagcgcggcgaaaagggagaacggggtgagcaggggagagatggaccgcccggccttccggggacccccggacccccgggaccgccaggcccgaaagtgtcagtggatgaaccgggacctggactcagcggagaacaagggccccccggcctcaagggagcaaagggcgaaccggggtcgaacggagatcagggacccaagggcgaccgcggagtgcctggcatcaaaggagacaggggtgaaccgggaccgaggggacaagacgggaaccctgggttgcctggggagagagggatggccggccccgaggggaagccaggtctgcagggcccacggggcccaccagggcctgtgggaggacacggagatccaggtcccccgggcgccccaggcttggccgggccggccggaccgcaaggccctagtggactcaagggggagccaggcgaaaccggtccacctggtcgcggtcttaccggaccgactggggctgtgggactgccagggccgccaggaccgtcgggattggtgggccctcaaggatcgccgggacttcctggacaggtgggggagactggcaagcccggcgccccgggacgagacggagcctcgggaaaggacggagatcgcggttcaccgggagtgccaggctcccccggtctgccaggaccggtgggccctaagggagagccgggaccgaccggcgccccgggacaagccgtcgtggggctgccgggagccaaaggagaaaagggcgccccggggggtctggcgggagatttggtcggcgaaccgggagcgaagggtgaccgcggccttccgggaccaaggggagagaagggtgaggcaggtcgcgcgggtgaacccggagatcccggcgaggacggacaaaaaggtgcgcccggaccgaagggtttcaaaggggacccgggagtcggagtgcccggatccccgggaccgccaggtcctccaggagtgaagggagatcttggattgccgggactcccgggcgccccaggagtggtcggcttccctggccaaaccggacctagaggagagatgggacagccaggcccctccggagaaagggggctggcaggtccgcccggtagagaaggtattccgggacccctgggaccgccgggacccccaggctccgtgggacctcccggggcatccggactcaagggtgacaaaggcgatccgggagtgggactgccgggaccacggggcgaacgaggggaacctgggataaggggcgaggatgggcgaccgggccaggagggcccgcgaggactgactggcccgccaggcagccgcggcgaaagaggggagaaaggggacgtcggatccgctggactcaagggtgataagggagactctgctgtcatcctgggccctccagggccgcggggagcaaagggggatatgggcgagcgggggccgcggggcctggacggcgacaaaggacccaggggagacaatggcgatccgggagacaaaggctcgaagggagaaccaggggataaaggttcggctggattgcctggcctgagaggactgctgggcccgcagggacaaccgggagctgcgggaatcccaggggacccgggatcacctggaaaggatggggtgccaggaatccgcggggaaaaaggagacgtcgggtttatgggaccaagaggcctgaagggagagcggggtgtgaagggcgcatgcggtttggatggggaaaaaggagataagggggaagcgggcccccctggacgccctggtctggccggacacaaaggagaaatgggagaaccaggggtgcccggacagtcgggcgcgcctggaaaggaaggcttgatcggaccaaagggagacaggggcttcgatggacaaccgggccctaagggcgatcaaggcgagaagggagaacggggaactccgggaatcggtggattccctggaccttccggtaatgacggatcggccgggccgccaggaccaccgggttcggtcggcccgaggggacctgaaggactgcaaggtcaaaagggtgagagaggacccccaggcgaacgcgtcgtgggagcaccgggagtccctggagcaccaggggaaaggggcgagcaagggcgaccgggcccagcgggccctcgaggcgagaagggtgaggcggcgctgaccgaagatgacatcagaggattcgttcgccaggaaatgtcccaacactgcgcgtgccaggggcaattcatcgcatccggtagcaggcctctgccatcctacgctgctgacaccgccgggagccagctgcatgcagtgccagtgctgcgggtgtcacacgccgaggaagaggagcgcgtgcccccagaggacgacgaatactccgagtactcagagtactcggtggaagaataccaggacccagaggccccgtgggatagcgacgacccatgctcgctgccgctggacgaaggatcgtgcaccgcgtacactctgcggtggtaccatcgcgcggtcactggctccaccgaggcctgtcatccattcgtgtatggagggtgtggcggaaacgccaatcggttcggaaccagagaggcttgtgaacggcggtgcccgccccgagtggtgcagagccagggcactggaactgctcaagac

SEQ ID NO: 9636 - DNA, 8832 bp, synthetic construct
  misc_feature 1..8832: note = source = /note="Description of Artificial Sequence: Synthetic coding sequence"
  source 1..8832: mol_type = other DNA
atgaccttgcgcctgctcgtagcggcattgtgcgcaggcattctggcagaagctccacgagtaagagcccagcatcgggagcgggtcacttgcacccggctgtacgccgcagatattgtgtttcttctcgatggctcttcttccatcggacgcagcaattttcgcgaggtgaggtcattccttgagggcttggttttgcccttctccggcgcggccagcgcccagggagttcggttcgcaactgtgcagtacagcgacgaccccaggacggagtttggccttgatgccctgggctctggcggtgatgtcatcagagctattagagaactcagctataaaggtggcaatacccggactggagcggcaatcctgcacgtagcagaccacgtgttccttccacagctggcccgaccgggagtccctaaagtatgtattctgataaccgatggcaagtctcaggatctcgtggacacagccgctcaacggctcaagggccagggtgtgaaattgtttgccgtcggtattaagaacgccgatcccgaagagctgaaacgcgttgcatctcagcccaccagcgacttttttttctttgtgaatgacttcagcattctgcggactctcctccctcttgtgtctagacgggtttgcaccactgctggaggcgtgccagtgacccggcccccagatgattctaccagcgctcctcgcgatctggttctgagtgaaccttccagtcagtctctgagggtccagtggactgctgcttctggaccagtgaccggctataaagtgcaatacaccccactgacagggctgggccagcctttgccaagtgagcggcaggaagtgaatgtaccagccggagaaactagcgtgcggctcaggggtcttaggccccttacggagtaccaggtcactgttatagcattgtatgcaaacagcattggcgaggctgtgtcaggaactgctaggactacggctctcgaaggaccagagctcactatccaaaacaccacagctcacagccttctggtggcctggcgcagcgtacccggtgcaactggttaccgagtgacctggagagtgttgagcggcgggcctacccaacagcaggaactcggtccgggacagggaagcgtactccttagggacctggagcctggaactgattatgaagtcaccgtaagtacgctcttcggacgctctgtcggccccgcgaccagcctgatggcccggacggatgcgagcgtggagcagacactccgcccggttatcctgggacccacgagcattcttctgagttggaacctggtccccgaggctagaggctatcggctcgagtggcgcagagaaactgggttggagcctccccagaaagtcgttctgccatctgatgtcaccaggtatcagctggatggcctgcaacccggaacagaataccgcctcaccttgtacaccctgctggaggggcacgaagtagccacccctgctaccgttgtgcctactggacccgaattgcccgtctctcccgtgaccgacctgcaggcaaccgagctgcctgggcagcgagtccgagtgtcctggagtcctgtgcctggtgcaactcaatacaggatcatcgtgcgcagtactcagggcgttgagaggacactcgtgctccccgggagccagacggcctttgatctcgatgatgttcaagccggcctcagctacaccgtgcgcgttagcgcaagagtcgggcctagggagggtagtgcatctgtgttgacagtacgccgagagcccgagactcccctggcggtgcccggacttagagtcgtcgtcagtgacgctacccgcgtgagggtcgcatgggggcccgtgcctggggctagtggcttccgcatctcatggtccacgggaagcggcccagagagttcccaaacgctgcccccagactccactgccactgacatcactgggctccagcccggcacgacataccaggtggccgtttccgttctcaggggcagagaagagggtcccgccgcggtaatcgtcgccagaactgaccccctggggcccgtgagaacagtgcacgtcacacaggcctcaagttcaagcgttactataacatggactcgcgtgcccggcgcaacaggctatagagtgtcttggcacagtgctcacgggccagagaagtcccagctggtttccggagaggccaccgttgcagaactggacggcctggagcctgataccgaatacaccgtccacgtgagagctcatgttgcgggcgtagatggccccccagcatccgttgtcgtgaggactgcaccagagccagtaggccgggtgtcccggctgcagatactgaacgcgagcagcgatgtgttgcgcataacctgggttggcgttaccggtgcaacggcctataggctggcctggggccgcagcgaaggtggccccatgcgccaccagatccttcctggcaacacagacagcgcagagattcggggtctggaggggggcgtgagctactccgttagggtaacagccctcgtgggcgatcgagagggaacccctgtgagtatagtagtcaccacaccgccggaggctccaccagctctgggcaccctgcacgtcgtgcaacggggagaacattcattgagattgcgctgggagccagtaccgagggcccaagggtttctgcttcactggcagcctgaagggggccaggagcagtcccgggtgcttggtcccgagctgtccagttaccacctggacggactggaaccagctacccagtacagagttcggttgtccgtcctcggacccgccggggaaggccccagtgcggaagtcaccgctagaactgagtcaccccgcgtgccgtccatcgagttgcgggtagttgacacttcaatcgattcagtgacactcgcctggactcctgtctctagggcatccagttacatcctgagctggcgccctctgcggggcccaggtcaggaggtgccaggtagtccacaaacgctccctggtatcagttcaagccagcgggtcaccgggctcgagcctggtgtgagttatatcttttctcttacacctgtgctcgacggcgtgaggggccctgaggcgtccgtgacccagacgcctgtgtgtcccagaggcctggcagatgttgtttttctgccgcatgcaacccaggacaacgctcaccgcgctgaggccacccgaagagtgctcgagaggctcgtgctcgcgctgggtcctttgggcccccaggcggtgcaggtgggccttctctcatacagtcacaggccctccccactgttcccactcaatgggtcacacgacctggggatcatcctgcagaggatccgagatatgccgtacatggatccaagcggtaacaatctgggaactgctgtggttacagcccatcggtacatgctggcacctgacgccccggggaggaggcagcacgttccaggcgtgatggtactgttggtcgacgagcccctgagaggtgacatcttctcccccatccgggaggcacaggcctcaggccttaatgtcgtcatgcttggtatggccggggctgacccagaacagctgaggcgcctggctcctggaatggattcagtgcagactttttttgccgtagacgatggtcccagccttgaccaagccgtgagcggactcgccacagctctgtgtcaagcaagctttaccactcagccccgaccagaaccatgcccagtatactgcccaaaagggcagaagggagagcctggcgagatgggcctgagaggccaggttgggccgccaggagatcctggacttcctgggcgcacaggtgcccccgggccgcagggacctccagggagcgcgacagcaaagggcgagagaggctttcccggtgcagatggaagacccgggagcccgggacgcgccggaaaccctggtaccccgggcgcccccggcctcaaaggctccccagggctgcctggccccaggggggacccaggggagcggggtccaagaggtcctaaaggggagcccggggcccccggacaagtaatcggtggcgaggggccaggactgcccggccggaaaggcgacccgggaccctctggcccacccggtccaagagggcctctcggcgatcccggacccaggggaccgcctggactgccaggaactgcaatgaagggggacaagggggatcgcggagagagagggccccccgggcctggagagggaggcatcgcgccaggggagcctggcctccctgggctgcccggctctcccgggccgcaggggccagtgggtcctccaggcaagaaaggcgagaagggcgactccgaagacggagctccaggtctgcccggacagcccgggagccctggcgaacaaggcccgaggggccctcctggtgcgattggtccaaagggcgacagggggttcccaggtccactgggagaggctggtgagaagggcgagaggggcccaccaggcccagcaggctcccgcggtcttcccggtgtcgctgggcggccgggtgccaaaggtcccgaagggcctcccggaccgacaggtagacagggggagaagggggagccaggccggccaggggatcccgctgtggtagggccagccgtggccggaccgaagggggaaaagggggacgtgggacccgctggacctaggggcgcaacgggtgtgcagggggagcgcggcccacccggattggtcctccccggtgatcctggaccgaagggggaccctggggatcgcggtcctatcggtctgacaggccgcgccggaccccctggggattccggccctcccggagagaaaggcgatccaggtcgccctggcccacccggtccagtgggcccccgcgggagggatggtgaggtgggagaaaagggagacgaaggaccccccggcgatcccggtctgcccggtaaggctggtgagagaggtctgagaggggcacctggggtgcgcggacctgtcggggagaagggcgatcagggagaccccggggaggacggcagaaacggttccccaggatcttcaggcccaaagggcgaccgcggcgagcctgggcctccgggtcctcccgggcgccttgtcgataccggcccgggagctcgggagaagggagagccaggcgatagggggcaggaaggacctcggggtcccaagggagatcctggtcttccaggggctcctggggaaagggggatagaggggttccggggaccccctgggcctcagggagaccccggcgttcgcgggcccgcaggtgaaaaaggggaccgcggcccgcctggactcgacggccgctccggccttgacggaaagcctggcgccgcaggaccaagtggccctaacggagctgcaggcaaagcgggcgatccaggacgggacggactccctggactgagaggggaacaggggctgcctggcccatccggcccccctggccttcccggcaaaccgggcgaggacggaaagccaggccttaatggaaaaaatggggaacctggggacccaggagaagacggaaggaaaggtgagaagggggactccggagcaagtgggagagaggggcgggacggtcctaaaggagagaggggcgctccgggcatcctcggtcctcagggcccaccagggctgcctggccccgtggggcctcccggccagggatttccaggtgttcccggcggaacaggtccgaaaggtgacagaggggagactggatctaagggcgaacaaggcttgcccggagaaaggggtcttagaggggagcctggtagcgtcccaaacgtcgaccggctccttgagacagctggaattaaggcatccgccctcagagaaatagtcgagacatgggacgagagctctgggtcctttcttccggttcctgagagaagaagaggacctaagggagattcaggagagcaaggaccacccggaaaagaaggccctatcggatttccaggcgaaagagggctcaagggggataggggtgatcccggccctcaggggccaccgggcctggcacttggagagcgcgggccgcctggaccatccgggcttgccggggagcccggcaaaccgggtatcccaggcttgccaggacgggccgggggcgtgggagaagctggccggcctggggagcggggcgagcggggggagaaaggagagcgaggcgaacagggtcgcgatggacctcctggcctgcccggtacaccaggcccccccggtcccccaggccctaaagttagtgtcgacgaaccaggcccagggctcagtggggagcaaggccccccagggttgaagggtgccaaaggcgaaccaggttccaatggggatcagggacccaagggtgaccgaggcgtgcccggcattaaaggggaccgcggagagccaggacccaggggacaagatgggaatccgggactcccgggcgagaggggtatggccggacccgagggtaagcctggcttgcagggacctagaggtcccccgggccctgtaggcggccacggcgatcccggcccaccaggcgcccctggactggcaggacccgctggaccgcagggcccatcaggactcaaaggcgaaccaggggagacaggtccgccaggaagaggcctcaccggccccacaggagctgtggggctgcccggtccaccgggaccaagcggcctggtggggccacagggatccccgggactgcctgggcaggtaggagagacagggaagccaggtgcgcctggcagggacggagccagcgggaaagacggggatagaggcagccctggagtgcctggcagcccaggactgcctggccccgtcgggccaaaaggggaacccggaccgaccggggccccaggacaggcggtggtgggcctgcctggcgctaagggagagaagggagcacccgggggactggcaggagatctcgttggtgaaccaggtgcaaagggcgaccgcggtctgcccggtcctcggggggagaagggagaggcaggacgagctggggagccaggagatcctggagaggacggtcagaagggcgcgcctgggccaaaaggttttaagggcgacccaggagtgggtgtaccgggatcccctgggccccccggcccccccggagttaagggcgacctgggcctccccggactgcctggcgcaccaggagtggtcggattccccggtcaaacaggcccaaggggagagatgggtcagccaggacccagtggagagcgggggctggcaggcccacctggacgagaaggaatcccggggcccttgggcccccccgggccacccggctccgtgggcccccctggggcctctggtctgaaaggggacaaaggggacccaggtgtcggactgcccggcccccggggggagaggggagagccaggtattcggggagaagatggccgaccaggccaggaaggcccgaggggccttacaggaccccctgggtctcgcggcgagcggggagaaaagggagacgtaggatctgcgggtttgaaaggagacaaaggcgactccgcagtgatcctgggccctccaggccccagaggtgccaagggtgacatgggagagcgagggccacgaggactggatggcgataaaggacccagaggtgacaatggcgatcctggagataaggggtctaagggagagcctggcgataaggggtctgctggactccccggtttgagaggcctgcttggtcctcaaggtcaacccggagccgctgggattccgggggaccccggctccccggggaaggacggtgtcccaggcattagaggagaaaagggcgatgtcgggtttatgggaccaagaggtctcaagggggagcgcggagtgaaaggtgcttgcggacttgacggggagaaaggcgacaagggtgaggccggccctcctggcagaccggggctggcgggacacaaaggagagatgggcgaacccggagtacccggacaatcaggcgcacccggtaaggaggggctgattggcccaaagggcgatcgagggttcgatggacagcctggtccaaagggagaccagggcgagaaaggggagagggggacccccggcattgggggatttcctggtccaagtggcaatgacgggagcgcaggcccccccggtcctcccggaagcgtggggcctagaggcccggaagggctgcaaggacaaaagggtgagcgggggcctccgggtgaacgagtcgtaggcgctccaggcgtcccaggggcccctggcgagcgcggggaacaaggtaggcccggacctgcaggaccccggggagaaaaaggagaagcagccctgacggaggatgatattcgcggcttcgtacgccaggaaatgtcacagcactgtgcatgccagggtcaatttattgcctctggatccagacctctgcccagctacgcggcggatactgctggctctcaacttcacgccgtgcctgtgcttcgcgtgtcccacgcggaggaggaggagcgggtacctccggaagacgatgaatattctgaatacagcgagtatagtgttgaggaatatcaggacccagaggcaccttgggacagcgacgatccctgctcactccccctggacgaaggtagctgtactgcttatacgttgaggtggtatcaccgcgctgtgacgggctcaaccgaagcatgtcatccgttcgtgtacggtgggtgtggaggcaatgcaaatagatttggtacccgggaagcctgtgagagacggtgtccacctcgggtggtgcagtctcagggtaccggcaccgcgcaagat

SEQ ID NO: 9637 - DNA, 8832 bp, synthetic construct
  misc_feature 1..8832: note = source = /note="Description of Artificial Sequence: Synthetic coding sequence"
  source 1..8832: mol_type = other DNA
atgactctgaggctgctggtggccgcgctgtgtgccgggattctggcggaagccccgagggtgagggctcaacacagagaaagagttacgtgcacccgcctgtacgccgctgacattgtctttctgctggacggctcctcgtccattggacgctccaacttccgggaggtgcgctcgtttctcgagggtctggttctgcctttctctggagccgccagtgcgcagggcgtccgcttcgcaactgtgcaatacagcgacgacccacggaccgaattcgggctggatgccctgggctccggaggggacgtgatccgcgccatcagggaactctcctacaaggggggaaacacgaggactggagccgcgattctgcacgtggctgatcacgtgtttctgccgcaactggcaagaccaggcgtcccaaaggtctgtatcctgattaccgacggaaaatcacaggacctggtcgacactgccgcgcaacggctcaagggacagggcgtgaaactgtttgccgtgggaatcaagaacgcggaccctgaagaactcaagcgggtggccagccaacctacttctgacttcttctttttcgtcaacgatttcagtatcctcaggacgcttctgcccctggtgtctcgccgcgtgtgcactaccgccgggggtgtgccagtcacccgcccgccagatgattccacttccgcacctcgggacctcgtgctgtccgagccatcctcgcagtcgttgcgcgtgcagtggactgcagcctcgggcccagtgaccggctacaaggtgcagtacactccgctgactggcctcggacaacctttgcccagcgaacgccaggaggtgaatgtcccagcaggagaaacctcggtcagactgcggggcctgcgccctctgaccgaatatcaggtgaccgtgatcgctctgtacgcgaactccatcggagaggccgtgtcgggtaccgcgcgcaccactgcgctggaaggacccgagcttactatccagaatactaccgctcattcgctgctggtcgcctggagatcggtcccgggcgctaccgggtatcgcgtcacttggcgcgtgctgtcgggaggaccaacgcagcaacaagaactgggaccaggccagggttcagtgctgctgcgggatctggagccggggaccgactacgaggtcaccgtgtccaccctgttcggtcgcagcgtgggaccggcaacgagcctgatggcgaggaccgacgcatcagtggagcaaactctgcggccagtcatcctcgggccaacttcaattctcctctcctggaatctggtgcctgaagcacgcggctaccggttggagtggcgcagggagactggcctggagcctccgcaaaaggtggtgctcccttcagatgtgacccggtaccaactcgacggactccagccgggcaccgaataccgcctcactctctacaccctcctggagggtcacgaagtggcaactccggccactgtcgtgcccaccggacccgagctgccggtgtcgccggtgaccgacctgcaggctaccgagctgccgggacagcgcgtgcgagtgagctggtcccccgtgccgggtgcgactcagtaccgcattatcgtgcgttcgacgcagggggtggaacggactttggtgttgccgggctcccagaccgcgttcgacctggacgacgtccaagccggactgtcctacaccgtgagagtgtctgcccgagtcggcccacgggaaggatcggcttcggtgctgacggtcaggagagaaccggagacgccgctcgctgtgccaggtttgagagttgtggtgtccgatgccaccagagtgcgcgtcgcctggggacctgtgccgggcgccagcggattcagaatctcgtggtcgactggcagcggaccggaatcttcgcaaacgcttccaccggactcgaccgccaccgacatcactggactccaaccgggaactacgtaccaagttgcggtgtcggtcctgagaggcagagaagaaggtccagcggcagtgatcgtggcacgcacggacccgcttggaccggttcgcaccgtacatgtgacccaagcatcgtcgtcatccgtgacgattacctggacccgggtgccgggcgcaactggctaccgcgtgtcgtggcactcagcgcacggaccagagaagagccagctcgtgtccggcgaagcgaccgtcgccgagctggatggtctggaacctgacaccgaatacactgtgcatgttcgcgcgcatgtggcgggcgtggatggaccaccggcatcagtggtggtccgcaccgctccggaaccagtgggacgggtgtctcgcttgcaaatcttgaacgcaagctcggatgtgctgcgcatcacctgggtcggagtgactggagccactgcataccggctggcatggggacgctcggagggcgggccgatgcggcaccaaatcctgccgggtaacaccgacagcgcagaaatccggggactggagggaggagtctcctacagcgtccgcgtgaccgcccttgtgggtgaccgggaaggaactccagtgtcgatcgtggtcactacgccgccagaagccccgccggccctgggaaccctgcacgtagtccagcggggtgaacatagccttcggctgcggtgggaaccagtgcctcgcgctcagggattcctgctgcattggcagccggaaggtgggcaggaacagtcccgggttctgggcccagaattgtcctcgtaccacctcgacggactcgagccggcaacccaataccgcgtgcgccttagcgtcctcggcccggctggcgagggtccgtcagcggaggtcaccgctagaacggagagcccgcgggtcccgtccatcgaactccgggtggtcgacacgagcatcgactcagtgactttggcgtggactccggtgtcgagagcctcatcttacatactctcttggcgaccgttgcgggggccgggacaggaggtcccaggcagcccgcagactctccctggaatctcatcgtcccagagagttactggactcgaaccgggggtgtcctatatcttcagtcttactccagtgctggacggcgtcagggggcctgaagcctcggtcactcaaaccccggtctgccctaggggactcgcagacgtggtgttcctcccacatgcaacccaggacaacgcgcatcgcgccgaggctacgcggcgcgtcctggagagactggtccttgccctcggcccactcggaccccaggccgtgcaggtcgggctgttgtcctactcccacagaccttccccgctcttcccgctgaacggctcccatgacctcggaatcattctgcagcggatccgtgacatgccctacatggacccaagcgggaataatctgggcaccgctgtcgtgactgcgcacagatacatgctggctccggacgcacctggacggagacagcatgtgccaggagttatggtgctgctggtcgacgaacctcttaggggggatatcttctcgcccatccgcgaggcgcaagctagcggcctgaacgtggtcatgctcgggatggccggcgccgaccctgagcaattgaggcggctcgcgcccggaatggactcggtgcaaactttcttcgcggtcgacgacggaccatcactggatcaggcagtgtccggtcttgcgaccgcactgtgccaggcttccttcaccacccagccacgcccagaaccatgcccggtgtactgcccaaagggacaaaaaggagaaccgggggagatgggactgcgcgggcaggtgggcccgccgggagatccagggcttccggggcggaccggagcccccgggccgcaagggccaccggggtccgcgaccgcgaaaggggagcgaggcttccctggggctgacggcaggccgggttcgcctggtcgcgcaggaaacccgggaaccccaggcgccccaggactgaagggaagtcccggtttgccgggcccacggggcgaccctggagagcgaggaccgcgcgggccgaagggcgagccgggagccccgggtcaggtgatcggtggggaaggcccaggcctccccggacggaagggcgatccaggaccgtccgggccacctggtccccgcggcccgcttggagatccagggccacgcgggcctccaggcctgccgggaaccgccatgaagggcgacaagggagacagaggagagagaggacctccggggccgggagaaggaggaattgcccccggtgagccgggactgcctgggctgccaggatcacccggacctcagggacccgtcggcccgccgggtaagaagggcgaaaaaggggacagcgaggacggcgcgcctggactcccaggccaaccgggatccccgggagagcaaggacctcgcgggccccctggagctatcggcccaaagggagatcgaggatttccgggaccactcggggaagcgggcgagaaaggggagcgaggacctccgggaccagccggctcgagaggcctcccaggtgtggccgggcggcccggagccaaggggccggaaggaccgcccggtcctactggaaggcagggagagaaaggagagccgggccgaccaggagatccagcagtcgtcggtccggctgtggcaggaccgaaaggagagaagggtgatgtggggccggctggaccaagaggagcaaccggtgtgcagggggagcggggcccgcccgggttggtgctcccaggggacccgggacctaagggagatcccggggacagaggcccgatcgggcttaccggacgcgccggtccacccggagactcagggccgcctggggaaaaaggtgatccgggacggccgggaccccctggacctgtggggccacgggggagggacggggaagtgggtgagaaaggagatgaagggccgccgggtgacccagggctcccgggaaaggctggcgaaagagggctccgaggagcacccggcgtgcgcgggcctgtcggagaaaaaggcgaccaaggcgatccgggagaagatggtcgcaacgggtcacccggatcgtcaggcccgaagggggataggggcgagcctggccccccgggacccccgggccggctggtcgacactggaccgggagcccgcgagaagggagaacctggtgatcgcggccaggaaggtccgcgcgggccaaagggagatcctggacttccgggagcgcccggagagcggggaatagagggatttcggggtccgcctggtccgcagggcgacccgggcgtacggggacctgctggcgaaaaaggcgaccggggaccacctgggttggacggtagatctgggctcgatggaaagccgggagccgcggggccgagcggacctaatggggcggccggaaaggcgggagatccgggacgggatggactccctggattgcggggcgagcagggactcccgggcccttccggtccacctggtctgccgggcaagccgggagaggacggtaagcctgggctcaatggcaagaacggcgaacccggagatcccggtgaagatgggagaaagggagaaaaaggagactcgggggcctcgggacgcgagggtcgcgacggcccaaagggggaacgtggagcgcccggcattctgggcccgcagggtcccccgggtttgccaggccctgtaggtccgccgggacagggattcccgggcgttccggggggaaccgggccaaaaggcgatagaggcgagactggaagcaagggagagcaggggctcccaggcgagcgcggattgagaggagagccgggatcggtgccgaacgtggaccgcctgctggaaaccgccggaatcaaggcctccgccttgcgggaaatcgtggaaacttgggacgagagctcaggatcgttcttgcctgtgccggagcgccggaggggtccgaagggcgatagtggagagcagggtccgcccgggaaggaagggccgatcggattccccggagaacgcgggctgaagggggaccgtggggaccctggcccacaggggccgccaggtctggcgctcggtgagaggggcccgcccggtccgagcggactggcgggtgaacctggcaagccgggcatccctggccttcctggtagagctggtggagtcggagaagcaggtcgcccaggagaacgtggcgagcggggagaaaaaggtgagcgcggggaacaaggcagagacggtccgcctggtctgcccgggactcccggaccacccgggccgcctgggccgaaagtctcggtggacgaacctggcccgggcctgtccggagaacaaggacctcctggactgaagggtgcgaaaggcgagcctggatcgaacggcgaccagggccctaagggagatcgcggtgtcccaggaatcaagggcgatcgcggcgagcccggtccacggggacaagacggaaatccgggtttgccgggcgagcgcggaatggcgggaccggaaggaaagcccggacttcaagggccgaggggaccgcccgggcctgttggaggacacggagatccggggcctccaggtgccccgggactggccggaccagccggtccacagggcccttcgggtctgaaaggagaacctggagagacgggcccccctggcagagggctgactggaccgaccggtgccgtgggcctgccaggaccacctggcccgtcgggattggtgggcccccagggatcaccgggactgccagggcaggtgggcgaaaccgggaaaccaggcgcacctggcagagatggagcgagcggaaaggatggtgaccggggcagcccgggagtacccggctcccccgggctgccaggacctgtaggaccaaagggtgaaccgggtccaaccggagcccctgggcaagccgtcgtggggctcccaggagcaaaaggcgaaaagggtgcaccgggcgggctggcgggggatctcgtcggtgaacccggagcgaagggtgaccgcggacttcccggcccacgaggtgaaaagggcgaagcgggacgggctggagagccgggtgacccaggagaggatggacaaaaaggcgccccagggccgaagggattcaagggagatcctggcgtgggagttccaggttcgccgggcccgcccggaccgccaggagttaaaggggatctggggctcccgggtctgcctggagccccgggcgtggtgggctttccgggtcaaaccggaccgcggggagaaatggggcagccgggacccagcggagaacggggtctggcaggaccgccgggaagagaaggcatccccggccctctgggtcctcccggcccacccggatcggttggacctccaggtgcaagcgggctcaaaggtgacaagggtgacccgggagtcggactgccaggaccgagaggagagcggggagaacctgggatccggggtgaagatggtagaccaggtcaggaaggcccaagaggacttactggccccccaggatctaggggagagcgtggagagaagggagatgtgggttcagcaggcctgaagggagataaaggtgactccgccgtgatccttggcccacctgggccgagaggtgctaagggtgatatgggagagcgcggaccgagagggctcgacggagacaagggtccgcgcggggataacggagatccaggcgacaagggcagcaagggtgagccgggcgataagggcagcgccggactgcctgggctcaggggattgctgggcccgcagggacagcccggagccgctggcatcccgggcgacccaggaagtccaggaaaggacggggtccctggcatcagaggtgaaaagggagacgtgggatttatgggcccccgaggactcaagggagaacggggcgtcaaaggggcatgcggactggatggagagaagggggacaagggcgaagccggacctccgggtcgaccgggcctcgctggacacaagggcgagatgggagaaccaggcgtgcccggacaatcgggagccccaggtaaagaaggcctgatcggacccaagggggaccgcgggttcgatggacaaccaggaccaaaaggcgatcaaggagagaagggagaacgtggcactccaggaatcggaggctttcctggcccatccggaaacgacggatccgcagggccaccaggcccaccagggagcgtcgggcctcgcggtccggaaggactgcaggggcagaaaggagagcggggcccacccggagaacgagtggtgggcgctcctggggttcctggtgccccaggggagaggggcgaacagggacgccccggacctgccggaccgaggggtgaaaagggagaggccgcgctgactgaggacgatatcagaggattcgtgagacaggaaatgtcacaacattgcgcctgccagggtcagttcatcgcctccggatcacggccgctgccttcatacgctgctgacactgcgggaagccagctccacgccgtcccggtgctccgtgtcagccacgccgaggaagaggaacgagtgccacctgaagatgacgaatactccgagtatagcgaatactcagtggaagagtaccaggatcctgaggccccgtgggactcagatgatccttgttcactcccgcttgacgagggaagctgcaccgcctacactctgcgctggtaccaccgggcagtgactgggtctaccgaagcgtgccacccgttcgtctacggtggatgtggaggaaatgctaatcgctttggcactcgcgaagcatgtgaaaggagatgccccccacgagtggtccagtcacaggggaccggaaccgcccaggac

SEQ ID NO: 9638 - DNA, 8832 bp, synthetic construct
  misc_feature 1..8832: note = source = /note="Description of Artificial Sequence: Synthetic coding sequence"
  source 1..8832: mol_type = other DNA
atgactctgaggcttcttgtggctgccctttgtgcagggattcttgcagaagcccctcgcgtgagagcgcaacaccgggaacgcgtgacttgcaccagactgtacgcggcagacatcgtgtttcttctggatggatccagctcaataggcagatcgaattttcgcgaagtccgtagcttcctggaggggcttgttctcccgttttcaggagcagcgtcggcacagggagtgcgatttgcaactgtccaatactccgatgatccacggaccgaattcggactcgacgccctcggttccggcggtgacgtcatcagggccatccgcgaactttcttacaagggaggcaatacccgaactggggctgctatcctgcatgtcgcagaccacgtgttcctgccacagctggcaagacctggagtgccaaaggtgtgtatccttattactgatggcaaaagccaagatcttgtcgatactgcagcacaacgtctgaagggtcaaggtgtgaagctctttgctgtcggtattaagaatgccgatcctgaggaactgaagagagtggcctcccagccaacctctgacttctttttcttcgtgaatgatttttcgattcttaggaccctcctccctcttgtcagcaggcgcgtgtgcactacggcgggcggagtccccgtgactagaccccctgatgattcaacgtcggctcccagagatttggtcctgtcggaaccatcgtctcagagccttcgtgtgcagtggaccgcagcctcaggccctgtcactggctacaaggtgcagtacacccctctgaccggtcttggacaacccctgccatccgaacgccaggaggtgaatgtgccggcaggagaaacttccgtgagattgagaggtctgcgaccccttaccgaataccaagtgactgtgatcgcactgtacgcaaactccattggagaagcagtctcgggcaccgcgcgcactactgcacttgaagggcccgaacttacgattcagaatactactgctcatagcctgctcgtcgcatggcgttcggtcccaggtgcaaccggataccgtgtgacctggcgggtcctctcgggcggaccaacccaacaacaggagctgggacccggacaaggttccgtccttcttagagatttggagcctggaactgattacgaagtcactgtgtcgacccttttcggacgctccgtgggacctgcaaccagcctgatggcaaggactgatgcgtccgtggagcagacgctgcggccagttattcttgggccaacttcgattctgctttcgtggaacctcgtgcctgaggctcgtggatacaggctggagtggcggagagagacgggcctcgaaccaccacagaaggttgtcctgccttctgacgtgacgagataccaacttgatgggcttcaaccaggaacggagtacagactgaccctttacacccttctcgagggccatgaagttgcgactccagcaacggtggtgcctacgggcccggagctgccagtctcccccgtgactgaccttcaagcaaccgagctcccaggacagagggtcagagtgtcgtggtcacccgtccccggggcgacgcaataccgtatcatagtccgatctactcagggcgtggagaggaccctcgtccttccagggtcccagaccgctttcgacctggatgacgtgcaggcaggactgtcctacaccgttagagtttccgcgagagtggggcctagagaggggagcgcctcggtgttgaccgtgcgacgggaaccagagactccacttgcagtgccaggactgagagtcgtggtgtccgatgccaccagggtccgggtggcatgggggccagtccctggagcttcaggatttcgtatcagctggtcgaccggttcgggaccagagtcctcacaaacgctccctccggactccaccgctacggacattaccggactgcaaccgggtactacttaccaagtggcggtgtcagtcctgcgaggtagggaagaaggtccagccgccgtgatagtggcccgtactgatcctttgggcccagtcaggaccgttcatgtgacccaggcatccagctccagcgtcactatcacgtggacgagagtgccgggtgctactggttaccgagtgtcatggcatagtgcccatggaccagaaaagtcccagctcgtgtcgggtgaagccaccgtggcggagcttgacgggcttgaacccgataccgagtacaccgtccatgtgcgggcacatgtcgcgggtgtggatggtccaccagcctcggttgtggtgagaactgctcccgaaccagtgggaagggtttcgcgcctccaaattctgaacgcgtcatcagatgtgctgcgtatcacttgggtgggagtgaccggagccactgcctaccggctggcatgggggcggtcagaggggggtcccatgcgacatcaaatactcccaggcaatactgacagcgccgaaattcgtggacttgaaggtggagtgtcgtactcggtgcgggtgactgcacttgtcggggatcgggaaggcactcccgtctcgattgtggtgaccacgcctcccgaagcacctccagcgttgggaactcttcacgtggtgcaacggggagaacactcgttgagactcaggtgggagcctgtgcccagagcacaggggtttcttctccattggcaacctgaaggagggcaggaacagtcacgggtcctcggtccagagcttagctcatatcacctggacggacttgaacctgctacccagtacagagtcaggctctctgtccttggacctgcaggggagggaccctcggcagaggtgacggcaagaactgaatcgcccagagtgcccagcatcgaactgagagtcgtggatacctcgattgattcggtgaccttggcctggactcccgtctcgcgcgcatcaagctatatcctgtcgtggcgcccacttagaggcccaggacaagaggtccctggatcacctcaaaccctccctggaatttcttcgtcccaacgtgtgaccggtttggagccgggagtgtcgtacatcttttccctcactcctgtgctggacggagtgagaggacctgaagcgtcagtgacgcaaaccccggtgtgtcctagggggctcgcagatgtggtgtttctgccccacgctacccaagataatgctcaccgtgccgaagccactagacgcgttcttgagagactggtgctggctcttggacctctcggtcctcaagcagtgcaggtaggactgctttcatactcgcataggccatcgccactgtttccactgaacggtagccacgatcttggtatcattctgcaacgcatccgagatatgccatacatggatccgtccggtaataacctgggtaccgccgtggtgactgcccacaggtatatgctggcacctgacgcacccggacgtcgtcaacatgtgcccggagtgatggtgcttcttgtcgatgagcctttgcggggtgacattttctctccaatacgggaagctcaggcctcgggtctgaatgtggtgatgcttggaatggcaggtgctgaccctgaacagcttagacgtctggctccaggaatggattcagtccagacgttttttgcggtggacgacggcccttccttggatcaagccgtatccggattggcaaccgcactttgtcaagcatcctttactacccagcctaggcctgagccttgccccgtctactgccccaaagggcagaagggtgaacctggggagatgggccttagaggtcaggtggggccacccggagatccaggacttccaggaaggactggtgcaccaggacctcaaggtcctcctggttcggccaccgccaagggagagcgaggattccctggtgccgatggcagacccggttcgccaggtcgcgcaggaaaccccggcactccaggagctcctggactcaagggttccccgggcctgcctggccctcgtggtgaccctggagaacgcggaccaaggggtccaaagggcgaacccggagcaccaggacaagtcattgggggagaaggacctggactgcccgggcgtaagggtgacccaggtccctccggcccacctggcccacgaggtcccctgggcgaccctggcccacgaggtcctcctgggctgccaggaaccgcaatgaagggagacaagggcgaccggggagagcgcggtccaccagggccaggtgaggggggaatagcaccgggagaaccgggactccccggattgcctgggtcgcccggccctcaaggtccagtgggaccaccaggaaaaaagggtgaaaagggcgatagcgaagatggtgcacctggactgccaggtcagcctggttcccctggggaacaaggtccccgaggcccgcctggggctattggtcctaagggtgataggggttttcctggaccccttggtgaagccggcgaaaagggagagagaggacccccaggaccagcaggttcacgcggcctgcctggtgtggctggtcggcccggagcaaagggaccggagggaccacctggacccaccggtcgtcaaggagaaaagggagaacctggacggcctggcgaccctgcggtggtcgggccagcagtcgcaggacctaagggtgaaaagggagacgtcggaccagcaggtcctcgtggtgcaactggggtgcagggcgaaagggggccaccgggcctcgtgctcccaggagatcctggtccaaaaggagatccgggcgatcggggcccaatcggtctgacggggagagcaggtcctcctggagattccggaccccctggggaaaaaggagatccaggtaggcccggtcctcccggtcctgtgggccccagagggcgtgatggagaggtgggtgaaaagggagacgaaggtccgccaggagatccaggacttcccggaaaggcgggagaacgcggcctgagaggggcacctggggtgcggggtcctgtgggtgaaaagggtgaccagggagatccgggggaggatggaaggaatggaagccctggttcatccggacccaaaggggatcggggagaacccggtccaccaggaccaccgggacgactcgtggataccggtccgggggcccgtgaaaaaggagaaccgggagatcgcggacaagagggaccccgcggaccgaagggcgatccaggactgcctggagcacccggagaacgcgggatcgaggggttcagaggccctccaggaccacaaggagatccaggtgtccgagggcccgcaggggagaagggtgatagagggcccccgggcctggatggccgctcgggactcgacggtaagcccggagcggcaggaccatcgggaccgaacggcgctgcaggcaaggccggtgatccagggagggatggactccccgggcttcgcggagaacagggccttcctggtcctagcggtccaccaggtctgcctggaaaaccgggagaggacgggaagccgggtcttaacggtaagaacggggagcctggggatccaggagaagatggacgaaagggcgagaagggagactccggtgcttcagggagggaaggtcgtgatggaccaaaaggagaacgcggagcaccaggcatcctcggaccacagggccctcccggacttcctgggccagtgggccccccgggccaagggtttcccggtgtccctggaggtaccgggccaaagggagatcgcggagagactggttccaagggagaacaaggactgcctggtgagagaggcctccgcggcgaaccaggctcggtgcctaacgttgatcggctgcttgaaaccgcaggaataaaggcctcggcactgagagaaattgtggagacttgggacgaatcctcaggttcatttctgccggtgcccgaacggagaagagggccaaagggagactccggagagcagggaccccctggaaaggagggacccataggtttcccaggtgaacgcggtcttaagggggatcgcggagatcctggtccgcagggacccccaggactggcactcggagaacgaggacccccgggcccctcgggccttgccggagaacctggaaagcctggtattcctggtttgcccggtcgggcaggtggggtcggggaggcaggtcgccccggcgaaaggggagaaaggggtgaaaaaggcgaaagaggagaacaaggacgggatgggcctcctggcctccctggaaccccaggaccgccaggccctcccggccctaaggtgagcgtggacgagcctggccctggactttccggtgaacagggtccacctggtctgaagggagcaaagggcgaacctggatcaaacggagatcaggggcctaaaggggacaggggagtgcctggaattaagggtgatagaggtgaacctgggcctcggggacaagacggtaaccctgggctccctggcgagcggggaatggcgggaccagaggggaagcctggtctgcagggaccgagaggcccacctggccctgtggggggacacggggaccctggacctccgggtgcccctggactggcaggacctgcagggccccaagggccatcgggactcaagggtgaacctggggagactgggcctccaggacgtggcctgacgggcccaaccggcgcagtcggcttgcccggtcctcctggcccctcgggactcgtgggccctcaagggtcaccaggacttccgggtcaagtcggagaaactggtaagcctggcgcaccaggcagagacggggcatcaggaaaggatggagacagaggatcaccaggggtccctggatcacctgggctcccgggccctgtggggccaaagggggagcctggacctactggtgcccctggccaggccgtggtgggactccctggggcgaaaggcgaaaagggcgcacccggaggactggcgggagatttggtgggtgaaccgggagcaaagggcgatagaggactccctgggccaagaggtgaaaaaggtgaagccggacgtgccggagaaccaggcgatcctggagaggacggccagaagggcgcacccggtcccaaggggtttaagggggaccctggtgtcggtgttcctggatcccctggaccccctgggccccctggtgtgaaaggggaccttggtctgcctggactccctggtgcacctggagtcgtgggcttccctggacaaactggtccacgtggtgaaatgggccaacccggaccgtcgggcgagcgaggtcttgcgggtcccccaggaagagagggaattcccggaccacttggtcctccaggaccacctggatcggtggggcctccaggagcatccggactcaaaggcgataagggcgatccaggggtcggattgcctggtccaagaggagaacggggcgagccaggcatccgcggcgaagatggacggcccggccaagaaggtcctaggggacttaccggacctcccggatcgaggggagaacgcggtgaaaaaggagatgtgggatcagcagggcttaaaggggataagggcgattcggcagtcattcttggacctccaggaccacggggtgcaaaaggtgacatgggcgagaggggcccaaggggcctggatggtgacaaaggaccacgaggggataacggggatcctggtgacaagggctccaaaggagaacctggtgataagggctcagctgggctgcctggtctgcgaggactccttggccctcaaggacaacctggtgcggcaggcattcctggagatccaggctcgccaggtaaggatggagtgcctggaataagaggagaaaagggcgatgtcggcttcatgggtcctagagggctgaagggagagagaggagtcaagggggcctgtggtttggacggagaaaagggagacaaaggggaggcaggaccccctggccgcccaggacttgcaggtcataagggggagatgggtgagcctggagtgccgggtcaatcaggagcacctggtaaagagggactgattggtcctaagggcgatagaggttttgacggacagccgggaccaaagggggaccagggggagaagggggagagaggtaccccaggcatcggtggatttccggggccctcgggtaacgatggaagcgcaggtccaccgggtcccccagggtccgtgggtccccggggtcccgaggggctccagggacaaaagggagaaaggggaccgcccggagaacgcgtcgttggtgcacccggggtccccggagctccaggagaacgcggcgagcagggacgacctggaccggcagggccgagaggagagaaaggagaggctgcacttactgaggacgacattcgaggtttcgtgagacaagaaatgagccagcattgcgcatgtcaggggcaattcattgcaagcggatctcggcccttgccttcatacgcagccgatactgcgggttcccagctccatgcagtgcccgtgctgagagttagccatgcagaagaagaagagagagtccctccagaggacgatgaatactcggaatacagcgaatacagcgtggaagaataccaggaccccgaggcaccatgggattcggatgatccctgctcccttcccttggatgaaggatcgtgcactgcatacactctgcggtggtaccaccgggccgtgacgggatccactgaagcatgtcaccctttcgtgtacggaggatgcggcggaaacgcgaatcgattcggcacgagggaggcctgtgaacggagatgtccccccagagttgttcaatcgcaaggcactggcaccgcacaagac

SEQ ID NO: 9639 - DNA, 8832 bp, synthetic construct
  misc_feature 1..8832: note = source = /note="Description of Artificial Sequence: Synthetic coding sequence"
  source 1..8832: mol_type = other DNA
atgaccctgaggctactggtagccgcactctgcgctgggattctggccgaggcccctagggtaagagcacaacatagggagcgagtgacctgcaccaggttgtacgccgctgacatcgtttttctgctggatgggagttcgagtatcgggcggagcaatttccgtgaggtacggagcttcctggagggtctggttctcccgttctccggtgctgccagtgcccagggagtccggtttgccaccgtccagtactcagatgatccacgaacggaattcggcttggacgctctcggctcggggggggatgttataagggcaatccgggagctgtcatacaaaggcggaaatacacgtactggagcggcaatcctgcacgttgcggatcatgtgtttttaccacagctggccagacctggggtgccgaaagtgtgtattctgataacagacggcaaatcccaggaccttgttgatactgctgcacagaggttgaagggccagggcgtcaagctgttcgccgtggggataaaaaatgccgacccagaggaactgaagcgtgttgcgagtcagcccacctctgatttcttttttttcgtcaatgatttcagcatcttgaggactctgctgcccttggtgtctcggcgggtgtgcacaaccgcaggcggcgtgccagtgacaagacctccggatgatagcacctctgcccctcgggaccttgtactcagtgaaccatcgtcacagtctcttagggtgcagtggactgccgcaagcgggccagttactggctataaggtccagtacacacctttaactgggctcggccaacctttgccctccgaacgacaggaggtcaacgttccggccggcgagacctctgttcggctgagggggctgagacccctgacggagtaccaggtcaccgtgatcgcactgtacgccaattctattggcgaggccgttagcgggacagcccgcaccactgcgctagagggcccggagttgacaattcaaaataccacagcccactcccttctggtcgcttggcgctctgtccctggcgctaccggatatcgcgtcacctggcgagtgctctcagggggcccaacccagcagcaagaactgggcccaggacaggggtctgtcctgctgagagatttggaacccggaacagactacgaggtaacagtgagcacactgttcggcaggtccgtcggtcccgcgacaagcttaatggcccgcaccgacgcaagcgtcgagcagactctacggcctgtcatccttggaccaacatctatcctcctaagctggaatcttgtgccagaggcccggggctaccggctggaatggcgccgcgagaccggtctggaacctcctcagaaagtcgttctaccatccgatgtgacacggtaccagctggatgggctacagcctggaacagaataccgactgaccctgtacaccctgttggaaggacatgaagtggccactccagccactgtcgtacctaccggcccagaacttcctgtgagtcctgtgaccgacctgcaggccaccgaacttcccggccaacgagttagagtgagttggagtcccgtccctggcgccacacagtacaggattatcgtcaggagcacgcagggtgtcgagaggaccctggtcctgccaggctctcagactgccttcgacctggacgatgtccaggctggtctgtcatacaccgtgagggtatccgcgcgcgttggacctcgagaaggaagcgcttccgttctaaccgtccgccgtgaaccggagacgccattggcggtgcctgggctgagagtggtggtgtcagacgcgacccgcgtgcgggttgcatggggcccagtgccaggagcgtcaggattcaggatatcatggagcactggcagcgggccagaaagttcccagaccctaccacccgactccactgccacagatatcacaggtcttcagcccggtaccacgtaccaagtcgcagtttctgtgctgcgaggtcgagaggaaggccccgctgccgtcatagtggcgcgcacagaccccctggggcctgtacgcactgttcatgtaacccaggcatcatcgtccagtgttacaatcacatggacacgggtgcccggtgcaacaggatatagagtgtcatggcactccgcccacggccctgaaaagagccaactcgtgtcaggagaggcaacggtggcagagctcgacggtctggaaccagacacagaatacacagtacacgtcagggcacatgtcgcaggcgttgacgggcccccagcgtctgtggttgttcggactgccccagagcctgtcggccgggtatcccggttgcagattttgaatgcaagctcagacgttctgaggattacttgggttggagtgaccggcgccacagcctataggctggcttggggacgcagcgaaggaggtccaatgcgccaccagatcctgcctggcaatactgacagtgcagaaattaggggtctcgaggggggcgtgtcatatagcgtgagagtgaccgcccttgtaggtgaccgggaggggactcctgtgagtatagtggtcacaactccccctgaggccccgccagcactgggaacactgcacgtcgtccagcggggcgaacactcactacgtctgcggtgggagccagtgccacgagcccagggctttctgctgcactggcaacctgaaggcggtcaagagcagagcagggtattagggcccgagctgtctagttatcaccttgacgggcttgaaccagcaacccaataccgtgtccggttaagcgtattaggcccagctggcgaggggccttcagcagaagtgacggccagaacagaaagcccacgagtcccttctatcgagctgcgagtcgtggatacctccatcgactccgttacactggcgtggactcctgtctcacgcgccagcagttacatactgtcatggcgccccttaaggggtccggggcaggaagttcctgggagccctcagacactgcctggaatctcatcgtcacagcgggtcacaggactggagccaggagtcagctacatattctctttaacaccagtacttgacggagttagagggccagaagcctccgtcacccagactccagtctgtccgcgcggactggctgacgtggtgtttctacctcatgcaactcaggacaacgctcaccgcgcagaggccaccaggagagtcctggaaagacttgttctggccctcggacctctggggccacaggccgtacaggtcggcttgctgagctatagccatagacctagccctctgttccccttaaatgggtctcacgacctaggaatcattcttcaaaggatcagggacatgccctacatggatccgagcggaaacaatctcgggaccgcggtggtgactgctcacaggtacatgctcgctcctgacgctcctggacggcggcaacatgtgcccggtgtgatggtactgctcgtggatgagccacttcggggagatatcttcagtcccatccgggaggctcaggcaagtgggttaaacgtcgttatgctgggcatggcaggagccgacccagagcagctgagacgcttagcacccgggatggactccgtgcaaaccttctttgccgtcgatgatgggccctcactcgaccaggccgtttctggcctggcgaccgctttgtgtcaagccagctttaccactcagccccgccccgagccatgtcctgtctactgccctaaagggcagaagggagagccgggtgagatgggcctgaggggtcaggtcgggcctccaggtgaccccggattgccagggaggacaggagcccccggaccacagggcccccccgggtccgccaccgctaaaggtgaacgagggttcccgggtgccgacgggcggccaggatctccaggtcgggcgggcaatccgggcacgcctggcgcccctgggctgaagggttctccgggcctgcccggcccccggggagacccgggcgagcgcggcccccgcggcccaaagggggagcccggtgcacccggccaggtgattggaggggagggtcccgggttaccagggagaaagggcgatcccggcccatctgggcctccgggacccagggggccactgggagaccccggacccagaggccctccgggcttgccaggtactgcaatgaaaggcgataaaggcgaccgcggcgaaaggggccccccaggcccgggcgaagggggaattgctcccggagaaccaggcctgccgggcctgcccggctcccctggaccgcagggccctgttggaccacccgggaagaagggtgaaaagggcgacagcgaagacggcgccccaggtctaccaggccagccaggtagcccaggagagcagggccccaggggcccaccgggagctatcgggccgaagggggaccgcggattccctgggcctttgggcgaggcgggcgaaaagggggaacgcgggccaccaggccccgctggaagccgcggcctgcctggggtcgcaggacgacccggcgctaaaggtcctgaagggcccccaggtcccacaggacgccagggcgagaagggagagcccggtagaccaggagatcctgctgtggttggacctgcggtcgcaggtcccaagggtgagaaaggtgatgtcggtcccgcaggcccacgaggagcgacaggtgtccagggcgagcggggtccccctggcctcgtgctgcccggcgatcctgggcccaagggcgacccaggcgaccgaggccctatcggcctcacggggcgcgcgggcccccccggcgacagcggccctccaggtgaaaaaggggaccctgggaggcctgggcctccagggcccgtggggccacgcgggcgcgacggcgaggtgggagagaaaggagacgaggggcctccaggggatccgggtcttcccggaaaagcaggtgagaggggtttgcgtggggctcctggcgtgagaggccctgtcggggaaaagggggatcaaggagatccaggtgaggatggacgcaacggatcccctggtagtagtggacctaagggcgacaggggcgagcctggtccccctggccccccaggcaggcttgtggacacagggcctggcgcaagagagaaaggcgaacctggagaccggggccaagagggccctcggggacctaaaggcgacccaggacttcccggggcgcctggcgaaagaggaatcgagggcttccggggcccgcctgggccacagggcgatccaggcgtgcgcgggccagctggcgagaagggagacaggggccccccagggctagacgggagaagtggtctggatggcaagcccggggctgccggcccgtcaggaccgaacggcgctgcagggaaagctggcgaccctggccgtgacggtctgcctgggctgcggggtgaacaggggctcccaggcccttcaggccctccagggttgcccggtaagcctggcgaagacggcaaaccgggccttaacggcaaaaacggggagccaggcgacccaggagaggatggcagaaagggtgagaaaggagatagtggcgctagcgggcgggagggccgggatgggcctaagggagaacgcggcgccccaggaatcttaggtccacaagggccacccggcctgccaggacccgttggccctcccggccagggtttccctggggtcccaggcggcactggcccaaagggcgataggggcgagaccgggtctaagggcgaacagggcttgcccggggagaggggcttgcgtggcgagcctggaagtgtaccgaacgtggacaggctcctggagaccgctgggatcaaagcaagcgcgctacgtgagatagtagaaacgtgggacgaatccagcggatcatttcttccagtccccgagaggcgccgaggccccaagggagactctggcgaacaagggccccccggaaaggaaggaccaatcggttttccgggagagcgtggcctgaagggagacagaggcgatcctggacctcaaggacctccgggccttgcgctgggggaacgtgggccccccggaccaagcgggctggcaggcgagcccggaaagccaggaatacccgggctgcccggacgggctggcggagtgggcgaagccggacggcctggtgagcgtggggagcggggcgagaagggagaacgcggcgaacaggggcgggatgggcctccaggtcttccgggaactcctggccccccaggaccccccggacccaaggtgtcggtggacgagccaggccctggcctgagcggcgaacagggaccaccaggtctgaagggggctaagggtgagcccggcagcaatggggaccagggcccaaaaggggaccgcggcgtgcctggaatcaagggcgatcgcggcgagccaggtccgaggggtcaggacggtaatcccgggctcccaggagaacgcggcatggccggacccgaaggcaagcccggcttgcaggggccaagggggcccccaggaccagtgggaggccacggtgaccctggcccccccggcgcccccggccttgcaggacctgccggaccacagggaccatccggcctcaaaggtgagcccggggaaacagggccccccggtagggggttgaccggtccaactggcgccgttggcttgcctggccccccaggaccatcaggtctggtggggccgcaggggagtcccggactgccagggcaggttggcgagactggtaagcctggagctcctgggagggacggcgcctcagggaaggatggggataggggcagtccgggtgtgcctggatcaccaggactgccgggacctgtcggtccgaagggtgaaccagggccaacaggagcccctggccaggctgttgttggcctaccaggcgcaaaaggcgagaagggggctccagggggcctcgcaggtgatctggtcggggagcctggtgctaaaggtgaccggggacttcccggcccccgtggcgaaaagggcgaagccggaagggctggcgaacctggggatcccggagaggacgggcaaaagggcgcaccaggaccaaagggcttcaaaggagatccgggcgtcggagtgcccggctctccaggccccccgggaccacctggagtcaaaggcgatcttgggctcccgggcttgccaggagccccgggtgtcgtcgggttccctggccagactgggccaaggggagagatggggcagcctggccccagcggcgagagagggttagctgggcctcctggcagagagggaattcctggccctctgggcccacccggcccccctggatccgtgggccctccaggtgcctccggcctcaaaggtgataagggagaccccggggtcggtctacccggcccaaggggcgagcggggagaaccaggaattcgtggcgaagacggtagaccaggccaagagggcccccgcggcctcacaggcccaccaggcagtaggggggagcgcggcgaaaagggcgatgtaggatccgcaggactcaaaggcgataagggggatagcgccgtgatcctcggaccaccaggaccccggggcgctaagggcgacatgggcgagaggggccccaggggcttagacggcgataaaggtcctagaggcgacaacggagaccctggagataagggtagcaaaggggagcccggtgataaagggtcagccggcttgcctggtctgcgcggcctgttgggtcctcaaggacagccgggcgccgctgggattccgggagaccctggttcccctggaaaagatggtgtccctggaatccggggtgagaaaggcgacgtagggttcatgggaccgagagggctcaaaggagaaaggggagtgaaaggtgcctgtggcttagacggtgaaaagggcgacaaaggggaagctggacctcctggaagacctggcctggcgggccacaaaggcgagatgggggagccgggcgtgcccggccagtcaggggcgccaggcaaggagggactgataggtcctaagggcgatagggggttcgacggccagcctggcccgaagggcgatcaaggcgagaaaggcgaaaggggcacccccggcatcggcggctttccgggtccttctgggaatgacgggtctgcaggacctcccgggcctccagggtccgtgggcccacgggggccagaagggttacaggggcagaagggcgaacggggaccacctggggagcgcgtcgtgggagctcccggagtgcccggagctcctggggaaaggggagagcagggtagacctggacccgccgggccccgcggtgaaaagggcgaagctgctctcactgaggacgacattcgcggctttgtgaggcaggagatgtctcaacactgtgcctgccagggtcagttcatagcttccggatctaggccattgccgagctacgccgcagacacagccgggagccagctccacgccgtcccagttttaagagtctcccacgcagaggaggaggagcgagtcccaccagaggatgacgagtattccgagtactcggagtatagtgtggaagaataccaggacccggaagccccttgggattcagatgacccatgctctcttcccctcgatgagggttcctgtacggcttacacccttcggtggtatcatagagcagtgacaggctctacagaggcatgccatccattcgtgtatggcggatgcggcggcaatgccaatcgctttgggacccgggaagcctgcgagagacgatgccccccccgcgtcgtccaaagccaagggacaggtaccgcccaggac

SEQ ID NO: 9640 - DNA, 8832 bp, synthetic construct
  misc_feature 1..8832: note = source = /note="Description of Artificial Sequence: Synthetic coding sequence"
  source 1..8832: mol_type = other DNA
atgactttacggttgctggttgccgccctctgcgccggaatcttggctgaggcaccgcgcgttcgcgcgcagcatcgagaaagggttacttgcactagattatacgcagcagacatcgtcttccttttggatgggtcctcatccataggtcgcagtaatttcagagaggtcagatcctttttggaaggcctagtgttacctttctccggagccgcctccgcccagggggtcagatttgccaccgtacagtatagtgatgacccaagaacagagttcggcctcgatgctctcggtagtggaggagatgtgatccgagcaatcagggagttatcatataagggaggtaacacccgcacaggcgccgccatcctacacgtggctgaccacgtttttctacctcagttggccaggcctggcgtacctaaggtctgcattctgattaccgacgggaagagccaggacctggtggacaccgcagcccagaggctgaaaggacagggggtcaagctgtttgctgttggtatcaaaaacgcggatcccgaagagctgaagagggtagcatctcagccaacaagtgatttcttcttcttcgtcaatgactttagtatactccgcaccctcctcccgctggtgtctaggcgggtttgcactactgctggtggtgtgccagtcacacggccaccagacgattctactagtgccccccgggatctggtgctcagtgaaccttcctctcagtcactgcgggtgcagtggacagccgccagcggccctgttacagggtacaaggtccagtatacacctctgaccggactcggacagcccctgcccagcgaaaggcaggaggtgaacgtgcctgccggcgagaccagtgtgcggcttcggggtctgaggcccctgactgagtatcaggtgacagtgatcgccctctacgccaactctattggcgaggcggtgtcaggcacggctagaaccaccgcactcgaagggcccgagctcacaattcagaatacaactgcgcattctttgctcgtagcctggagatctgtccccggggccaccgggtaccgcgtgacttggcgcgtgctctctggggggcccacccagcagcaggaactgggaccgggtcagggcagcgtacttctcagagatcttgagccaggcacggactacgaggtgacagtgtctacactttttggacgtagcgtaggacccgctacaagcctgatggcacggaccgatgctagtgttgagcagactctccgacccgtaatactcggcccgacgagcatactcttgtcgtggaatctggtgcctgaagctcgcggatataggctggaatggcgcagggagactggccttgagccgccacagaaggttgtgctcccttctgacgtaactcggtatcagcttgacggcctgcaacccgggactgagtacaggctaactctttacactctattggagggccacgaggtggctacacctgccaccgtggtacccaccggtccagaactgccggtgagcccagtgaccgaccttcaggcgactgagctgcccgggcagcgggtgagagtgtcatggtcacctgtgcccggggccacccaatatcgcattatagtgagatcaactcagggagtggagaggaccctggtcctccccggctcccagacagccttcgatttagatgacgtgcaagccggcttatcatatacggtgagggtctccgcccgggttgggcccagggaaggatcagcttccgtactgactgtgaggcgtgagccagaaacacccttggcagtgccaggcctgcgggtcgtggtgtccgatgccacaagggttcgggtggcatggggcccagtacccggtgcaagcggctttaggatctcatggagcaccggatcagggccagagtccagccaaactttgccccccgactcgactgcgaccgatatcaccggcctgcaacccgggactacctaccaagtagccgtgtccgtgctgaggggtcgagaagagggaccagcagccgtgatcgtagctcgtaccgatccactgggcccggtgcggaccgtacacgtgacccaggcctcctctagctcagtgaccattacgtggacaagggttccaggcgcaacaggatatagagttagctggcatagtgcacatggaccggaaaagtcccagctggtatcaggcgaagctactgtagcggaactagatggactggaacctgacactgaatacacggttcatgttcgcgcccatgtcgcaggcgttgacgggcccccagctagtgtcgtcgtgcgcaccgccccagaacccgtcggacgcgtgtccagactgcagatcctgaacgcctcctccgatgttctgcgaatcacatgggttggagttacaggcgccacagcctaccgtctcgcctgggggcggtcagagggagggccaatgaggcaccaaattttgcccggcaacacagatagcgctgagatccggggcctcgaagggggagtgtcgtattctgttagggtgaccgcattggtcggtgatcgtgaaggaaccccagtttccattgtcgtcacaacacccccggaggcacctcccgctctcggtaccctacatgttgtccagaggggcgaacatagtctgcgccttcggtgggagcctgtgcctagagctcagggctttctgttgcattggcagcccgagggcggtcaggaacagtccagagtgttaggccccgagctgagctcctatcacctcgatggattggagcctgccacacagtaccgcgtaaggttgagcgttctcggccctgcaggcgagggccccagcgcagaggtgaccgctcggacagagtccccacgagtgccatcaatcgagcttcgagtggtggatacatctattgattcggtgaccctggcttggacaccagtgagcagggcctccagttacatcctatcatggaggccactgcgcggacctggccaggaagtgcctgggagcccacagaccctgcccggtatttccagctcccagagggtaaccgggctagagcctggcgtgtcttacatattcagcctcacacctgtgcttgacggggttagaggccccgaagcctccgtcacacagacccctgtgtgtccgcggggcctggctgatgttgtatttctacctcatgcgacccaggataacgcccatcgagcggaagccaccaggcgcgtgctggagcgacttgtgctagcactcgggcccttaggaccacaggccgtgcaggttggactcctgtcatattctcaccggccatctccactgtttcccctgaatggaagccatgaccttggtattatcttacagcgcatccgcgacatgccctacatggatcctagcgggaacaatttaggcaccgctgtggtcaccgcccaccggtacatgctggctcccgatgcccctggacgcaggcagcacgtgccgggcgtcatggtgctcctggtcgacgaaccacttaggggtgatattttctcccccattagggaagcccaggcgtctgggttaaacgttgtgatgttagggatggccggagcagaccctgagcagctacggcgcttagcacccgggatggactcggtgcagacattctttgccgtcgacgacggacccagcttggaccaggctgtgtccggtctggctaccgctctgtgtcaggcatcttttaccacccagcctcggccagaaccctgcccagtgtactgtcccaaggggcagaagggcgagccaggagaaatgggccttcgggggcaggtggggccccctggtgaccctggactccccgggaggaccggagcacccggacctcagggaccccctggatccgccactgctaagggcgaacgaggcttccctggcgccgacggacgcccggggagcccaggccgggctggcaaccccgggacccctggcgcgcccggactgaagggatctcccgggctgcctgggccaaggggggacccgggcgagcgggggcctagaggaccgaaaggagagcctggcgcccccgggcaagtgattggaggggagggccccgggttgccaggcagaaagggtgatcccggcccaagtgggccaccagggccgcggggccctctaggggatcctggacctcggggacctcccggccttccaggcacagccatgaagggcgataagggggatcgaggcgagcgggggcccccaggtcctggcgagggcggcattgcccctggagaacccggcctccctgggctgccaggctccccggggcctcaggggccagtaggaccccccggaaagaagggtgagaaaggagattctgaggacggagcccccggacttccagggcagcctgggtccccgggggagcagggacccagggggccccctggagcaataggccccaagggtgacaggggtttcccaggccccctgggagaggcaggtgagaagggtgagcgcggtcccccgggccctgcgggctctcgtggattgccgggcgttgccgggcgccctggcgctaagggccccgaagggcctcctgggccaacagggcgccaaggcgagaaaggcgaacctgggcgccccggagaccccgcggtggtaggcccagcagtggcagggcccaagggcgagaagggagatgttgggcccgcgggacctcgtggggctacaggcgtccagggcgagcgaggccccccaggactggttctgcccggagatcccggtccgaaaggagatcctggtgatagagggcctatcggattgaccggacgcgccgggccaccaggcgactcaggccctccgggcgagaaaggcgaccccggaaggcccggtccacctgggcctgtcggacccagaggcagggacggcgaagtcggagagaagggtgatgaaggtcctccaggcgatccgggcctgcccgggaaggctggcgagaggggcctgagaggggcgcccggagtgagaggccccgtaggagaaaaaggagatcagggcgatccgggcgaggatgggaggaacggaagcccaggcagtagtggccccaaaggcgacaggggcgagcccggacctccagggcctccagggcggctggtggacaccgggccgggtgctagagagaaaggagagccgggcgatagagggcaggaaggaccacgcggcccaaaaggcgacccagggctgcctggagctcctggagagaggggaatagaggggttccggggaccacccgggccacagggggatcccggcgtgcgggggcctgccggcgagaagggagatagaggtccgccagggctggacggcaggagcgggctggatggcaaacccggggctgcagggccaagcggccccaatggtgccgccggaaaggccggcgaccccggacgggatggtctgccgggtttaagaggggagcagggtctgccaggccccagtggccctcctgggctaccagggaagccgggtgaagacgggaaacctggtctcaatggtaagaatggcgagcccggcgatccgggtgaagatggcaggaaaggagagaagggagactccggagcatccggcagggagggaagggacggaccaaagggagaacggggagccccaggaatcctgggacctcagggaccaccaggtctgcctggcccagtgggaccccctggacagggctttcccggggtaccaggcggcaccggacccaaaggcgaccgtggcgaaaccggctccaaaggagaacagggccttccgggtgaaagaggactcaggggggaacccggctccgtccctaacgttgataggctgctggagactgcgggaatcaaggcctctgctcttagggagattgtggaaacatgggacgaatccagtggcagcttccttccagtcccagaaaggcggcgggggccgaaaggggatagtggagaacagggccctccgggcaaggagggtccgataggctttcccggtgaacggggtcttaagggggatcgcggggatcccggtccccagggcccacctggtctggccctgggtgagcgaggacccccgggaccctctgggttagctggcgagccgggtaagcccgggataccaggacttccgggccgtgctggcggcgtcggggaagccggtcgtccgggagagcgcggggagagaggggaaaaaggggaacgcggagagcaaggccgagacggcccccccggattaccgggtacaccaggaccccctggcccgcccggtcccaaggtcagcgtcgacgagcccgggccaggcttgtcaggcgagcagggcccgcccggtctgaaaggcgctaaaggcgagcctgggtctaacggagatcaggggccaaaaggcgacagaggggtgccaggcattaaaggcgatagaggggagcccggaccgagaggccaagacggaaaccctgggctcccaggcgagcggggcatggccggccctgagggcaagccaggactgcagggccctcgggggccaccaggcccggtcggcgggcacggggaccccggacctcccggagcccccgggctggccgggccagcgggcccccagggccccagcgggttgaagggcgagcctggggaaactggaccaccgggccggggattgacaggccctaccggggcagttggactgcccggcccacccggaccttccggactagttggcccccagggaagccctgggttgcctggtcaggtgggcgaaacagggaaacctggagcgcccggccgggatggagcgagcggaaaggacggtgaccgtgggagtccaggggtacctgggtccccaggattgcccggccctgtaggacccaagggagagcccgggcctaccggcgcacccggacaggcagtggtcggcttaccaggggctaaaggagagaagggcgccccaggtggactggcaggggaccttgtgggggagccaggcgcaaaaggcgatcgaggcttaccaggcccaaggggcgagaaaggcgaggcaggacgggcaggtgagcctggagaccccggtgaggacggccagaaaggagctccgggacccaaggggttcaagggagacccaggggtaggcgtacctggaagcccaggaccccctggacccccgggagtgaagggcgacttaggtcttcccgggctgcctggagccccgggggtggttgggttccctggacaaacgggccccagaggcgagatggggcagccaggtccttctggcgagaggggactggccggcccacctggtagagaagggatccctgggccgttaggccccccaggaccccccggaagcgtgggaccgcccggagcgtctgggctcaaaggcgacaagggtgatccgggtgtggggctccccggccccaggggcgaaagaggggagcctggaattcggggggaggacgggcgcccaggacaagagggccctagggggttaacgggacctcctggaagccgaggcgaacgaggagagaagggcgacgtgggctccgccggactgaaaggagacaagggtgatagcgcggtgattcttggcccaccgggtccccgcggtgcaaagggcgacatgggcgaacgaggcccgaggggcttggatggagataagggtcccaggggtgacaatggcgatcccggggacaaaggatctaagggagagccgggggataaaggaagtgcaggactgcccgggctccggggattgttgggcccccagggtcagccaggcgcagccggaatacccggagacccaggctctcctggcaaagatggtgttcccggcatcaggggagagaagggcgacgtgggatttatgggccctaggggcttaaaaggtgaacgcggggtaaagggggcctgtggcttggatggtgaaaaaggggataagggtgaggcaggaccccctggcagacccggccttgccggccacaaaggggaaatgggagagccaggggtccctgggcagtccggagcaccaggcaaagaaggattgatcggacccaagggggatcgcggctttgacggtcagcccggccccaagggcgatcaaggcgagaaaggggagcgtggaacaccggggatcggtgggttccctggaccgagtggcaatgatggatcggctggtccccctggcccccctggtagtgtaggcccgcgggggcctgagggtctccaggggcaaaagggcgaacggggacctcccggcgagcgtgttgtgggggcacccggagtacccggagcacctggagagcgtggggaacagggacgtcctgggcctgccggccctaggggggagaaaggagaggctgcgctgacagaggatgacatccgtggatttgtacgccaggaaatgtcacagcactgcgcttgtcagggccagtttatcgcttctggaagcagacctctgcccagctacgcagccgacaccgcaggatcgcagttacacgccgtcccagtgcttagagtgtcccatgctgaagaagaggaacgggttccacccgaggacgacgagtacagtgaatattctgagtattctgtggaggagtaccaggatcccgaggcaccttgggattctgatgacccttgtagtctaccactggacgagggatcctgcacagcctatacattacgctggtatcacagagctgtaactggaagtaccgaggcgtgtcacccattcgtctatggtggctgcggagggaacgcaaataggtttgggaccagagaggcgtgtgagaggaggtgccccccaagagtggtccagagtcagggtactggcacagcccaggac

SEQ ID NO: 9641 - DNA, 8832 bp, synthetic construct
  misc_feature 1..8832: note = source = /note="Description of Artificial Sequence: Synthetic coding sequence"
  source 1..8832: mol_type = other DNA
atgaccctgcgactccttgtcgctgccctgtgcgctggaattctcgccgaagctccgcgggtgcgggcccagcatcgggagagggtcacttgcacccgtctgtacgcagccgacattgtctttctgctcgatgggtcgtcaagcatcggtaggtcaaatttccgcgaagtgcgctccttcctggaaggcctggtgctgccattttccggagctgcctccgcccaaggcgtccgcttcgcaaccgtccaatactcagacgacccgagaactgaattcggcctggatgccctcggctccggaggcgacgtgatccgggctatccgcgagctctcatacaagggcggaaacactagaaccggagcggcaatcctccacgtggccgaccacgtgttccttccacaactcgcgaggccgggggtgccaaaagtctgcattctgatcactgatggaaaatcacaggatctcgtcgacaccgctgcgcagaggctgaagggtcagggagtgaagctctttgctgtcggcatcaagaacgctgatcctgaggagctgaaacgagttgcttcacaaccgacgagcgactttttcttctttgtgaacgacttcagcatcctgcgcaccctcttgcccctggtgtcacgccgcgtgtgcacgaccgcaggaggagtgccggtcaccagaccgcctgacgactccacgtccgcgccgcgggatctggttctcagcgaaccctcttctcagtccctgcgcgtacagtggaccgccgcgtccggtcctgtcactggttacaaagttcagtacacccctctgacgggactgggacaacctttgccatccgaacgacaagaggtcaacgtgccagctggtgaaacttccgttcggctccgcggcctgaggccgcttaccgagtaccaggtgactgtgatcgccttgtacgccaactcaatcggcgaggctgtgagcggaaccgcgaggaccaccgcacttgagggcccggaactgactattcagaacaccaccgcacactcactcctggtagcgtggcgctccgtgccaggggccactggatacagggtcacgtggcgcgtgttgtccggaggaccgacccagcagcaggagcttggtccaggccaggggtcggtgctcttgagagacttggaaccgggcacggattacgaggtcaccgtgtcgactcttttcgggcgatccgttgggcctgcgacttccctcatggcgagaaccgatgcctctgtggagcagactctccgacccgtgattctgggtccgacctcgatcttgctgtcgtggaaccttgtgcctgaggcgcgcggctaccggctggagtggagacgggaaacggggttggagccgcctcagaaggtggtgttgccgtccgatgtgaccagatatcaattggatgggctccagccgggaacggaatacagactcaccctgtacaccctgctcgaaggacacgaagtggccaccccggccaccgtggtgcccaccggcccggagcttccggtgtcgcccgtcaccgacctgcaagccactgagttgcctggacaaagagtgagagtcagctggagcccagtgccaggagcaacccagtaccgcattatcgtccgctcaactcagggcgtcgagcgtaccctggtgctccctggcagtcaaactgccttcgatctcgacgacgtccaggcgggtctttcgtacactgtgcgggtcagcgctcgggtgggacctcgcgagggctcggcttccgtcctgaccgtgcggcgggaacccgagactccgctggcagtgcctggattgcgcgtggtggtgagcgacgcaacccgcgtgcgcgtcgcatggggccctgtgccaggagcgtccggcttccggatctcatggtccactggatcgggcccggagtcgtcgcaaacgttgcctccggattccactgccaccgacattacgggactccagccgggcactacttaccaggtggcggtgtccgtgctgcgcggacgcgaagaagggcccgcggccgtcatcgtggcccggactgatcctcttggcccggttcggactgtgcacgtcactcaagcctcatcatcgtccgtcactattacttggactcgcgtcccaggggccaccggataccgcgtgagctggcactccgcgcacggcccggagaagtcccagctcgtgtcaggtgaagccactgtggccgagctggacggcctggagcccgacactgagtacacggtgcacgtgagagcccatgtggcgggagtcgacggaccgccggcgtcggtggtggtgaggaccgccccggagccggttggacgtgtctctcgcctccagatcctgaatgcaagctcggacgtgctcagaatcacctgggtgggagtgactggagctactgcttaccggctcgcctggggccgctcggagggtgggcctatgcggcaccaaatcctgccgggcaatactgactctgctgaaatcaggggccttgaaggaggggtgtcctactcggtgagggtcactgcactggttggcgaccgagaaggtactcccgtctccatcgtggtgaccacgccgccggaggccccacctgccctgggtactctccacgtggtccagagaggtgaacactcgctgcgactcagatgggagccggtgccgagagctcagggattccttctccactggcagccagagggcggccaggagcagagcagagtcttggggccagaactctccagctaccacctcgatggattggagccggcaactcagtatagagtgagactgtcggtcttgggaccggcaggcgaggggccctcggccgaggtcaccgcacgcactgaaagcccgcgcgtgccttcaattgaactccgagtggtggatactagcatcgactcagtgacgctggcttggacccctgtttcacgcgcgtcatcgtacatcttgtcgtggcgccccctgagagggcccgggcaggaagtgccgggatcacctcagaccctgcctggaatcagctcctcacaacgggtgactggacttgagccgggagtgagctatatcttttcgctgacccctgtgcttgacggagtccggggccccgaggcatcagtgacccaaactccggtgtgccctcgggggctggcggacgtggtgttcctcccccacgctacccaagacaacgcgcacagagccgaggcgactcggcgggtcctggaaagactcgtcctggccctggggccgctcgggccgcaagcggtgcaggtgggattgctttcctactcacacaggccctccccactttttcccctgaatggtagccacgacctgggtatcatcctccagcggattagagacatgccgtacatggatccgtccggcaataatctgggcactgcggtggtgaccgctcaccgttacatgctggcgccggacgcaccgggcagacgccagcatgtgcctggggtgatggtgttgctcgttgacgagcccctgagaggcgatatcttctcgccgatccgcgaagcccaggcatcgggtttgaatgtcgtgatgctgggcatggcaggagccgacccggagcagctgcggcgcctcgcgccgggaatggattcggtgcaaaccttcttcgcagtcgatgacggcccgtctctcgaccaggccgtgagcggactggccaccgctttgtgccaggcctcgttcactacgcagccccgccctgagccgtgtcctgtgtactgcccgaaagggcagaaaggagaaccaggtgaaatgggtctgcggggtcaggtcggaccacctggggatccaggcctcccgggtcgaacgggagcacctggaccgcaaggacctcctggatcagcgactgcgaagggtgaacggggatttccgggcgcagacggccggccggggtcgccgggtcgggctgggaaccctggaactccaggcgcccctggactgaaaggcagccccggactcccggggcctcggggagatcctggagaacgcggcccgcgaggtcctaaaggagaacccggtgcgcccggacaggtcatcggcggagaaggtcccgggttgcctggacggaagggcgatccgggccccagcggacctccgggaccccggggaccactgggagatccaggcccgcggggaccacctggacttccggggaccgccatgaagggggacaagggagacaggggtgagcgcggcccccctggaccgggggagggcggaattgcgccaggagaaccagggctcccgggtctgccgggctcgccgggaccccaggggccagtgggaccgcctggaaagaagggcgagaagggggattccgaagatggggcgcccggactgccgggccagccgggatccccgggcgagcagggccctcgcggaccgccgggagctattggacctaagggtgatcggggtttccctggcccgctgggagaggcgggagaaaagggggagcgtggaccccccggacctgcgggcagcaggggcctcccaggagtggcaggccggcccggcgcgaaaggcccagagggaccaccgggaccaaccggacgccagggagaaaaaggagaaccaggtcgccctggcgacccagccgttgtgggccccgctgttgcaggacctaagggagaaaagggtgacgtgggcccggccggacctcggggtgcgaccggagtccaaggggaacgcggtcctccgggactggtcctcccaggagatcctgggccaaagggcgaccctggagataggggacctatcggactgacggggagggccggcccgccaggagattcaggacccccgggagagaagggagatccaggtagaccgggacctccaggcccagtgggcccgagaggacgggacggagaggttggcgagaagggagatgagggaccccctggggaccccggactgcctggtaaggccggtgagagaggtctgcggggcgcacccggagtcagaggcccggtcggcgagaagggggatcagggtgatccgggcgaggatggaagaaacggctcccccggatcgtcagggcctaaaggagatcggggagaaccgggccctcccgggccgcctggacggctggtggacaccggaccgggagcgcgggaaaagggtgaaccaggggacagaggacaagaagggccacgggggccaaagggagatcccgggcttccgggggccccgggggagagaggaattgagggatttcgcggacctcctggtccgcaaggagatccaggagtgcgggggccggcgggggaaaagggcgataggggaccgcctgggctggatggacggtcgggcctggacggaaaacccggagcagccggaccttcggggccaaacggcgcggccggaaaggccggggacccaggacgcgacggactgccgggcctccgcggcgaacagggattgcctggaccttcgggcccacccgggctgccaggcaagccgggagaggatggtaagccggggctcaatggcaaaaacggagagcccggcgatccgggcgaggatgggcggaagggagagaaaggagattccggagcttccgggcgcgagggacgggacggaccgaagggcgaaagaggcgctccgggaatcctgggaccgcaaggacctccaggcctgcctggccctgtgggtccgccgggtcaaggattcccgggagtgccgggcggaaccggaccaaaaggcgaccggggcgagacgggaagcaagggtgaacaaggactgccgggtgagaggggattgcgcggagaaccgggatccgtgccaaacgtggaccggttgctggaaaccgcaggaatcaaggcatcagcgctgcgcgagatcgtggaaacctgggacgaaagctccggctcattcctgccagtgccagaacgcagacgcggaccgaagggagactcgggtgaacaaggccctccaggcaaggagggcccgatcggcttcccgggagaacgcggactgaagggagataggggggatccgggcccgcaggggccacccgggcttgcgttgggagagcggggaccgccggggccttccggactggccggagaaccgggcaagccgggcattcctggtctgcccggtagggccggaggagtcggggaggccggtagacccggtgagcggggagaaagaggcgagaagggggaacgcggtgagcaaggtagagacggacccccaggcctgccgggaacccctggaccgccggggccgccgggaccaaaggtttcagtcgatgaaccgggaccaggactgagcggggaacagggacctccgggcttgaagggggcgaaaggagaacccggatcgaatggtgaccagggccccaaaggggaccggggagtccctggaatcaagggcgaccggggagagccaggacctagaggccaggacggcaacccagggcttccaggtgagcgcggaatggccggaccagaaggtaaaccgggactccaagggccgaggggtccgccaggccctgtgggagggcacggggacccgggtccgcctggagcaccgggcctggcaggacctgcaggtccgcagggaccctcggggttgaagggagaaccaggagaaaccggccccccgggaagaggactgaccggtcccactggagccgtaggactcccgggtccgccgggaccgtcgggactggtcggaccgcaaggatcgccggggctgccaggacaggtgggagagactggtaagccgggagccccaggtcgcgatggcgcctcaggaaaggatggagatcgaggatcgccaggcgttccaggaagcccggggctgccgggaccagtcggtccaaagggagagccggggccaactggagccccgggacaagctgtggtcggcctgcctggagctaagggggagaagggggcccccgggggactggccggagatctggtcggagaacctggagcaaaaggagacaggggcctgccgggtcctaggggagaaaagggggaggcgggtcgcgccggggaaccgggagatccgggggaggacggacagaagggggccccgggcccaaagggattcaagggtgatccgggggtgggcgtcccaggatcccccggaccacctgggccccccggtgtgaaaggtgacctgggcctgcccgggctcccgggagccccaggagtggtggggttcccgggacagacggggcccagaggagaaatgggccagcctggtccgtcaggcgagaggggtcttgccggaccgccaggtagagaggggatcccagggccgctgggaccacctggaccgcctggttcggtgggacctcccggagccagcgggctgaaaggagataaaggggacccgggggtgggacttccaggcccgcgcggagaacgtggagaaccgggcatccgcggagaggacggacgcccgggacaggaggggccacgcggactgaccggacccccgggctcgaggggagagcgcggggagaaaggagacgtgggctcagccggcctcaagggagacaagggcgacagcgctgtcatcctgggacctcctggaccgaggggagctaaaggcgatatgggagaacggggtccaagaggtctggatggagataagggccctcggggtgataacggtgacccgggcgacaagggctccaagggtgagcctggggacaagggcagcgcgggcctccccgggctgcggggacttctgggaccacagggacagccgggcgccgccggaatcccaggggatccaggatcgccagggaaggacggggtcccgggtatccggggagaaaaaggcgatgtcgggttcatgggacctcggggcctcaaaggagagcgcggggtcaaaggagcctgcggactcgacggagaaaaaggcgacaagggcgaggcaggaccaccaggtcgccccggacttgcgggacataagggcgaaatgggagagccaggggtgccagggcagtccggtgcccctgggaaggaaggtctgatcgggccgaagggcgatcggggctttgatgggcagccgggtcccaagggcgaccaaggtgaaaagggagaacggggaacgcctggaatcggcgggttcccggggccgagcggtaacgacggtagcgccgggccgccaggaccaccaggatccgtgggaccacggggaccggaaggactgcaagggcaaaagggcgaacggggacccccgggcgaaagagtggtgggagccccaggcgtgccaggagcccctggagagagaggggagcaaggacgacccggacctgcaggcccgcgcggagagaaaggtgaggccgcgctgactgaagatgacatccgcggattcgtgcgccaggagatgtcacagcactgcgcctgccagggtcagttcatcgcaagcgggtcgcggcctctgccttcttacgccgctgacactgccggcagccaactgcatgccgtgcctgtgctgcgcgtctcccacgccgaagaggaagaacgggtgccaccggaagatgacgaatactccgaatattcggagtactcagtggaggagtaccaagacccagaagcaccgtgggactcagacgacccttgctcactcccgctggacgagggttcatgcactgcctacaccctgagatggtaccaccgggcagtcaccggaagcaccgaggcctgccacccatttgtgtacggcggctgcggcggcaatgctaaccgcttcggtactcgcgaagcctgcgagcgccgctgccccccgcgcgtcgtccagtcccagggaactgggaccgcgcaggat

SEQ ID NO: 9642 - DNA, 8832 bp, synthetic construct; identical to SEQ ID NO: 9573
  misc_feature 1..8832: note = source = /note="Description of Artificial Sequence: Synthetic coding sequence"
  source 1..8832: mol_type = other DNA

SEQ ID NO: 9643 - DNA, 432 bp, synthetic construct
  misc_feature 1..432: note = source = /note="Description of Artificial Sequence: Synthetic coding sequence"
  source 1..432: mol_type = other DNA
atgtggctccagtcccttctccttcttggtaccgtcgcctgcagcatcagcgctccggcgagatcccctagcccgtcaacccagccatgggagcacgtgaacgctatccaggaagcccgtcggctgctcaatctctcgcgtgatactgccgcggagatgaacgagactgtggaagtcatatcggaaatgtttgatctccaagaacccacttgtctgcaaacgagactggaactttacaagcagggactccgggggtcactcaccaagctgaaaggaccactgactatgatggcgtcacattacaagcaacattgcccacccaccccggaaaccagttgtgcaacgcagattatcacgttcgaatcgtttaaggaaaacctgaaggacttcttgcttgtgattccctttgactgctgggagcctgtgcaggag

SEQ ID NO: 9644 - DNA, 432 bp, synthetic construct
  misc_feature 1..432: note = source = /note="Description of Artificial Sequence: Synthetic coding sequence"
  source 1..432: mol_type = other DNA
atgtggctccagagtctactcttgctgggcactgttgcttgcagcatcagcgctcccgcaagaagtcctagcccctccacccagccatgggagcacgtcaatgctattcaggaagccagaaggctcctcaacctgagcagggacactgctgcggagatgaatgagacagttgaggtgatatctgagatgtttgaccttcaggaacccacctgcctccagactaggttggaactatacaagcaggggctgcgcgggagcctcactaagctcaaagggcctctgactatgatggcctcacattacaagcagcattgcccgcccacccccgagaccagctgcgcaactcagatcatcacatttgagagcttcaaagaaaaccttaaggattttcttttggtcatcccttttgactgctgggagcccgtgcaggag

SEQ ID NO: 9645 - DNA, 432 bp, synthetic construct
  misc_feature 1..432: note = source = /note="Description of Artificial Sequence: Synthetic coding sequence"
  source 1..432: mol_type = other DNA
atgtggctgcagtcgctgctgctcctcggaaccgtcgcttgtagcatcagcgccccagcccgctcaccgagcccgtccactcagccgtgggagcacgtgaacgctatccaggaggcgcgacgccttctgaacctgtcacgcgacaccgccgccgagatgaatgaaaccgtggaagtgatctcggaaatgttcgacctgcaggaacctacttgcctgcaaacccgccttgagctttacaagcagggcctcaggggttcactcaccaaactcaaggggcccctcaccatgatggcgtcgcactacaaacagcattgcccacccacgcctgaaacgtcttgcgcgacgcagatcatcaccttcgaatccttcaaggagaaccttaaggacttcttgcttgttatccctttcgactgctgggaaccagtgcaggaa

SEQ ID NO: 9646 - DNA, 432 bp, synthetic construct
  misc_feature 1..432: note = source = /note="Description of Artificial Sequence: Synthetic coding sequence"
  source 1..432: mol_type = other DNA
atgtggttgcaatctctcttgctgctggggaccgtagcttgtagcatctctgctcctgcccggtcaccctccccaagtacgcagccttgggagcacgtgaacgccattcaggaagctagacgactactgaatttgtccagggacacagcggccgaaatgaatgagactgttgaagtgatcagtgaaatgttcgatctgcaggaacccacatgcttgcaaacacgattagagctctacaagcaaggtctgagaggctcactcaccaaactgaagggcccgctgacaatgatggcctctcattacaagcagcattgcccaccaactccagaaactagctgcgccacccagattatcacgttcgagagctttaaagagaaccttaaagatttcctgttggttatcccattcgactgttgggagcccgtgcaagaa

SEQ ID NO: 9647 - DNA, 432 bp, synthetic construct
  misc_feature 1..432: note = source = /note="Description of Artificial Sequence: Synthetic coding sequence"
  source 1..432: mol_type = other DNA
atgtggttgcagagtttgctattgctcggtactgtagcttgctcaatatccgccccagcgcggagccccagcccatcaactcagccttgggaacatgtgaacgctatccaggaggccagacggttgctgaacctttcaagggatacagccgctgagatgaacgaaaccgtcgaagtcatctccgagatgttcgatctgcaagagccgacctgcttacagacgcggctggagctctacaagcagggacttagggggtctctgacaaagctgaaaggccccctcactatgatggcctcccattacaagcagcactgccctcctaccccagaaacgtcatgtgccacccagatcatcacgttcgagtcattcaaggaaaatctgaaggacttcctgctggtcattccatttgactgctgggaacccgtgcaggag

SEQ ID NO: 9648 - DNA, 432 bp, synthetic construct
  misc_feature 1..432: note = source = /note="Description of Artificial Sequence: Synthetic coding sequence"
  source 1..432: mol_type = other DNA
atgtggcttcaatcgcttctgctgctgggcacggtggcatgcagcatatcggcaccggcccgatctcccagtccatctactcaaccgtgggaacatgtgaacgcgatccaggaggcgcgccgcctgctcaatctctcaagagatactgcagcagagatgaacgaaactgtggaagttatatccgaaatgttcgacctgcaagagcctacttgtctccagacccggctggaactttacaagcaaggtcttagaggaagcctgaccaaactcaaggggccgcttaccatgatggcctcccactacaagcaacactgtccaccaacgcctgaaacgtcatgcgcaactcaaatcattaccttcgaatcatttaaggagaacctcaaggattttctgctggtgattccatttgactgttgggaacctgtccaagaa

SEQ ID NO: 9649 - DNA, 432 bp, synthetic construct
  misc_feature 1..432: note = source = /note="Description of Artificial Sequence: Synthetic coding sequence"
  source 1..432: mol_type = other DNA
atgtggctgcagtcattgttattgctcggcaccgtcgcctgctcaatcagcgctccagcgagatcccccagtccatctacacagccctgggaacacgttaatgccatacaggaggctaggagattgcttaatttgagcagagatactgcggcagagatgaacgagactgtcgaggtgatctctgagatgttcgatctgcaggagccgacctgcctgcaaacacgcctggagctgtataaacagggcctgcgtggttccctgaccaagctcaaaggacctctgacaatgatggcatcccattataagcagcactgtcctcccaccccagagacatcttgtgcaactcaaattattactttcgaaagctttaaggagaatctcaaagacttcctgctggtgatacccttcgactgttgggagccagtccaggaa

SEQ ID NO: 9650 - DNA, 432 bp, synthetic construct
  misc_feature 1..432: note = source = /note="Description of Artificial Sequence: Synthetic coding sequence"
  source 1..432: mol_type = other DNA
atgtggcttcaatcattactgttgcttggcacagtcgcatgctctatatccgcccccgcccgatcaccaagcccatcaactcaaccctgggaacatgtgaatgccatccaggaagcaagacgcctgctaaacctctctagagataccgccgccgaaatgaacgagacggtcgaagttatcagcgaaatgttcgatcttcaggaaccaacctgcctgcagacgagactcgaactgtacaagcagggattaagaggcagcctcacaaaattaaagggacctctgaccatgatggccagtcactacaaacagcactgccctccaactccggaaacaagttgcgccacacagatcattacatttgaaagcttcaaggagaaccttaaggacttcctactggtgatcccttttgactgctgggaacccgtgcaggag

SEQ ID NO: 9651 - DNA, 432 bp, synthetic construct
  misc_feature 1..432: note = source = /note="Description of Artificial Sequence: Synthetic coding sequence"
  source 1..432: mol_type = other DNA
atgtggctccaatcgctgctcctcttgggcaccgtggcatgttccatctcggctccggccagatcgccttcgccgtccacccaaccgtgggaacatgtcaacgcgatccaggaagcacgccggcttcttaacctgtcaagggacaccgcggcagaaatgaatgagactgtggaggtgatttccgagatgttcgatctgcaagagccgacttgccttcaaactcggttggaattgtacaagcagggactcagaggtagccttaccaagttgaaagggccgctgaccatgatggcgagccactacaagcagcattgcccgccgacccctgagacttcctgcgcaacccaaatcattacgtttgaatctttcaaagagaacttgaaggacttccttctcgtcattccgttcgactgctgggaacccgtgcaagag

SEQ ID NO: 9652 - DNA, 432 bp, synthetic construct
  misc_feature 1..432: note = source = /note="Description of Artificial Sequence: Synthetic coding sequence"
  source 1..432: mol_type = other DNA
atgtggctccagtccctattgctgcttgggacagtcgcctgttcaattagcgcgcccgcgagatcgccttccccgtcaacccaaccatgggaacacgtgaacgctatccaggaagctcgccggcttctgaacttgtctcgagatacagctgccgagatgaacgaaaccgtcgaggtcatatctgagatgttcgacctgcaagagccaacttgcctccaaactagactggagctttacaagcagggactacgcggcagcctgacgaaactgaaaggccctctaacaatgatggctagccattacaaacagcactgccctcctacccccgagacttcatgcgctacacagattatcacattcgagtcttttaaagagaaccttaaggattttttgttggtaatcccatttgactgttgggagcccgtccaggaa

SEQ ID NO: 9653 - DNA, 432 bp, synthetic construct
  misc_feature 1..432: note = source = /note="Description of Artificial Sequence: Synthetic coding sequence"
  source 1..432: mol_type = other DNA
atgtggcttcagagtttactgctgctcggtaccgtggcctgctcaataagtgctccggccagatcaccatccccttctactcagccctgggagcacgtaaacgcgattcaagaggctaggcggctcctgaatctgagccgagataccgctgccgagatgaacgagacagtcgaggtgatctcagaaatgtttgacctccaggaaccaacttgtctgcagacccgcttagagttatataagcagggattgcggggatccttgacaaagctgaagggccctttgacaatgatggccagtcattacaaacagcattgcccgcctaccccagaaacctcatgcgccactcaaataattacatttgaaagctttaaggaaaacctgaaggacttcttgctggttattcctttcgactgctgggagccagtacaggaa

SEQ ID NO: 9654 - DNA, 432 bp, synthetic construct
  misc_feature 1..432: note = source = /note="Description of Artificial Sequence: Synthetic coding sequence"
  source 1..432: mol_type = other DNA
atgtggctgcagagcctgctgcttctgggaaccgttgcctgctccattagtgcacccgccaggtcacctagcccgtccacacaaccatgggagcacgtgaatgcaatccaggaagccagaagactgcttaatctcagtagggacactgcagcagagatgaatgagaccgtggaggtaatttccgagatgttcgatctgcaggaaccgacctgtctgcaaactaggctggaactgtacaagcaggggctgcgcggcagtctaaccaaacttaaagggcctctaaccatgatggcaagccattacaaacagcactgcccacccacaccagaaacttcttgtgccacccagattatcacgttcgagtcctttaaagagaacttgaaggatttcttgctcgtgatccctttcgattgctgggaacctgtgcaggag

SEQ ID NO: 9655 - DNA, 432 bp, synthetic construct
  misc_feature 1..432: note = source = /note="Description of Artificial Sequence: Synthetic coding sequence"
  source 1..432: mol_type = other DNA
atgtggttgcagagcctgcttctcctggggacggtggcatgctcgatctcggccccagctcgcagcccatccccttcaacccaaccatgggagcacgtgaatgccatccaggaagcacgccggctgctgaacctgtcccgcgacaccgcggcggagatgaatgagactgtcgaagtgatcagcgaaatgttcgatctgcaggaaccgacctgtctccagactagactcgaactgtacaaacaaggactgagaggatcgttgactaaactgaagggtccgctgaccatgatggcttcccattacaaacagcactgcccgccgacgcccgaaacctcctgcgcgactcagattatcaccttcgagtcgttcaaggagaatctgaaggacttcctgctggtgatcccgttcgactgctgggagccggtgcaggaa

SEQ ID NO: 9656 - DNA, 432 bp, synthetic construct
  misc_feature 1..432: note = source = /note="Description of Artificial Sequence: Synthetic coding sequence"
  source 1..432: mol_type = other DNA
atgtggttgcagtccctactactgctcggcaccgtggcctgctccatctcagcccccgcgaggtccccaagtccatccacccaaccatgggagcatgtgaacgctatacaggaagcacggcggctcttgaatctttctagagacactgctgccgagatgaatgagacagtagaggtgatctcagagatgttcgacctccaggagcccacctgcctgcaaactaggctggagctgtacaagcaagggttgcgcgggtcgctcacgaagttgaagggacccctgaccatgatggcctcccactacaaacaacattgcccccctacccccgaaacttcatgtgccacacaaatcataacatttgagagttttaaagaaaacctgaaggattttctccttgtgataccctttgactgctgggagcccgtgcaggaa

SEQ ID NO: 9657 - DNA, 432 bp, synthetic construct
  misc_feature 1..432: note = source = /note="Description of Artificial Sequence: Synthetic coding sequence"
  source 1..432: mol_type = other DNA
atgtggcttcaatctctgttgctcctggggacagttgcatgctccatatctgccccagctagatccccgtctccatctacacagccttgggagcacgtgaacgccatccaggaggccagaagacttttgaacttgtcacgcgatacggccgcagagatgaatgagactgtagaggtcattagtgaaatgttcgatctgcaggaacccacttgcctgcagacacggctggagttgtacaagcaaggcctgcgcggcagcctgaccaaactcaaggggccattgactatgatggctagtcactacaaacagcactgtccgcctactcccgaaacatcatgtgccactcaaataattaccttcgaatccttcaaggagaatctcaaggattttctgcttgtcatcccattcgattgttgggagccagttcaggaa

SEQ ID NO: 9658 - DNA, 432 bp, synthetic construct
  misc_feature 1..432: note = source = /note="Description of Artificial Sequence: Synthetic coding sequence"
  source 1..432: mol_type = other DNA
atgtggctgcagtctcttctgctcctgggtactgtggcctgtagtataagcgcccccgcacgttcccccagcccgtctacccagccttgggaacacgtgaacgctatccaggaggcccggaggctcttaaacctttccagagatacggccgcggagatgaatgagacggtggaggtcatttcggagatgttcgatttgcaggagccaacctgcctgcagacccgcctggagctgtacaagcagggtcttcgtggtagcctaaccaagctcaaaggacccctgaccatgatggcctctcactacaagcagcattgccccccgactcccgagacgtcctgcgcgactcaaattatcactttcgagtcattcaaggagaacctcaaggacttcctgcttgtcatcccctttgattgctgggaacctgttcaggaa

SEQ ID NO: 9659 - DNA, 432 bp, synthetic construct
  misc_feature 1..432: note = source = /note="Description of Artificial Sequence: Synthetic coding sequence"
  source 1..432: mol_type = other DNA
atgtggttacaatcgttactattattaggtacggtagcgtgttcgatatcggcgccggcgcgatcgccgtcgccgtcgacgcaaccgtgggaacatgtaaatgcgatacaagaagcgcgtcgactattaaatctatcgcgtgatacggcggcggaaatgaatgaaacggttgaagtaatatcggaaatgtttgatttacaagaaccgacgtgtttacaaacgcgtctagaattatataaacaaggtctacgaggttcgctaacgaaattaaaaggtccgctaacgatgatggcgtcgcattataaacaacattgtccgccgacgccggaaacgtcgtgtgcgacgcaaataataacgtttgaatcgtttaaagaaaatttaaaagattttttattagttataccgtttgattgttgggaaccggtacaagaa

SEQ ID NO: 9660 - DNA, 432 bp, synthetic construct
  misc_feature 1..432: note = source = /note="Description of Artificial Sequence: Synthetic coding sequence"
  source 1..432: mol_type = other DNA
atgtggctacaatccctgcttttgctgggtaccgtcgcatgttccatcagtgcacctgctcgttccccttccccttctactcagccatgggaacacgtcaacgcaattcaagaggcgcgacgcctccttaatcttagccgagacacggctgcggagatgaacgagacagtggaagtcatatcagagatgttcgatctacaagagccaacatgtctacagacgcgcctggagttgtataagcagggcctacgtggttcgctgactaaactaaagggccccctcacaatgatggcatctcattataaacagcactgcccgcctacgcccgagacatcctgcgcgacacaaattatcacgttcgagtcatttaaagaaaatcttaaagacttccttctcgtcatcccctttgattgctgggagcctgtccaggag

SEQ ID NO: 9661 - DNA, 432 bp, synthetic construct
  misc_feature 1..432: note = source = /note="Description of Artificial Sequence: Synthetic coding sequence"
  source 1..432: mol_type = other DNA
atgtggcttcagtcgcttctgcttttgggaactgtcgcatgtagcatatccgcaccagcgagatccccatcgccttcgactcagccttgggaacacgtgaatgccatccaagaagctcggcgcttgcttaatctgtcgagagatactgccgcagaaatgaacgaaactgtcgaagtgatctccgagatgtttgacctccaggaaccaacttgtttgcaaaccaggctggaactgtacaagcagggcctgagaggcagcctcactaaacttaaaggtccgttgaccatgatggcttcgcattacaagcaacattgtccaccaactcctgaaacctcgtgtgcaacccagattatcaccttcgagtccttcaaagagaatctgaaggattttctcctggtgatcccttttgattgttgggaaccggtgcaggaa

SEQ ID NO: 9662 - DNA, 432 bp, synthetic construct
  misc_feature 1..432: note = source = /note="Description of Artificial Sequence: Synthetic coding sequence"
  source 1..432: mol_type = other DNA
atgtggcttcaaagtttgcttcttcttggtactgtggcatgtagtatttcagctcctgcaagaagtccttcaccatcaactcaaccatgggaacacgttaatgctatacaagaagctagaagattattaaatctctctagagacactgcagcagaaatgaacgagactgtagaagtcattagtgaaatgtttgacttacaagaaccaacttgtttacaaactagacttgaactttataaacaaggattgagaggatcattaactaaattaaaaggtcctttaactatgatggcttcacattataagcaacattgtccaccaacacctgagacttcatgtgcaacacaaatcattactttcgaatcatttaaagaaaatttaaaagattttcttcttgtaataccatttgattgttgggaaccagttcaagaa

SEQ ID NO: 9663 - DNA, 432 bp, synthetic construct
  misc_feature 1..432: note = source = /note="Description of Artificial Sequence: Synthetic coding sequence"
  source 1..432: mol_type = other DNA
atgtggcttcaatctctgcttttactaggaacagtggcgtgttcaatatcagcacctgctcgctcaccttcaccgtcaacacaaccgtgggagcatgtgaatgcaatccaggaagcccggcgcctgttaaacttgagccgtgatacagctgctgaaatgaatgagacggtggaagttatctccgagatgtttgatcttcaggagccaacgtgtttgcagacacgccttgaactatataagcaaggacttcggggcagccttaccaagttgaaaggccccctgacgatgatggcgtcacattataaacagcactgtcctcctacaccggaaacgtcttgtgctacacaaattataacatttgagagttttaaagagaatttaaaagattttctgcttgtgattccttttgattgctgggaacctgtccaagaa

SEQ ID NO: 9664 - DNA, 432 bp, synthetic construct
  misc_feature 1..432: note = source = /note="Description of Artificial Sequence: Synthetic coding sequence"
  source 1..432: mol_type = other DNA
atgtggcttcagtccttgctcttgcttgggaccgttgcttgctcgatctcggcacctgctcgaagccctagcccaagcacccagccctgggaacacgtcaatgccatccaggaagctcggagactgctgaatctcagtcgcgatactgcagctgagatgaatgaaaccgtcgaagtgatatccgagatgttcgacctgcaagagcctacatgcctccagacgcggctggagctgtacaagcaaggtctaaggggaagtttgactaaactgaaggggcctctgaccatgatggctagccattataaacagcattgcccacctaccccggagacatcctgcgccactcagataatcacattcgaaagttttaaagaaaatctgaaggattttttgctcgtgattcctttcgactgctgggaacccgtccaagaa

SEQ ID NO: 9665 - DNA, 432 bp, synthetic construct
  misc_feature 1..432: note = source = /note="Description of Artificial Sequence: Synthetic coding sequence"
  source 1..432: mol_type = other DNA
atgtggttgcagagtctgttgctcttgggtacagtggcatgctccatctcagcccctgcaaggtctccctcaccttctacacagccatgggagcatgtaaacgcaatccaggaggcaagacggctgctgaacctttcccgggataccgccgcagaaatgaatgaaacagttgaagtcatttctgaaatgtttgatttacaggaacccacttgcctgcagacaaggctggagctctacaagcaggggttgagagggtcccttaccaagttgaaggggcccctgactatgatggcaagccactacaaacagcattgtccccccacccctgagacctcttgcgccactcagatcattaccttcgaatcatttaaagagaacttgaaggacttcttacttgtgattcccttcgactgctgggaacctgtgcaagag

SEQ ID NO: 9666 - DNA, 432 bp, synthetic construct
  misc_feature 1..432: note = source = /note="Description of Artificial Sequence: Synthetic coding sequence"
  source 1..432: mol_type = other DNA
atgtggctccaatccctgcttctattgggtaccgtcgcctgcagtatcagcgcacccgcaagatcgccgtccccctccacccagccatgggagcacgtgaacgcaattcaggaggcccggcgcctgctgaacttgtctagggacactgccgccgagatgaatgagactgtggaggtcatctcagagatgtttgacctgcaggaacctacgtgccttcaaaccagacttgaactttataagcagggactaaggggttccctaaccaaactcaaagggcccctgaccatgatggccagccactataaacaacattgccctccaacaccagagacgtcatgcgctacgcagattattactttcgagtccttcaaggagaatcttaaggatttcctcctcgttataccattcgattgctgggaacctgtgcaggaa

SEQ ID NO: 9667 - DNA, 432 bp, synthetic construct
  misc_feature 1..432: note = source = /note="Description of Artificial Sequence: Synthetic coding sequence"
  source 1..432: mol_type = other DNA
atgtggctgcagtcgctcctgctgctgggcactgtggcctgcagcatctctgcgccggctcggagcccatccccgtccactcagccttgggaacatgtgaacgctatccaggaggcccgccggctgcttaatctttcgagagacaccgcggctgagatgaacgagactgtcgaagtgatctccgagatgttcgacctccaagagccgacttgtttgcaaacccgcctggaattgtacaagcagggactgcgcggatcgctgactaaacttaaggggccgctgacgatgatggcctcccactacaagcagcactgtccgcccactccggaaacgtcatgcgctactcagatcattaccttcgagtccttcaaggagaatctcaaggattttctgctcgtgatcccttttgactgctgggagccggtgcaggag

SEQ ID NO: 9668 - DNA, 432 bp, synthetic construct
  misc_feature 1..432: note = source = /note="Description of Artificial Sequence: Synthetic coding sequence"
  source 1..432: mol_type = other DNA
atgtggctccagtcccttttgctcctcggaactgtcgcatgtagcataagcgcacctgcccgctccccttccccaagtacccagccatgggagcatgtgaatgcgattcaggaggccagacgcctgctgaatttgtcaagagacaccgctgcagaaatgaacgaaactgtggaggtgatctcggaaatgttcgacctgcaagaacccacgtgccttcaaactagattggagctgtacaagcaaggccttcgggggagccttacgaaactcaaaggtcccctgactatgatggcatcccactacaagcaacattgccctcctacgccggaaacctcatgcgcaactcagataatcacgtttgaatcatttaaggaaaatcttaaggattttctcttggtgattccgttcgactgttgggaaccggtccaggaa

SEQ ID NO: 9669 - DNA, 432 bp, synthetic construct
  misc_feature 1..432: note = source = /note="Description of Artificial Sequence: Synthetic coding sequence"
  source 1..432: mol_type = other DNA
atgtggcttcagagcctcttgctgctcggaactgtggcttgttccatttcagccccagcgcgctcgccatcgccgtctactcagccttgggagcacgtcaacgccatccaggaagcccggcgcctcctgaacctctcgagagacactgcagcagaaatgaatgagactgtggaagtgatctcagaaatgttcgacctccaggagccgacttgcctgcagacccgcctcgaactgtacaagcaaggtctgcgaggctcgctgactaagctgaagggaccactgactatgatggcatcgcattacaaacaacactgtccaccgactccagaaacgtcgtgcgctacccagatcatcacctttgaatctttcaaggagaatcttaaggatttcctgctcgtgatcccattcgactgttgggaacctgtgcaagaa

SEQ ID NO: 9670 - DNA, 432 bp, synthetic construct
  misc_feature 1..432: note = source = /note="Description of Artificial Sequence: Synthetic coding sequence"
  source 1..432: mol_type = other DNA
atgtggctgcaatcgttgctgctgctcggtaccgtggcttgttccatctccgccccagcccgctccccatccccgtcgactcaaccgtgggagcacgtgaacgcgatccaggaagcccgcaggctgctgaatctgtcgcgggacacggcagctgaaatgaacgaaaccgttgaggtgatcagcgaaatgttcgacctgcaagaaccgacctgtctgcagaccagactcgagctgtacaagcagggcctgcgcggatccctgaccaagctcaagggcccgttgaccatgatggcctcgcattacaagcaacactgccctccgaccccagagacttcctgcgcgactcaaatcatcaccttcgagtccttcaaagaaaacctgaaggatttcctgcttgtgatcccgtttgactgctgggaaccggtccaggag

SEQ ID NO: 9671 - DNA, 432 bp, synthetic construct
  misc_feature 1..432: note = source = /note="Description of Artificial Sequence: Synthetic coding sequence"
  source 1..432: mol_type = other DNA
atgtggttgcaatctttattattactcggtacagttgcatgttctattagtgctccagctagatctccatcaccatcaactcaaccatgggaacacgttaatgctatacaagaagcaagacgacttttaaatttatcaagagatactgcagctgaaatgaatgaaactgtagaagttatatctgaaatgttcgatttacaagagccaacatgtttacaaacacgtttagaactttataaacaaggacttagaggatcacttacaaaattaaaaggtccattaacaatgatggctagtcattataagcaacattgtccaccaacaccagaaacaagttgtgctactcaaataattacattcgaatcattcaaagaaaacttaaaagatttcttgttggtaattccatttgattgttgggaacctgtacaagaa

SEQ ID NO: 9672 - DNA, 432 bp, synthetic construct
  misc_feature 1..432: note = source = /note="Description of Artificial Sequence: Synthetic coding sequence"
  source 1..432: mol_type = other DNA
atgtggttacagtccctgctccttttaggaactgtggcctgtagcatcagcgccccagccaggagtccatctccttcaacacagccctgggagcatgtgaacgcgatccaggaggctcgtcggctgctcaacttgagcagagatactgccgccgaaatgaacgaaacggtagaagttatttccgaaatgttcgacctacaggagccgacatgcctccagacccgccttgagctgtataaacagggtctgcgcggtagcctgaccaaactgaaggggcctctaaccatgatggctagccactacaaacaacactgccctcccacacccgagacaagctgcgcgacccagatcatcacattcgagtcgtttaaagagaatctgaaagattttctcttggtaattccgttcgactgctgggaacccgtacaagag

SEQ ID NO: 9673 - DNA, 432 bp, synthetic construct
  misc_feature 1..432: note = source = /note="Description of Artificial Sequence: Synthetic coding sequence"
  source 1..432: mol_type = other DNA
atgtggctgcagtccctgctcctgttaggaacagtggcctgctctatatcagcgccagctagaagcccaagtccgtcgacccagccctgggaacacgtaaacgcgatccaagaagcgcggcgcctcctcaatcttagcagggatacagctgccgagatgaatgagacagtggaggtgatcagcgagatgttcgacctacaggagcccacatgcttgcagactagactggaattgtacaaacagggcctccggggcagcctgacaaaattaaaaggccctctgactatgatggcctctcactacaagcagcactgtcctcccacaccagagactagttgcgcgacccagataattacattcgagtccttcaaagagaatctgaaagatttccttttagtaattcccttcgattgttgggaacccgtccaagag

SEQ ID NO: 9674 - DNA, 432 bp, synthetic construct
  misc_feature 1..432: note = source = /note="Description of Artificial Sequence: Synthetic coding sequence"
  source 1..432: mol_type = other DNA
atgtggctccagagcctacttctgttgggtaccgtagcttgtagtatttccgcacccgccagaagccccagcccctccacccagccgtgggaacatgtgaacgccattcaggaggctcgtaggctgcttaacttatcgcgagataccgccgctgagatgaatgagacagtggaggttatctcagagatgtttgacctccaggaacccacttgcttacaaacgaggctcgagctgtacaaacagggactgcgggggtccctgaccaagttgaaaggccctcttaccatgatggcttcccactataaacagcattgccctccaactcctgaaacctcctgcgcgactcaaataatcaccttcgagtccttcaaagaaaacctgaaggattttctgctggtgataccatttgattgttgggagcctgtgcaggag

SEQ ID NO: 9675 - DNA, 432 bp, synthetic construct
  misc_feature 1..432: note = source = /note="Description of Artificial Sequence: Synthetic coding sequence"
  source 1..432: mol_type = other DNA
atgtggctgcagagtctgctactgttgggcactgtggcgtgctcgatttctgccccagctagatccccaagcccgagcacacagccctgggagcacgtcaatgctatacaagaagccagaagattgctgaatctctctagggatacagccgccgagatgaatgagacagtggaggtaatttcagagatgttcgatctgcaggagccaacttgcctgcagacacgcctggaattatacaaacaggggcttcgcgggtctctgacgaagttgaaagggcctctgacgatgatggcttcccactataagcagcattgccctccaacaccagaaacaagctgcgccacccagatcatcacattcgagagcttcaaggagaatctgaaggacttcctcttggtcatcccatttgattgctgggaaccagttcaggag

SEQ ID NO: 9676 - DNA, 432 bp, synthetic construct
  misc_feature 1..432: note = source = /note="Description of Artificial Sequence: Synthetic coding sequence"
  source 1..432: mol_type = other DNA
atgtggctgcagagcctgttactgttaggcacggtcgcgtgtagcattagcgcgccggctcgcagcccatccccgagcacccaaccgtgggagcacgtgaatgccattcaggaagcaaggcgcttactgaacctttcccgtgataccgcagcggagatgaacgagaccgttgaggtaatttccgagatgtttgatctgcaggaacctacttgtctgcagacgcgtctggagctgtataagcagggtttgcgcggatcgttgactaaactgaagggacctctgaccatgatggcgagccactacaaacaacactgcccgcctactccagagacttcctgtgccactcaaattatcacgttcgagagcttcaaagagaacctgaaggatttcctgttggtcattccttttgattgttgggagcctgtccaagaa

SEQ ID NO: 9677 - DNA, 432 bp, synthetic construct
  misc_feature 1..432: note = source = /note="Description of Artificial Sequence: Synthetic coding sequence"
  source 1..432: mol_type = other DNA
atgtggctgcagtcgctgctcctgttggggactgtggcttgctccatttcagccccagcaagatccccatcgccgtcaactcagccgtgggaacatgtgaacgcgatccaagaggcgagaaggctgctcaacctgtctcgagataccgcggccgagatgaacgaaactgtcgaggtgatttccgaaatgttcgacttgcaagagcctacctgtttgcagacgcgcctcgaactgtacaagcagggccttcggggatcgctcaccaagctgaaaggacctctcaccatgatggcctctcactacaagcagcactgcccgccgactccagagactagctgcgcgacccagatcatcactttcgagtcgtttaaggaaaatctcaaagatttcttgctcgtgatcccattcgattgctgggaaccggtccaagag

SEQ ID NO: 9678 - DNA, 432 bp, synthetic construct
  misc_feature 1..432: note = source = /note="Description of Artificial Sequence: Synthetic coding sequence"
  source 1..432: mol_type = other DNA
atgtggctccagtctctacttttgttgggtaccgtcgcttgctccatctctgcccccgcccggtcgccatcgcctagtacccagccctgggagcacgtgaacgctatccaagaggctcggcgcctcctgaacctgtccagggacactgctgccgagatgaacgagaccgtcgaagtcatttcagagatgttcgacttgcaggagcccacatgccttcagacgcgcttagagctttataagcaggggctgaggggctcacttactaagttgaagggaccgctcactatgatggcttctcactacaagcaacattgtcccccgaccccggagacatcgtgcgcaacacagatcatcaccttcgagtcgtttaaggaaaaccttaaggatttcttgctggtcatcccttttgattgttgggagcccgtgcaagag

SEQ ID NO: 9679 - DNA, 432 bp, synthetic construct
  misc_feature 1..432: note = source = /note="Description of Artificial Sequence: Synthetic coding sequence"
  source 1..432: mol_type = other DNA
atgtggctccaaagcctgcttctcctgggaaccgtggcttgcagcatttccgcgccggctagatccccatcgccgtcaacgcaaccttgggagcacgtgaacgccatccaggaggcgcggcggctgctcaatttgtctcgcgatactgcagccgaaatgaacgaaactgtggaagtgatctccgaaatgtttgacttgcaggaaccgacctgcctgcagaccaggctggaactgtacaagcagggactccgcggctcgctgaccaaacttaaggggccactgaccatgatggccagccattacaagcagcactgccctcccactccggagacttcatgcgcaactcaaatcatcaccttcgaatcgttcaaggagaacctcaaagacttcctgctggtcatcccgttcgattgttgggagccagtccaggag

SEQ ID NO: 9680 - DNA, 432 bp, synthetic construct
  misc_feature 1..432: note = source = /note="Description of Artificial Sequence: Synthetic coding sequence"
  source 1..432: mol_type = other DNA
atgtggctccagtccctgttgcttcttgggactgtggcatgcagtatatctgccccagctagatccccatccccttccacacagccctgggaacatgttaacgcaatacaggaagctcggcgattgcttaacctttctcgggatactgcagccgaaatgaatgaaactgtggaggtaataagtgagatgttcgatctgcaggaacccacttgcctccagacacggcttgaattatataaacaggggctgagaggaagtctaacaaaactgaagggacctctcacaatgatggccagtcactataaacagcattgtccgcctactcccgaaacatcttgtgccacacagataataacttttgaatcctttaaagaaaacctaaaagattttctcctcgtgatcccttttgattgctgggaacccgtacaggag

SEQ ID NO: 9681 - DNA, 432 bp, synthetic construct
  misc_feature 1..432: note = source = /note="Description of Artificial Sequence: Synthetic coding sequence"
  source 1..432: mol_type = other DNA
atgtggcttcagagcctgctgctcctgggtacagttgcgtgtagcatatcagcccccgcacggtcgccctcaccaagtacacagccctgggaacacgtaaacgcaattcaggaggcccgtagattgctaaacctctctcgggacacagctgcagaaatgaacgagaccgttgaggtgataagtgaaatgttcgaccttcaagagccgacgtgcctgcagacccgcctggaactgtacaagcagggactgcgcggatctcttacgaagctaaaggggcctctgactatgatggccagtcattataagcagcactgtccccccacacccgaaacgtcttgcgccacccagatcatcacgtttgagtcgttcaaggaaaatctgaaggacttcttactcgtcatcccatttgactgttgggagcctgtgcaggag

SEQ ID NO: 9682 - DNA, 432 bp, synthetic construct
  misc_feature 1..432: note = source = /note="Description of Artificial Sequence: Synthetic coding sequence"
  source 1..432: mol_type = other DNA
atgtggctgcagtctttactgttactgggtactgtggcttgctccatctctgcacccgctcggtctccatcccccagcacccaaccttgggaacacgtgaatgctatccaggaggccagaagactgttgaatctatccagggacacggcagctgagatgaatgagacggttgaggtgatttctgagatgtttgatctgcaagagcctacatgcttacagaccagactggaactgtataagcagggacttcggggcagcctgacaaaactgaagggtccacttacgatgatggccagccattataagcagcactgcccccccacgcctgaaacctcctgcgcgacccagatcatcactttcgaatcgttcaaagagaaccttaaggactttctcttggtgatacctttcgattgctgggagcccgtgcaggag

SEQ ID NO: 9683 - DNA, 432 bp, synthetic construct
  misc_feature 1..432: note = source = /note="Description of Artificial Sequence: Synthetic coding sequence"
  source 1..432: mol_type = other DNA
atgtggctccagtcactcctcttgttgggaaccgtggcgtgctcgatatccgctccggcccggagcccttcgccatcgactcaaccgtgggaacacgtcaacgcaatccaggaggcgaggcggctgctgaatctttcccgggacaccgcggcagagatgaatgaaactgtcgaggtgatttccgaaatgttcgatctgcaggagcccacgtgcctccagacccgcctggagctctacaagcaagggctcagggggtcactgactaagctgaagggtccgcttaccatgatggcttcccattacaagcagcactgcccaccgacgccagagacgtcttgtgccactcagatcatcactttcgagtcgttcaaggaaaatctgaaagactttctcctggtgattccctttgattgctgggagcctgtgcaagag

SEQ ID NO: 9684 - DNA, 432 bp, synthetic construct
  misc_feature 1..432: note = source = /note="Description of Artificial Sequence: Synthetic coding sequence"
  source 1..432: mol_type = other DNA
atgtggttgcagtcactgctcctgcttggaacggtggcgtgctctatatcagccccggcacgatcgccatctccgtcaacacagccgtgggagcacgtgaatgctatacaggaagcacgtcggctgctaaatctctcacgggacaccgccgccgagatgaacgaaacagtcgaggtgatttctgaaatgttcgatctgcaagagccaacatgtctccagacaagactagagctgtacaaacagggcctacgcggatccctcacgaaactgaaaggccctctcaccatgatggctagtcactacaaacagcattgccccccgacccccgaaacgtcatgcgcaactcaaatcatcactttcgaaagttttaaagaaaacttgaaggatttcctgcttgtgatcccatttgattgctgggaacctgtgcaagag

SEQ ID NO: 9685 - DNA, 432 bp, synthetic construct
  misc_feature 1..432: note = source = /note="Description of Artificial Sequence: Synthetic coding sequence"
  source 1..432: mol_type = other DNA
atgtggctgcaatcactgcttttgctgggcactgttgcttgtagcatatcggctccagcacggagcccatccccttccacgcagccatgggagcatgtgaatgctattcaggaagcacggcgactcctgaacttgagcagagatacagctgctgaaatgaacgaaacagtcgaagtgatctccgaaatgtttgatctacaagagcctacatgccttcaaacaaggctggaattgtacaaacaaggtctgagaggttcactaacaaaattgaagggaccacttaccatgatggcttcacattataaacaacattgtccaccaactccagagacttcgtgtgcgacacaaattataacgtttgaaagtttcaaagaaaaccttaaggactttttgttagtgatcccatttgattgttgggagccagtacaagag

SEQ ID NO: 9686 - DNA, 432 bp, synthetic construct
  misc_feature 1..432: note = source = /note="Description of Artificial Sequence: Synthetic coding sequence"
  source 1..432: mol_type = other DNA
atgtggctccagtcactgctactgttaggcacagtcgcatgttcaatcagcgccccagcaagatccccctctccaagtacacagccttgggagcatgtgaacgccattcaggaggctagacggctgctaaacctatctagggataccgctgccgagatgaacgagacagtggaggtcatctccgaaatgttcgatctccaggaaccaacatgtctgcaaacccgtctggagctttataaacagggactgaggggatcactgacaaagctcaagggacctctgacaatgatggccagccactataaacagcattgccctcccactccggaaactagctgcgcaacccagatcatcacgtttgaaagtttcaaggaaaacctgaaagacttcctcctggtgattccatttgactgttgggaacctgtccaggaa

SEQ ID NO: 9687 - DNA, 432 bp, synthetic construct
  misc_feature 1..432: note = source = /note="Description of Artificial Sequence: Synthetic coding sequence"
  source 1..432: mol_type = other DNA
atgtggcttcaaagtctgctgttgctgggcacagtagcttgttcaattagcgcccctgcacgtagccctagccccagtacccagccttgggaacatgtaaacgccatccaggaggccagaaggctgctgaacctgtccagggacactgccgccgagatgaatgagactgtggaggtaatctccgaaatgttcgacttgcaggagccaacttgtctccaaactagattggagctgtataaacagggcctgaggggatccctcaccaaattgaaaggcccactgacaatgatggcctcccactacaagcagcactgccctcccactccagagacatcctgcgctacccagatcatcacttttgagagcttcaaggagaatctgaaagatttcttgctcgtgattccctttgattgctgggagccagtccaggag

SEQ ID NO: 9688 - DNA, 432 bp, synthetic construct
  misc_feature 1..432: note = source = /note="Description of Artificial Sequence: Synthetic coding sequence"
  source 1..432: mol_type = other DNA
atgtggctgcagagcctgctccttctcggaactgtagcttgttctatctccgcgcccgctcgcagtccctctccgagtacccagccctgggaacacgtgaatgccatccaggaggcacggaggctgctcaatctgagtcgggataccgccgccgagatgaatgagaccgtggaggtgatatccgaaatgtttgacctgcaggagccaacttgtctacagactcggctggaactgtacaaacaggggctccgagggagtctgacaaagctcaaaggccctctgacaatgatggcgagccactataagcagcactgtccacctacccccgaaacatcttgcgccacacaaattattacattcgaaagcttcaaggaaaatctcaaggactttctgctggttataccctttgattgttgggaacccgtgcaggaa

SEQ ID NO: 9689 - DNA, 432 bp, synthetic construct
  misc_feature 1..432: note = source = /note="Description of Artificial Sequence: Synthetic coding sequence"
  source 1..432: mol_type = other DNA
atgtggttgcagagcctgctgctcctgggcacagtggcgtgttccatcagtgcccctgctaggagtccgagcccaagcacacaaccctgggaacacgtgaatgctatccaggaagccagacgcctattaaatctgagtagggacacggcagccgagatgaacgagacagtggaagtgatctccgaaatgttcgacctacaagagcctacttgtctccagactagactggaactgtacaagcagggcctgagaggctccctgacaaaactaaagggaccactaaccatgatggccagccactacaagcagcactgcccgcccacgccagaaacatcatgcgccacccagattatcacgttcgagagctttaaagagaacttaaaggatttcctcttggtgattccattcgactgttgggagcctgtgcaggaa

SEQ ID NO: 9690 - DNA, 432 bp, synthetic construct
  misc_feature 1..432: note = source = /note="Description of Artificial Sequence: Synthetic coding sequence"
  source 1..432: mol_type = other DNA
atgtggcttcaaagcctcctgctcctgggcaccgtcgcatgttcgatctctgcaccagcacgcagccctagcccatcgactcagccatgggaacacgtgaacgccatacaggaagcgaggcgtctcctcaacctctcacgagataccgctgcagaaatgaatgaaactgtggaggtgatctcggaaatgtttgacctgcaagagcctacttgccttcagacccgtcttgagttgtataagcaaggacttcgcggtagcctgactaagctgaaggggccacttactatgatggcctcccattacaagcaacattgtccccctaccccggaaacctcgtgcgcgacccagataatcacctttgaatcctttaaggagaacctgaaggatttcctgcttgtgataccttttgattgttgggagcctgtgcaggag

SEQ ID NO: 9691 - DNA, 432 bp, synthetic construct
  misc_feature 1..432: note = source = /note="Description of Artificial Sequence: Synthetic coding sequence"
  source 1..432: mol_type = other DNA
atgtggctgcagtcactgctgttgctgggtacagttgcttgttccatcagcgccccagcaagaagtccatctccttctacccaaccttgggagcacgtgaacgcaatacaggaggccaggaggcttcttaatctctcgcgtgatactgctgccgagatgaatgagaccgtggaggtgatttccgagatgtttgacttacaggaacccacttgtctgcagactcgtcttgagctctacaagcagggcctcagaggaagtctcaccaagctaaagggtcctctgacgatgatggcaagccactataagcaacactgtccacctaccccagagacaagttgtgccacccagatcataacatttgagtcattcaaggagaatctcaaggattttctcctggtcatcccgtttgactgttgggaaccagtgcaagag

SEQ ID NO: 9692 - DNA, 432 bp, synthetic construct
  misc_feature 1..432: note = source = /note="Description of Artificial Sequence: Synthetic coding sequence"
  source 1..432: mol_type = other DNA
atgtggctgcagtcactgctgctgcttggcacagtcgcttgttcaatttccgcgcccgcgcggagtccctctccaagcacccaaccctgggaacacgtcaacgccatccaggaggctcggaggctcctcaatcttagtagggacactgccgcagaaatgaacgaaactgtcgaggttatatccgagatgttcgacttgcaggagccaacatgcctccagacacgcctggagctctacaaacagggcctgagagggagcctcactaagctgaaggggcccctgactatgatggctagccactataagcagcactgcccaccgactccagagacatcctgtgccactcaaatcatcaccttcgaaagtttcaaggagaacctgaaggattttcttctggtgataccattcgactgttgggaaccagtgcaagag

SEQ ID NO: 9693 - DNA, 432 bp, synthetic construct
  misc_feature 1..432: note = source = /note="Description of Artificial Sequence: Synthetic coding sequence"
  source 1..432: mol_type = other DNA
atgtggttgcaatctctgctcctgctgggaaccgtcgcctgctctatcagcgcgcccgcaagaagtccgtccccgagcacccagccatgggagcacgtgaatgccatccaagaggcgcggcggttattgaatctgagtcgggatactgccgccgagatgaacgaaactgtggaggtaattagcgagatgtttgatttacaggagcctacctgccttcaaacacggctggaactgtataagcagggccttaggggtagtctgaccaaattgaaaggccctctcacgatgatggcttcccattacaaacaacactgtccaccaacccccgagacctcatgtgctacacagatcatcacatttgagagctttaaggaaaatcttaaggacttcctgctagttattcccttcgactgttgggaacccgttcaggag

SEQ ID NO: 9694 - DNA, 432 bp, synthetic construct
  misc_feature 1..432: note = source = /note="Description of Artificial Sequence: Synthetic coding sequence"
  source 1..432: mol_type = other DNA
atgtggttgcagtccctattgctgctcggtaccgtggcctgtagcatatctgccccagccaggtctccatctccgtcaacccaaccctgggagcatgtaaatgccattcaggaagcccgtcggttacttaatctgtcccgcgacactgccgcggagatgaatgaaaccgtggaggtgataagcgaaatgttcgacctgcaggagcccacctgtctacagaccagactggaattgtacaaacagggtttgcgaggttcactgacgaagctgaaagggccattgacaatgatggcatcccactacaagcagcactgcccgccaacgccggagactagctgcgccacacaaatcatcacattcgagtctttcaaggagaatttaaaagatttcttgctggtcatcccgtttgactgctgggagccagtccaggag

SEQ ID NO: 9695 - DNA, 432 bp, synthetic construct
  misc_feature 1..432: note = source = /note="Description of Artificial Sequence: Synthetic coding sequence"
  source 1..432: mol_type = other DNA
atgtggctgcaatcccttctgcttcttggaaccgtggcatgcagcatcagcgcacctgcacgctcacctagccctagcactcagccgtgggagcatgtgaacgccattcaggaggcgcggcggctgctcaacttgtcgagagataccgcagccgaaatgaatgaaaccgtggaagtcatctccgaaatgttcgatctccaagagccaacgtgtctgcaaacgaggttggaactgtacaagcaaggccttcgcgggagcctcaccaaacttaaaggtcctctgactatgatggcgtcgcactacaagcaacactgccccccaacgcccgaaacctcatgtgcgacccagatcatcaccttcgaatccttcaaggaaaacctgaaggatttccttcttgtcatcccttttgattgctgggagcctgtccaggaa

SEQ ID NO: 9696 - DNA, 432 bp, synthetic construct
  misc_feature 1..432: note = source = /note="Description of Artificial Sequence: Synthetic coding sequence"
  source 1..432: mol_type = other DNA
atgtggctacagagcttactgctgctgggcacagttgcatgcagcattagcgccccggcccggtcaccaagtcctagcactcagccatgggagcatgtgaatgctatccaggaggcacgaaggcttctgaatttgtctcgagacacagctgccgaaatgaatgagactgtggaagtgatcagcgaaatgtttgacctgcaagaacccacttgcctgcagactcggcttgagctatacaaacagggcctgcggggctctctaacgaagctgaaggggcctctaacaatgatggccagccattacaagcagcactgtccccccacacctgaaaccagttgcgcaacccagatcatcacatttgaaagtttcaaagagaatctaaaggacttcctcctggttattccgttcgattgttgggagccagtgcaggag

SEQ ID NO: 9697 - DNA, 432 bp, synthetic construct
  misc_feature 1..432: note = source = /note="Description of Artificial Sequence: Synthetic coding sequence"
  source 1..432: mol_type = other DNA
atgtggcttcagagtctcctgctgttaggaacagtggcttgtagcatctcagcgcccgctcgcagcccatctccaagcacacaaccatgggagcacgtgaacgccatccaggaggctcggaggcttctcaacttatcccgggatactgctgccgagatgaatgagactgtggaggtgatttccgagatgttcgatttgcaggaacccacttgtctccagaccaggcttgaactttataaacagggacttcggggcagcctcactaaacttaaagggcctctgacaatgatggcttcacactataaacagcattgcccgccgacaccagagacatcctgcgccactcagatcatcaccttcgaatctttcaaggagaaccttaaagatttcctcctcgtgatcccgttcgattgttgggaacccgtgcaggag

SEQ ID NO: 9698 - DNA, 432 bp, synthetic construct
  misc_feature 1..432: note = source = /note="Description of Artificial Sequence: Synthetic coding sequence"
  source 1..432: mol_type = other DNA
atgtggcttcagtccctcctgttgctggggaccgtggcatgttctatttccgcccctgctcggagcccctccccctctacccagccttgggagcatgtgaacgccatccaagaggcgcgacggcttttgaatctaagcagggacacggctgcggagatgaacgaaactgtggaggtcatttcagagatgttcgacctgcaggagccgacatgtctgcagaccaggttggaactgtataagcagggactaaggggtagcctcaccaaacttaaagggccgttgactatgatggcatcccattataagcagcactgtcctcctacccctgagacatcttgcgctacccagataatcacatttgaatcatttaaagagaacctgaaagattttcttctagttatccccttcgactgctgggagccagttcaggaa

SEQ ID NO: 9699 - DNA, 432 bp, synthetic construct
  misc_feature 1..432: note = source = /note="Description of Artificial Sequence: Synthetic coding sequence"
  source 1..432: mol_type = other DNA
atgtggctgcaaagcttgcttctgctcggcacagtggcatgtagtataagcgctcctgccaggtctccatcaccatctacacagccatgggaacatgttaacgcaatccaggaagctcggcgtctgcttaacttgtcccgcgataccgccgccgaaatgaatgagacagtggaagttatctcagaaatgtttgatcttcaggagcccacatgcttgcagactaggctggagctctataagcagggtcttagaggatcccttacgaagttaaagggacccctgaccatgatggcatcacactataaacaacactgccctccgactccagagacatcttgcgccacacagatcattaccttcgagagtttcaaagaaaacctgaaggacttcttactcgtcatcccatttgactgttgggagcctgtgcaggag

SEQ ID NO: 9700 - DNA, 432 bp, synthetic construct
  misc_feature 1..432: note = source = /note="Description of Artificial Sequence: Synthetic coding sequence"
  source 1..432: mol_type = other DNA
atgtggcttcagtctctcttactgcttggcacagtggcatgctccatcagcgccccggcacggagtcccagcccgtctacacaaccttgggagcacgttaacgccatccaggaggctcgtagactgcttaatctcagtcgggataccgcggctgagatgaatgagactgtagaagtaattagcgagatgttcgacctccaagaaccaacatgccttcagacccggttggagctctataaacagggtctgaggggatctctcacgaagttgaaaggccctctgacaatgatggcgtctcactataaacagcactgcccccctacccccgagacctcatgcgccactcagatcattacctttgagtccttcaaagagaaccttaaggatttcctgctcgtgatcccattcgattgctgggagccggtgcaagaa

SEQ ID NO: 9701 - DNA, 432 bp, synthetic construct
  misc_feature 1..432: note = source = /note="Description of Artificial Sequence: Synthetic coding sequence"
  source 1..432: mol_type = other DNA
atgtggctgcagtcgctgctgttgctcggaaccgtcgcttgctctatctccgcgcctgcaagatccccaagcccgtcaacccagccgtgggaacacgtgaatgcaatccaggaggcgcggcgccttctgaacctgagccgggacaccgccgctgagatgaacgaaacggtggaagtgattagcgagatgttcgatctgcaggaaccaacttgcttgcagaccaggctcgagctctacaagcaaggactgcgcgggtcgctcactaagctgaaaggcccgctcaccatgatggcctcacattacaagcaacactgcccgccgactcctgaaacctcctgcgccactcaaatcatcactttcgagtcgttcaaagaaaacctgaaggatttccttctggtgatcccatttgactgttgggaacccgtccaggag

SEQ ID NO: 9702 - DNA, 432 bp, synthetic construct
  misc_feature 1..432: note = source = /note="Description of Artificial Sequence: Synthetic coding sequence"
  source 1..432: mol_type = other DNA
atgtggcttcagtcacttctgcttttggggaccgtggcctgctccatcagcgcccctgcacggtcaccctcgccatcaacccagccttgggaacacgtgaatgcaatccaggaggcaaggcgactgctgaacctttcgcgagacaccgcagcagagatgaacgaaactgtggaagtgatatccgagatgtttgatctgcaggaacccacctgcttgcagactagactggagctgtataaacaaggcctcaggggatcgcttaccaaactcaagggccccctgacgatgatggcatcccattacaaacaacattgtccaccaacccctgagacttcttgtgcaacgcagataatcacttttgagtcattcaaagaaaacctgaaagacttccttctcgtcatcccgtttgattgttgggaacctgtccaagaa

SEQ ID NO: 9703 - DNA, 432 bp, synthetic construct
  misc_feature 1..432: note = source = /note="Description of Artificial Sequence: Synthetic coding sequence"
  source 1..432: mol_type = other DNA
atgtggctgcagtctctgctattgcttgggaccgtggcgtgcagcatcagcgcaccagcgcgcagtcctagtccctcgacacagccttgggaacacgtcaatgccatccaggaggctcgtcggctgctgaacctctcacgggataccgcagctgaaatgaacgaaacagtggaggttatatcagaaatgttcgacctacaggaaccgacatgtctacagactaggctcgagctgtataagcagggcctccgcggaagtctaacaaagctcaagggtccattgactatgatggcttcacattacaagcagcactgtcctcccactcctgagacaagctgtgccacacagatcataacttttgagagctttaaggaaaacctaaaggattttctgttggtaatcccttttgattgttgggaacccgtccaggag

SEQ ID NO: 9704 - DNA, 432 bp, synthetic construct
  misc_feature 1..432: note = source = /note="Description of Artificial Sequence: Synthetic coding sequence"
  source 1..432: mol_type = other DNA
atgtggctgcagtccctgctgcttctggggacagtggcttgttcaatttccgccccagcgcgatctccaagcccctcaacgcaaccatgggagcacgtgaatgccatccaggaagcccggcgactactcaacttatcccgcgataccgccgcggagatgaatgaaactgtagaggtcataagcgagatgttcgacttacaggagccaacttgcctgcagacccggctagagttgtataagcagggccttcgagggtctctgactaagctcaagggacctctcactatgatggcctcccactacaaacaacactgcccacccacacccgagacaagctgcgcaacccagattatcacctttgagagttttaaagaaaacctgaaagatttccttcttgtaatcccattcgattgctgggagccggtgcaggag

SEQ ID NO: 9705 - DNA, 432 bp, synthetic construct
  misc_feature 1..432: note = source = /note="Description of Artificial Sequence: Synthetic coding sequence"
  source 1..432: mol_type = other DNA
atgtggctgcagtccctgcttctccttggtaccgtcgcatgttcgatttccgctcctgctagaagcccaagcccatccacccaaccatgggagcacgtcaatgccattcaagaagcaaggaggcttcttaacttgtcccgtgacaccgcggcggaaatgaacgaaaccgtggaagtcatttcagaaatgttcgatctccaggagcctacctgtctgcaaacccggctggaactgtacaaacagggtctgcggggtagccttaccaagctgaaggggcctctcaccatgatggcatcgcattacaagcaacattgtccaccgactccagaaacttcatgtgccacgcagatcattacgttcgaatcgtttaaggagaacctcaaagactttcttctggtgatcccttttgactgctgggaacctgtgcaggag

SEQ ID NO: 9706 - DNA, 432 bp, synthetic construct
  misc_feature 1..432: note = source = /note="Description of Artificial Sequence: Synthetic coding sequence"
  source 1..432: mol_type = other DNA
atgtggctgcaatcgctgttgctgctgggcaccgtggcatgttcaatttccgccccagccagaagcccatccccatcaacccagccatgggaacatgtgaacgccatccaggaggcacgccggctgctgaacctgtcccgcgacaccgcagcagagatgaacgagactgtggaagtgattagcgagatgttcgacttgcaggaacccacttgtctgcaaacccgacttgaactgtacaagcaaggacttaggggtagccttaccaaacttaagggaccacttaccatgatggcgtcccattacaagcaacattgtccacctacccctgagactagctgtgcgactcagatcattacctttgaatccttcaaggagaatcttaaggattttctgcttgtcattccgtttgattgttgggagcccgtgcaagag

SEQ ID NO: 9707 - DNA, 432 bp, synthetic construct
  misc_feature 1..432: note = source = /note="Description of Artificial Sequence: Synthetic coding sequence"
  source 1..432: mol_type = other DNA
atgtggctgcagagcttgttacttcttggaactgttgcatgtagcatttcggcaccagcccgatccccatccccttcgacccagccttgggagcatgtcaatgcaattcaggaggcccgtcggcttctaaatttgtcgcgtgataccgccgctgagatgaacgaaaccgttgaggtcatctcagaaatgttcgatttacaagagccgacctgcttgcagacccgactcgagctgtataagcaaggcctccgtggttccttgacgaagttaaaaggacctctaacgatgatggcttcgcattacaaacagcactgtccaccgaccccagagacctcatgtgctacccaaatcattaccttcgagtcgttcaaggagaatttgaaagattttttgcttgtgattccattcgattgttgggagccagtccaggaa

SEQ ID NO: 9708 - DNA, 432 bp, synthetic construct
  misc_feature 1..432: note = source = /note="Description of Artificial Sequence: Synthetic coding sequence"
  source 1..432: mol_type = other DNA
atgtggttgcagtccctgctgctgttgggcaccgtcgcctgcagtatttcagctcccgccagaagcccttccccctctactcagccatgggagcacgtgaatgcgatccaggaggcgaggaggttgctaaacctgagtcgagatacagccgccgagatgaacgagacagtcgaagtgatctcagaaatgtttgacctacaggaacccacatgtctccagaccaggctggagttgtacaaacaaggcctgaggggaagcctcacaaagctcaaaggcccgctgacaatgatggcgagccactataaacagcactgccccccaacccccgagacgtcttgcgcaacccagatcatcacctttgagagtttcaaagagaacttgaaggattttttgttagtgatcccctttgactgctgggagcccgtccaagaa

SEQ ID NO: 9709 - DNA, 432 bp, synthetic construct
  misc_feature 1..432: note = source = /note="Description of Artificial Sequence: Synthetic coding sequence"
  source 1..432: mol_type = other DNA
atgtggctgcaatcgctgcttctgctgggcacagttgcgtgttcaatttcggcaccggctcgctctcctagtcctagtactcagccttgggagcacgtcaatgctattcaagaggcccgccgcctattgaatttgtccagagatactgcagcagagatgaacgaaacagtggaagtgatatctgagatgtttgacttgcaagaacctacctgtctgcagacaagattggaactctacaagcaagggctgagaggcagcctgaccaagctgaaggggccactgactatgatggcgtctcactataagcaacattgtccaccaaccccagaaactagctgtgctactcagataatcacttttgagagcttcaaggagaacctcaaggattttcttctcgtgataccctttgactgttgggaaccagtccaggag

SEQ ID NO: 9710 - DNA, 432 bp, synthetic construct
  misc_feature 1..432: note = source = /note="Description of Artificial Sequence: Synthetic coding sequence"
  source 1..432: mol_type = other DNA
atgtggctccagtccctcctcctgctgggtaccgtcgcctgttccatttccgcacctgccagatctccttcaccttctacgcaaccatgggaacacgttaacgccattcaagaggccaggcgactcctcaacctttcaagggacacagctgcagaaatgaacgagaccgtggaggtcatatccgagatgttcgatctccaagaaccaacgtgtctacagacccgcttagaactgtacaaacagggtcttaggggttccttgaccaaattaaaaggccctctcactatgatggcttcacattacaaacagcattgccccccgacccctgaaacatcctgtgctactcagattataactttcgaatcgttcaaagagaacctgaaagacttccttttggtgatcccgttcgactgctgggagcctgtgcaagag

SEQ ID NO: 9711 - DNA, 432 bp, synthetic construct
  misc_feature 1..432: note = source = /note="Description of Artificial Sequence: Synthetic coding sequence"
  source 1..432: mol_type = other DNA
atgtggctgcagtcactgctgttgctgggtactgttgcgtgtagcatcagcgcgcccgcccgctctccatctccttcaacgcagccttgggaacatgtcaacgcaatacaagaagcacggcggctcctaaatctgagccgggataccgctgcagaaatgaatgaaaccgtggaggtgatctccgagatgttcgacctgcaggaacctacgtgtctgcagacacgcctcgagctgtacaaacaaggtctgagagggtccttaacgaaactgaagggaccactgacgatgatggcctctcactacaaacagcattgtccgccgaccccggagactagctgtgcaacccagatcattacgttcgagagctttaaagaaaacctgaaagacttcctgctcgtaatccctttcgattgctgggaaccggttcaggaa

SEQ ID NO: 9712 - DNA, 432 bp, synthetic construct
  misc_feature 1..432: note = source = /note="Description of Artificial Sequence: Synthetic coding sequence"
  source 1..432: mol_type = other DNA
atgtggctgcaatcactgctgctactggggaccgtggcctgctcaatatccgcccccgcccgcagtccgtcaccttccacacaaccatgggagcatgtgaatgcaattcaggaggcaagacgcctactgaatctgagtagagatactgctgctgaaatgaatgaaactgttgaagtgatctcggaaatgtttgatctccaggagcccacctgcctgcaaaccagactggaactctataagcagggcctccggggctcactgaccaaactcaagggtccactcactatgatggcctctcactacaagcagcactgcccgcccacacccgaaactagttgtgcaacacagatcatcacattcgagtctttcaaggagaacttaaaggatttcctgcttgttatcccgtttgattgttgggaacccgtgcaggag

SEQ ID NO: 9713 - DNA, 432 bp, synthetic construct
  misc_feature 1..432: note = source = /note="Description of Artificial Sequence: Synthetic coding sequence"
  source 1..432: mol_type = other DNA
atgtggttgcagagcctgctgctgctcgggactgtggcctgttccattagtgcccctgctagatcgccctccccttcaacccagccatgggaacacgtgaatgcaattcaagaagcaagacgtctcctgaacctgagccgagatactgcagccgaaatgaacgaaaccgtggaagtcatttccgaaatgtttgatcttcaagaacctacttgccttcagacccggcttgagctctacaagcagggtttgcggggaagcctcaccaagctgaagggaccactcactatgatggcgtcccactacaaacaacactgtcctcccacccccgagacttcatgtgcaacccaaatcataactttcgaatcgtttaaggagaacttgaaggattttctgctggtgatcccattcgactgttgggagcctgttcaagaa

SEQ ID NO: 9714 - DNA, 432 bp, synthetic construct
  misc_feature 1..432: note = source = /note="Description of Artificial Sequence: Synthetic coding sequence"
  source 1..432: mol_type = other DNA
atgtggctgcagtccctgctgctgctcggcacggttgcctgctcgatctcagcgcctgccagatccccgtccccgtccacgcagccgtgggaacacgtgaatgcgatccaagaagcacggcggctgctgaatctcagccgcgacaccgcagccgagatgaatgaaactgtggaagtgatctcggaaatgttcgatctgcaagaaccgacttgtctgcaaactaggctggaactctacaaacaggggctgagaggatcgctgactaagctgaaaggtcctctgactatgatggcctcgcactacaagcagcactgtccaccgacccccgaaaccagctgcgctactcagatcatcactttcgagagcttcaaggagaacttgaaggatttccttctggtgatccctttcgactgctgggagcctgtgcaggag

SEQ ID NO: 9715 - DNA, 432 bp, synthetic construct
  misc_feature 1..432: note = source = /note="Description of Artificial Sequence: Synthetic coding sequence"
  source 1..432: mol_type = other DNA
atgtggctacagtcactactgctcctcggtacggtagcttgtagcataagcgcgcctgccaggtcgccctcgccatcaacccagccatgggaacatgttaacgccatccaggaggcgcggcgacttttaaatctctctcgggacactgccgctgagatgaacgagactgtcgaggtgatcagtgagatgtttgacctgcaagaacccacctgtctgcagacccggttggaactgtacaagcagggcttacgcgggtcgcttactaaattgaagggtccactcaccatgatggcaagccactataagcaacactgccctcctaccccagagactagctgcgccacacagattatcactttcgaatcgtttaaagaaaaccttaaggactttctcctagtgattcccttcgactgttgggaacccgtacaagag

SEQ ID NO: 9716 - DNA, 432 bp, synthetic construct
  misc_feature 1..432: note = source = /note="Description of Artificial Sequence: Synthetic coding sequence"
  source 1..432: mol_type = other DNA
atgtggctgcagtccctcttgctgctgggcactgtagcttgctccatttcagcccctgcccgctcaccctccccctccactcagccttgggagcacgtgaatgctattcaggaggcccgcaggcttctgaatctgagtcgtgacacagccgctgaaatgaacgaaaccgtggaggtgattagcgaaatgttcgacctgcaagagcctacctgcctgcagacaaggttggagttgtataaacagggtcttcgcggctctcttacaaaacttaaaggacctcttacaatgatggccagtcactataagcagcattgccctcccacccccgagacttcctgtgctactcagatcattacatttgagagctttaaagaaaatctgaaggactttcttttggtcattccattcgattgctgggagcctgtacaggag

SEQ ID NO: 9717 - DNA, 432 bp, synthetic construct
  misc_feature 1..432: note = source = /note="Description of Artificial Sequence: Synthetic coding sequence"
  source 1..432: mol_type = other DNA
atgtggctgcagtctctgctactgttgggtaccgtggcatgctctattagcgccccagcccggtccccatcaccttcaacccaaccctgggagcacgtcaacgccattcaagaggctagacgcttgctgaacctgtccagagacaccgcagccgaaatgaacgagaccgtcgaagtgatttccgaaatgtttgatctccaggaacccacatgcctacaaactcgattggaactgtacaagcagggactcagaggatctctgacaaaacttaaaggcccgctcacaatgatggcgagccactataagcagcactgcccccccacccctgagacctcttgtgccacccagatcattacctttgagtctttcaaagagaatctgaaagattttttattggtgataccttttgattgctgggagccagtacaggaa

SEQ ID NO: 9718 - DNA, 432 bp, synthetic construct
  misc_feature 1..432: note = source = /note="Description of Artificial Sequence: Synthetic coding sequence"
  source 1..432: mol_type = other DNA
atgtggttacaatcgctattattattaggtacggtagcgtgttcgatatcggcgccggcgcgttcgccgtcgccgtcgacgcaaccgtgggaacatgtaaatgcgatacaagaagcgcgacgattattaaatttatcgcgagatacggcggcggaaatgaatgaaacggttgaagtaatatcggaaatgtttgatttacaagaaccgacgtgtttacaaacgcgtctagaactatataaacaaggtttacgaggttcgctaacgaaattaaaaggtccgttaacgatgatggcgtcgcattataaacaacattgtccgccgacgccggaaacgtcgtgtgcgacgcaaataataacgtttgaatcgtttaaagaaaatctaaaagattttctactagtaataccgtttgattgttgggaaccggtacaagaa

SEQ ID NO: 9719 - DNA, 432 bp, synthetic construct
  misc_feature 1..432: note = source = /note="Description of Artificial Sequence: Synthetic coding sequence"
  source 1..432: mol_type = other DNA
atgtggttgcagtcactcctattattaggtacggtggcctgctctatctcggctccagcacggagtccgtcaccatccactcagccatgggagcacgtgaacgccatccaggaggctagacggctcctgaacctcagccgagacactgccgctgagatgaacgaaaccgttgaggtgattagtgagatgttcgacctccaggaaccaacatgtctgcagacccgcctcgaactgtacaagcagggtctccgaggatcactcaccaagcttaaaggacccttgacaatgatggctagccattacaagcaacactgtccccctactccagagacttcatgcgctacccagatcatcacattcgaatctttcaaggaaaatctcaaggattttctgctggtcatcccattcgattgctgggagcctgttcaagaa

SEQ ID NO: 9720 - DNA, 432 bp, synthetic construct
  misc_feature 1..432: note = source = /note="Description of Artificial Sequence: Synthetic coding sequence"
  source 1..432: mol_type = other DNA
atgtggctccaatccttacttcttcttggaaccgttgcctgttcaatttctgcgccagcaaggtcgccatctccatcgactcaaccctgggaacatgtcaacgcaattcaagaggcccgtcgtttactaaatttgagtcgagatacagcggccgaaatgaatgaaacggtagaagttatttcagagatgttcgatttacaagagcctacttgcctgcaaacgcgtctagagctctataagcagggtctaagaggatctttgactaaattaaagggaccactgactatgatggcttcacattataagcaacactgtcctccaacaccagaaacatcttgcgctacacaaatcataaccttcgaaagcttcaaggaaaatctcaaggatttcctgcttgttattccttttgattgctgggagccagtgcaggag

SEQ ID NO: 9721 - DNA, 432 bp, synthetic construct
  misc_feature 1..432: note = source = /note="Description of Artificial Sequence: Synthetic coding sequence"
  source 1..432: mol_type = other DNA
atgtggttgcagtcattactgctgctgggcactgtagcatgtagcatcagtgcccccgccagatccccaagtcctagtacgcagccatgggaacacgtgaatgcaatccaagaggcgcggagattgcttaacctgtcccgggacactgctgccgaaatgaatgagaccgtggaggttatcagtgaaatgttcgaccttcaagaacccacatgtctccaaactcggcttgaactgtacaagcaggggcttcgcgggtctcttaccaagctaaaagggcctctgactatgatggcatcccattataagcaacattgtccacctaccccagaaaccagctgcgcaacccagataattacctttgaatcgttcaaggagaacctgaaggactttttgttggtgattccattcgactgttgggagcccgtgcaggaa

SEQ ID NO: 9722 - DNA, 432 bp, synthetic construct
  misc_feature 1..432: note = source = /note="Description of Artificial Sequence: Synthetic coding sequence"
  source 1..432: mol_type = other DNA
atgtggctgcaatcacttctgctgctgggcactgtggcctgttcaatcagcgcaccggccagatccccgtccccatcgacccagccatgggaacatgtgaatgcgatccaggaggcgcgcagactgttgaacctctcccgagacaccgctgcagagatgaacgaaactgtggaagtcatatcggaaatgttcgatctgcaagaaccaacttgcctccagacgcggctggaactctacaaacagggactgaggggttcgctcactaagttgaagggcccacttaccatgatggcctcgcactacaagcagcactgtccaccaactccggaaacctcctgcgcaacccagatcattactttcgaatccttcaaggaaaacttgaaggacttcctcctcgtgattccatttgactgctgggaaccggttcaggag

SEQ ID NO: 9723 - DNA, 432 bp, synthetic construct
  misc_feature 1..432: note = source = /note="Description of Artificial Sequence: Synthetic coding sequence"
  source 1..432: mol_type = other DNA
atgtggttacagtccctgctgctattggggactgttgcgtgcagcatctccgctcccgcccgcagcccaagcccctccacccagccatgggagcatgtgaacgccatccaagaagcccgccgactcttaaatttgtcacgggacactgcagcagagatgaacgagaccgtggaagtgatcagcgagatgttcgatttacaggaaccaacctgtctacagaccagactggagctctacaagcagggattgcgcggatccttgactaagttgaaaggacccctcaccatgatggcctcccactacaaacagcactgtccaccaacccccgagacctcatgcgcgactcagataataacctttgaatcctttaaggagaatctgaaggattttttgcttgtcatccccttcgattgctgggagccggtgcaagag

SEQ ID NO: 9724 - DNA, 432 bp, synthetic construct
  misc_feature 1..432: note = source = /note="Description of Artificial Sequence: Synthetic coding sequence"
  source 1..432: mol_type = other DNA
atgtggcttcagagtctgctcctgttgggtactgtcgcatgctcaatcagcgcccccgctcgaagtccctcaccttccacccagccttgggaacacgtgaacgcaattcaggaggctagaaggttgctcaatctgagtagagacacggctgccgagatgaacgagacagtagaagtaatctccgagatgtttgaccttcaggaaccaacatgtctgcaaacccgcttggagctctataagcaaggcctcagaggctctctcaccaagctgaagggtccgctcactatgatggcctcccactacaaacagcactgtcctcccacacccgagacttcctgcgctacccagatcatcacgttcgaatcattcaaggaaaatctgaaagacttcctgctggtcatacctttcgactgttgggagcctgtccaggag

SEQ ID NO: 9725 - DNA, 432 bp, synthetic construct
  misc_feature 1..432: note = source = /note="Description of Artificial Sequence: Synthetic coding sequence"
  source 1..432: mol_type = other DNA
atgtggctccagagtctgctgctgctcggcacggtggcatgttccatctcggccccagcaagatctccatccccaagtactcaaccatgggaacacgtgaacgcgatacaggaggctcgccgcttgttgaatctcagccgcgacactgccgcggagatgaacgaaaccgttgaggttatctctgagatgttcgacctgcaggagcctacctgtctgcagactagattggaactgtataagcaaggattacgcggatctttgacaaaactgaagggccccctcactatgatggcctcccactacaaacagcattgcccacctacacccgaaacctcgtgtgcaacccagatcattacctttgaatcttttaaggagaaccttaaagactttctcttagtgattccttttgattgctgggaacctgttcaagag

SEQ ID NO: 9726 - DNA, 432 bp, synthetic construct
  misc_feature 1..432: note = source = /note="Description of Artificial Sequence: Synthetic coding sequence"
  source 1..432: mol_type = other DNA
atgtggttgcaatccctcctgctgctgggaactgtggcatgcagcatctcagcgcccgcccggagtccgtcgccgtccactcaaccatgggagcacgttaacgccatccaagaagccagacggcttctgaatctgagtcgggacactgccgctgaaatgaatgaaaccgtggaggtgatcagcgaaatgtttgatctgcaggagccgacctgcctccagactcgcctcgagctttacaagcagggtttgaggggctccctgaccaagttgaaaggacctctcactatgatggcatcgcactacaaacagcattgtccgccgacgccggaaacgtcctgtgcgacccagattatcactttcgaatctttcaaggaaaacctgaaggactttttgctcgtgattccattcgactgctgggagccggtccaggaa

SEQ ID NO: 9727 - DNA, 432 bp, synthetic construct
  misc_feature 1..432: note = source = /note="Description of Artificial Sequence: Synthetic coding sequence"
  source 1..432: mol_type = other DNA
atgtggctgcagtccctactgctgcttggaactgtagcgtgctccattagcgctccagcccgctccccttccccatccacgcagccgtgggaacacgtcaacgcgattcaggaagcacgaagattgttgaacctgtccagagacactgcagcagagatgaacgagacagtggaagttatttctgaaatgttcgatctccaggaacctacttgcctgcaaacccggttggaactttacaaacagggcttgagaggttctctgacaaagttgaaggggcccctaaccatgatggcatctcattataaacagcactgcccacctacccccgagacctcatgtgccacacaaattatcacgttcgagtcgttcaaggagaaccttaaagatttcctcttggtgatcccattcgactgctgggaacctgtgcaggaa

SEQ ID NO: 9728 - DNA, 432 bp, synthetic construct
  misc_feature 1..432: note = source = /note="Description of Artificial Sequence: Synthetic coding sequence"
  source 1..432: mol_type = other DNA
atgtggctccagagcctcctcctcttggggaccgtcgcatgctctattagtgcccccgccagatctccttccccttcaacccagccttgggagcacgtgaacgctattcaagaggcccggcgcttgctgaatctgagtcgagacacagcagcggagatgaacgagactgtggaagtcatatctgaaatgtttgatctgcaggagccaacttgtctccagacccggctggagctctataagcaggggctgaggggcagcctgacgaagctgaaaggcccactgaccatgatggctagccattataagcaacattgtcccccaacacctgagacatcttgtgccacacagatcatcaccttcgagagctttaaggagaaccttaaggatttccttctggttatccccttcgactgctgggagcctgtgcaggaa

SEQ ID NO: 9729 - DNA, 432 bp, synthetic construct
  misc_feature 1..432: note = source = /note="Description of Artificial Sequence: Synthetic coding sequence"
  source 1..432: mol_type = other DNA
atgtggttacagagcctgctgctgcttggcaccgtggcttgtagcatcagcgctccagcaagaagccccagtccaagtacgcagccctgggaacacgtgaacgcaattcaggaggctcgtagactcctgaacctcagcagagatactgcagctgaaatgaacgaaactgtcgaagtcataagtgagatgtttgatcttcaagaacccacatgtctgcagacccgcctcgaactctataagcagggccttcgcggtagtttaacaaagctgaagggcccactgacaatgatggcttcacactataaacagcattgtcctccaacacctgaaacatcatgtgctacacagatcattacattcgaaagctttaaagaaaacttgaaggactttcttctggtgatacctttcgactgttgggagcctgtgcaagaa

SEQ ID NO: 9730 - DNA, 432 bp, synthetic construct
  misc_feature 1..432: note = source = /note="Description of Artificial Sequence: Synthetic coding sequence"
  source 1..432: mol_type = other DNA
atgtggctccaatccctgctcctcctcggtaccgtggcctgctcgatttccgccccggcacggtcgccttcgccgtccacccaaccgtgggaacacgtgaacgcgatccaagaagcgcggcgactgctcaacctctcccgcgacactgcggcggagatgaatgagactgtagaggtgatctccgaaatgttcgatctgcaggagcctacttgcctgcagacccgccttgaactctacaagcagggactgcggggttcattgactaaactgaaaggaccactgaccatgatggcctcacattacaagcagcactgccctccgacccccgaaacgagctgcgccactcaaatcatcacttttgagagcttcaaggaaaacctgaaggatttcctgctggtcatcccatttgactgttgggaaccagtccaggaa

SEQ ID NO: 9731 - DNA, 432 bp, synthetic construct
  misc_feature 1..432: note = source = /note="Description of Artificial Sequence: Synthetic coding sequence"
  source 1..432: mol_type = other DNA
atgtggttgcagtcactgctattgctgggcaccgtcgcatgctctatcagcgccccagctagatccccaagcccctccacacagccttgggagcatgtgaatgccatccaggaggcacgacgcctgctgaatctgagtagagatacagctgccgaaatgaacgaaaccgttgaagtgatttccgagatgtttgaccttcaggagcccacctgtttgcagacacgcctcgagctgtataaacagggcctccgcggaagcctgaccaagctgaaggggccactgaccatgatggcatcgcactataagcagcattgtccacccacaccagaaacatcatgcgcaacacagattattacattcgagagtttcaaagagaacctgaaggatttcctgttggtcatcccattcgactgctgggagcccgtacaggaa

SEQ ID NO: 9732 - DNA, 432 bp, synthetic construct
  misc_feature 1..432: note = source = /note="Description of Artificial Sequence: Synthetic coding sequence"
  source 1..432: mol_type = other DNA
atgtggctgcaatccctccttctcctgggtaccgtggcttgctcaatttccgcgccagcgaggtccccgagcccatcaacgcagccgtgggaacacgtcaatgctatccaggaagcacggagactgctgaacctctcgcgcgacaccgcggcagaaatgaacgaaactgtggaagtgatctccgagatgtttgatctgcaggagccgacgtgtttgcagacccggttggaactgtataagcagggactgcggggaagcctgaccaagttgaaggggccacttaccatgatggcctcgcattacaagcagcactgtccgcctacgccagaaacctcatgcgcgacccaaatcatcactttcgaatcattcaaagaaaatctcaaggactttttgctggtgattccatttgattgttgggagccggtgcaggaa

SEQ ID NO: 9733 - DNA, 432 bp, synthetic construct
  misc_feature 1..432: note = source = /note="Description of Artificial Sequence: Synthetic coding sequence"
  source 1..432: mol_type = other DNA
atgtggttgcagagcctgctgctgctggggaccgtggcttgctccattagtgccccggccagatctccttcaccctctacacagccatgggaacatgtgaacgcaattcaggaggccaggagactgcttaacctttcccgggacaccgcagctgagatgaacgagactgttgaggtgatcagcgagatgttcgacctgcaagagcccacctgcctgcagacccggctggaactgtacaaacaggggctgcggggcagcctgacaaagctcaaagggcctttgactatgatggcgtctcattataagcaacactgcccacctacccccgagacttcttgcgcaactcagatcattacatttgaatcattcaaagagaatctcaaggactttctgctggtgatcccctttgactgctgggagcccgtccaggag

SEQ ID NO: 9734 - DNA, 432 bp, synthetic construct
  misc_feature 1..432: note = source = /note="Description of Artificial Sequence: Synthetic coding sequence"
  source 1..432: mol_type = other DNA
atgtggttgcagagcctgcttctcctgggaaccgtcgcatgctcgattagcgcaccagcacgatcgccatcaccatccactcaaccgtgggaacacgtgaacgccattcaggaagcacgcagactgcttaacctctcaagagataccgcagcagaaatgaacgaaactgtcgaggtgatctccgagatgttcgacctccaagaacctacctgccttcagactcggctggaactgtataagcaaggacttagaggatcgcttacgaagttgaagggacctttgaccatgatggcctcccattacaaacagcattgtccccccacgcctgagacgtcctgcgcaacccaaatcattacttttgagtccttcaaagagaacttgaaagatttcctgctcgtgatcccttttgattgttgggagcctgtgcaagaa

SEQ ID NO: 9735 - DNA, 432 bp, synthetic construct
  misc_feature 1..432: note = source = /note="Description of Artificial Sequence: Synthetic coding sequence"
  source 1..432: mol_type = other DNA
atgtggttgcagtcgcttcttcttcttggtactgtggcatgtagcattagcgctccagcaagaagcccttccccgtccacgcaaccatgggaacatgtcaacgcaatacaggaggcacgtcgactgctgaatttgtcgcgtgatactgccgcagaaatgaatgaaactgttgaggtgatttcggaaatgttcgacctgcaggagcccacctgcctgcagactcgcctggaactttacaagcagggacttagaggatcccttactaaactgaagggtcctctgaccatgatggcctcacactacaagcagcactgcccaccaactccagaaacttcctgtgcaacccaaatcatcacttttgaatcctttaaggaaaacctgaaagatttccttcttgtgatcccctttgactgttgggaacccgtgcaagag

SEQ ID NO: 9736 - DNA, 432 bp, synthetic construct
  misc_feature 1..432: note = source = /note="Description of Artificial Sequence: Synthetic coding sequence"
  source 1..432: mol_type = other DNA
atgtggctccagagcctgctactcttgggaactgtggcatgttccataagcgccccagctaggagtccaagtccatcaacgcagccatgggaacacgtaaatgctattcaggaggccagacgcctcctgaacctgagtcgcgacaccgcagcagaaatgaatgaaaccgtggaggtcatatccgaaatgtttgatttacaagagccaacttgtctgcagactaggcttgaattgtacaagcaaggactcaggggatccctgacaaagctgaaaggtccactgactatgatggcctcacactacaagcaacattgcccccccactcccgaaacctcgtgcgccacccagattattactttcgaaagtttcaaagagaatctcaaagactttctgcttgtcatcccctttgactgttgggagccagtccaggaa

SEQ ID NO: 9737 - DNA, 432 bp, synthetic construct
  misc_feature 1..432: note = source = /note="Description of Artificial Sequence: Synthetic coding sequence"
  source 1..432: mol_type = other DNA
atgtggctgcagagtttgctcctgttgggcaccgtggcttgcagtatctcagctcctgctcggtctccaagtccttctacccagccatgggaacacgtgaacgccatccaagaggcccgacgcttgttgaacttgagccgcgacacagccgccgaaatgaatgagacggtggaagttataagcgaaatgttcgatcttcaggaacctacctgcctccagacccggctggaactctataagcagggcttgcggggatctctgacaaaactcaaaggacctctgacgatgatggcctcacattacaaacagcactgcccacctaccccagaaaccagctgtgccacccaaataattaccttcgagtcatttaaggagaatcttaaagatttcttgctcgtgatcccttttgactgctgggaaccagtacaggaa

SEQ ID NO: 9738 - DNA, 432 bp, synthetic construct
  misc_feature 1..432: note = source = /note="Description of Artificial Sequence: Synthetic coding sequence"
  source 1..432: mol_type = other DNA
atgtggttacaaagcttgctccttcttggcaccgtcgcttgctctatatccgccccagcaaggtctcccagcccaagtacacagccctgggagcatgtgaatgctatccaggaagccagaagactgttaaacttgagtagagacaccgccgctgaaatgaacgagactgtcgaggtcatcagcgaaatgttcgatctgcaagaaccaacttgccttcaaacccgcttggaactttacaagcaagggctgcggggtagcctgactaaacttaaaggcccgctcactatgatggcgtcccactacaagcaacactgcccacccacacctgagacctcctgcgcgactcagatcatcacatttgagagcttcaaagagaacctcaaggacttcctcttggttatcccttttgactgttgggagcccgtgcaggaa

SEQ ID NO: 9739 - DNA, 432 bp, synthetic construct
  misc_feature 1..432: note = source = /note="Description of Artificial Sequence: Synthetic coding sequence"
  source 1..432: mol_type = other DNA
atgtggttacagtcattgctactcctcgggactgtggcgtgttccatttccgcacccgcgcgaagccccagtccttcaactcaaccttgggaacacgtaaacgccattcaggaggctcgcaggttactgaatctatctagagacacagctgcagaaatgaacgagacagtggaggtcatatctgaaatgttcgatctgcaggagcctacttgtctacagacccgattagaactatacaagcagggcctgcggggatctctcaccaagttgaaaggccccctcactatgatggcatcccactacaaacagcactgcccacctacgccggagacctcctgcgctacccagatcatcaccttcgagagtttcaaggagaatctgaaagactttctgctggtgatcccatttgactgttgggagcccgtgcaggag

SEQ ID NO: 9740 - DNA, 432 bp, synthetic construct
  misc_feature 1..432: note = source = /note="Description of Artificial Sequence: Synthetic coding sequence"
  source 1..432: mol_type = other DNA
atgtggctccaatccctgctcctccttggcacagttgcatgtagcatttccgcccccgcacgaagtccttcaccgagcacccagccctgggagcacgttaatgcaatccaggaagcccggagactcctcaatctgtctcgcgacaccgccgccgaaatgaacgagactgttgaggtgatatcagaaatgtttgatctgcaagaacctacttgcctgcaaactcggctggaactgtacaagcaggggctgcggggctctctgacgaagttaaaagggcctctgaccatgatggcgagccattataaacagcactgccctccaaccccagagacgagctgcgccacccagattatcactttcgagagcttcaaggaaaacctgaaggactttttgttggtcatcccctttgactgttgggagcctgtgcaggaa

SEQ ID NO: 9741 - DNA, 432 bp, synthetic construct
  misc_feature 1..432: note = source = /note="Description of Artificial Sequence: Synthetic coding sequence"
  source 1..432: mol_type = other DNA
atgtggttgcagtccctgctgctcttaggaactgtagcatgtagtatcagcgcgcctgctcgttcaccctcaccttcaacgcaaccttgggaacacgtgaacgctatacaggaggcgcggcgcttgctgaatctttcccgggacacagctgccgagatgaacgaaacggtcgaggtcatatccgagatgttcgacctccaagaaccaacctgtctccagaccagactagagctttacaaacagggcctgcggggcagcctcacaaagctcaaaggaccacttactatgatggcctcacattataagcagcactgcccacctacaccagaaacctcttgtgctacgcaaataataactttcgaaagtttcaaggagaatttaaaagatttcctgttggtaatcccctttgactgttgggagccagtgcaggag

SEQ ID NO: 9742 - DNA, 432 bp, synthetic construct
  misc_feature 1..432: note = source = /note="Description of Artificial Sequence: Synthetic coding sequence"
  source 1..432: mol_type = other DNA
atgtggctccagtcactattactcctcggcaccgtggcctgttcgattagcgcccctgccagaagcccttccccttccactcagccgtgggaacatgtgaacgccatccaggaggctcggcgactgttaaatctatctcgtgatacagcagcagaaatgaatgagacagtggaggtgatcagtgagatgtttgatctgcaggagccaacatgccttcaaaccaggctggagttgtacaagcaaggactcaggggttccctgactaagctgaaaggacccctcacaatgatggcatctcactacaagcagcattgtcctcccacacccgagacctcgtgtgcaacccagatcatcacctttgaaagcttcaaggaaaacctcaaagattttctactggtcatcccttttgattgttgggaacctgtgcaagag

SEQ ID NO: 9743 - DNA, 432 bp, synthetic construct
  misc_feature 1..432: note = source = /note="Description of Artificial Sequence: Synthetic coding sequence"
  source 1..432: mol_type = other DNA
atgtggttacaaagtctgctgttgctcgggactgtggcttgttccattagcgcaccggcccgaagtccttctcccagcacccaaccatgggagcatgtaaatgccattcaggaggcaaggcggttgctgaacctctctagggatactgccgctgagatgaacgagacggtcgaggtaataagcgaaatgtttgatttacaggaacctacatgtctgcagacgagactggagctgtacaagcagggcctgcgcggttctctgaccaagctgaaaggccctcttacaatgatggcctcgcactacaaacagcactgcccgcccaccccagaaacgagctgtgcgacacagatcataacctttgagtcttttaaggaaaacctgaaagattttcttctcgtcatcccttttgactgctgggagccagtgcaagag

SEQ ID NO: 9744 - DNA, 432 bp, synthetic construct
  misc_feature 1..432: note = source = /note="Description of Artificial Sequence: Synthetic coding sequence"
  source 1..432: mol_type = other DNA
atgtggctccagagtttactgctattgggaacagtcgcctgctccataagcgccccagcccgctctccgagcccctcaacacagccctgggagcacgtaaacgcgatccaggaggcccgcaggcttcttaacctttcccgggacaccgccgccgaaatgaatgagacggtcgaggtcatctccgagatgtttgatctccaggaaccgacctgcctgcagacaaggctggaactgtacaagcaaggcttgaggggaagcctgaccaaactgaagggccccctgacaatgatggcttcacactataaacagcactgtcctccaactccggagacaagctgtgccacacaaattatcactttcgaatcctttaaagaaaacctgaaggactttctgttggttatcccttttgattgctgggagccagtacaagaa

SEQ ID NO: 9745 - DNA, 432 bp, synthetic construct
  misc_feature 1..432: note = source = /note="Description of Artificial Sequence: Synthetic coding sequence"
  source 1..432: mol_type = other DNA
atgtggctgcaaagccttcttctgctcggaactgtcgcatgctctatttcagcacccgcgcgcagcccctcgccatccactcagccttgggaacacgtcaacgcaattcaggaagccaggagactgcttaaccttagcagggacaccgccgctgagatgaatgagacggtggaagtcatctcggaaatgttcgatcttcaagagcccacctgtctgcagacgcggctggaattgtacaagcaagggcttcgtggcagccttaccaaactcaagggtcctctgactatgatggcatcgcattacaaacagcattgtcctcctactcctgaaacctcgtgtgcaactcagattatcacctttgagtcctttaaggagaacctcaaggattttcttcttgttataccgttcgattgttgggagccggttcaagaa

SEQ ID NO: 9746 - DNA, 432 bp, synthetic construct
  misc_feature 1..432: note = source = /note="Description of Artificial Sequence: Synthetic coding sequence"
  source 1..432: mol_type = other DNA
atgtggctgcagtcgctgctccttctcggaactgtggcctgctccatctcagcgccagcacgaagcccgtccccttctacccagccatgggagcacgtgaacgcgatccaggaagccaggcggcttctgaacctgagccgcgataccgcggctgaaatgaatgagactgttgaagtaatctccgagatgttcgacctccaagaacccacttgcttgcaaactcggctcgagctgtacaaacaggggctccgcggatccctcactaaacttaagggcccgttgaccatgatggcatcccattacaagcaacattgtcctccaacccctgagacgagctgcgccactcagatcatcacctttgagtctttcaaggaaaatctgaaggactttctgttggtgattccgttcgactgttgggaaccagtgcaggag

SEQ ID NO: 9747 - DNA, 432 bp, synthetic construct
  misc_feature 1..432: note = source = /note="Description of Artificial Sequence: Synthetic coding sequence"
  source 1..432: mol_type = other DNA
atgtggctccagtctttactcctgctcgggactgtggcctgctcaatcagtgccccagctcgttcaccctccccctctacccagccctgggagcacgttaacgcgattcaggaggcaaggcggctcctaaacctgtcccgggacacggccgcagagatgaacgagaccgtcgaggtcatctctgagatgttcgatctgcaggagccgacatgcttacagacccggttagaactgtataagcagggactcaggggttccttgaccaagctaaagggtcctcttacaatgatggccagtcactacaagcagcactgtccccccacacccgagacgagctgcgccacccagatcatcactttcgagagctttaaagagaacctcaaagattttcttcttgttatccctttcgactgctgggagcctgtgcaggag

SEQ ID NO: 9748 - DNA, 432 bp, synthetic construct
  misc_feature 1..432: note = source = /note="Description of Artificial Sequence: Synthetic coding sequence"
  source 1..432: mol_type = other DNA
atgtggctacaatccctgctcctcctgggaacggtggcttgttctatttcagctccggcccgaagccctagccccagcacgcagccctgggagcatgtaaacgccattcaggaggctcgccgccttctcaatctgagccgagatacagccgccgaaatgaatgagaccgtggaggtcatttccgagatgttcgatctccaggaaccaacatgtctccagacaaggctagagctgtacaaacagggcttaagagggagtctgacaaagttaaagggccccttgaccatgatggcttcccactacaagcaacactgccccccgacacccgaaacaagctgtgctacacagattattaccttcgaatccttcaaagagaacttgaaagatttcctgctcgtgatcccgtttgactgctgggaaccagtgcaagaa

SEQ ID NO: 9749 - DNA, 432 bp, synthetic construct
  misc_feature 1..432: note = source = /note="Description of Artificial Sequence: Synthetic coding sequence"
  source 1..432: mol_type = other DNA
atgtggctacagagcctactgctgctagggactgtagcgtgctccataagcgcaccggccaggagccctagccccagcacccagccgtgggagcacgtcaatgcaattcaggaagctaggagacttttgaacttgtctagagacaccgccgctgagatgaatgaaaccgtggaagttattagcgagatgtttgatctccaagaacctacttgcttgcaaacccgactcgaactgtacaaacagggcctcaggggatcactgaccaagctgaaggggccccttacaatgatggcaagtcattataaacagcactgtcctcccacaccggagacctcctgcgcgactcagatcatcactttcgaatcttttaaagaaaatctgaaagacttcctgctcgtgattccttttgactgctgggagcctgtccaggag

SEQ ID NO: 9750 - DNA, 432 bp, synthetic construct
  misc_feature 1..432: note = source = /note="Description of Artificial Sequence: Synthetic coding sequence"
  source 1..432: mol_type = other DNA
atgtggcttcagagccttctcctgctgggcaccgtcgcatgctcgatctctgcgcctgcgagatcaccgagcccttcaacccaaccgtgggagcacgtcaatgctattcaagaagccaggcggctgctgaacctctcgcgcgacactgccgccgagatgaacgaaaccgtcgaggtcatctcagaaatgttcgatctgcaggagccaacctgcttgcagactagactcgaactgtacaagcaaggcctgcgtggatcgctgaccaagctgaagggtccgctgactatgatggcgagccactacaaacagcattgcccgcctaccccggaaacctcgtgtgcaactcagataatcacttttgaatcgttcaaagaaaatctgaaggattttcttctggttatcccattcgactgctgggagcccgtgcaagaa

SEQ ID NO: 9751 - DNA, 432 bp, synthetic construct
  misc_feature 1..432: note = source = /note="Description of Artificial Sequence: Synthetic coding sequence"
  source 1..432: mol_type = other DNA
atgtggctgcagagtctcctcttgcttggcactgtggcttgctctatatcggctccagccaggtccccctctccatcaactcaaccatgggagcacgtgaacgcgatccaagaggcccggcgactcctgaacttgtcccgagacaccgcagccgaaatgaacgaaaccgtcgaagtcatctccgaaatgttcgaccttcaggagccaacatgcctgcagactcgcctcgaactgtataagcaaggactcagaggttccctgaccaaactgaaggggcctctgacgatgatggctagtcattacaagcagcactgtcccccaacaccagaaacctcatgcgctacccagatcatcaccttcgaaagctttaaagagaacttgaaggacttcttgttggtcatcccctttgattgttgggagccggtccaggag

SEQ ID NO: 9752 - DNA, 432 bp, synthetic construct
  misc_feature 1..432: note = source = /note="Description of Artificial Sequence: Synthetic coding sequence"
  source 1..432: mol_type = other DNA
atgtggcttcaatcactcctgctgctgggtacagtagcatgcagcatttcggcacctgctcgctcgccttcaccatcaacacagccgtgggaacatgtgaacgcgattcaagaggctcgacgtttgctcaacctgtctcgtgacaccgcggcagaaatgaatgaaaccgtcgaagtaatctcagaaatgtttgatcttcaggaaccgacatgcctacaaacgcgactggaactctataaacaaggcctgcgtggtagtctcacaaaacttaaaggtccgctgaccatgatggcgagccattataaacaacattgtccaccgacgccggaaacctcatgcgccacacaaattattacattcgaatcatttaaggagaacttaaaggattttttgcttgtaatccctttcgattgctgggaaccggtccaagaa

SEQ ID NO: 9753 - DNA, 432 bp, synthetic construct
  misc_feature 1..432: note = source = /note="Description of Artificial Sequence: Synthetic coding sequence"
  source 1..432: mol_type = other DNA
atgtggctccaaagtctgctcctgctaggaaccgttgcgtgttcaatctctgctcccgcacggtctcctagcccatccacacagccatgggagcatgtgaacgccattcaggaggccagacggctcttgaaccttagccgcgacacagctgctgagatgaacgaaaccgtggaagtgatcagcgagatgttcgacttacaggagcccacctgcctgcagacccgcctcgagctgtataaacagggtctaagaggatcattgaccaagctcaaggggcctctgaccatgatggccagccactataagcagcactgcccacccactcctgagacgtcatgcgccactcagattatcactttcgagagctttaaggaaaatctgaaagacttcttattggtaatcccttttgattgctgggagccggtgcaggaa

SEQ ID NO: 9754 - DNA, 432 bp, synthetic construct
  misc_feature 1..432: note = source = /note="Description of Artificial Sequence: Synthetic coding sequence"
  source 1..432: mol_type = other DNA
atgtggctgcagtcactgttgctgctgggaacagtcgcatgctcaatcagtgctccagccagaagccctagcccctctacgcagccttgggaacacgtcaatgccatacaggaggcccgcaggctgttgaatttgtcacgcgatacggccgcggaaatgaacgaaactgtagaagtcatatctgagatgttcgacctgcaggaaccaacctgcctgcagactagactcgaattgtataagcaaggcctgaggggatcactcacaaagctgaagggtccactgacgatgatggcttcacattataagcagcactgccccccgacaccagagacttcttgcgccactcagatcattaccttcgagtctttcaaagaaaatcttaaagattttctgcttgtcataccgttcgactgctgggagcctgttcaggaa

SEQ ID NO: 9755 - DNA, 432 bp, synthetic construct; identical to SEQ ID NO: 9694
  misc_feature 1..432: note = source = /note="Description of Artificial Sequence: Synthetic coding sequence"
  source 1..432: mol_type = other DNA

SEQ ID NO: 9756 - DNA, 432 bp, synthetic construct
  misc_feature 1..432: note = source = /note="Description of Artificial Sequence: Synthetic coding sequence"
  source 1..432: mol_type = other DNA
atgtggctgcagagtctgctcctgctgggtacagtcgcttgttccatttccgctcccgccaggtctccatcacccagtacgcaaccctgggaacacgtcaacgctattcaagaagcacgcagacttctgaatttgagcagggataccgcagccgagatgaacgagactgtcgaagtcatttctgagatgttcgacctgcaagaacctacttgtctgcaaacaagactggaactgtacaaacagggtttgaggggcagcctcactaagcttaaaggtcctttgacaatgatggcctctcactataagcagcactgcccgcccactcctgaaacctcctgtgccacccagatcatcacgttcgagtcctttaaagaaaatctgaaagactttctcctggtcataccgttcgattgctgggagccagtgcaggag

SEQ ID NO: 9757 - DNA, 432 bp, synthetic construct
  misc_feature 1..432: note = source = /note="Description of Artificial Sequence: Synthetic coding sequence"
  source 1..432: mol_type = other DNA
atgtggctgcagagcttgctgttgcttggcaccgtggcttgttccataagcgcgcccgccagaagccctagcccctcaacacagccctgggagcatgttaatgctattcaagaggcacgtcgcctgttgaatctgtctcgagacaccgctgccgagatgaatgagacagtcgaggtgatctccgaaatgtttgaccttcaggagccgacatgcctgcagaccaggctagaactttataagcagggcttgagaggaagcttgacgaagctaaaaggtccactgacgatgatggctagccactacaagcagcactgtcccccaaccccagagacaagttgtgccactcagatcatcacattcgagtcttttaaagagaatctcaaagattttctgctcgtaattccattcgattgttgggaacccgtgcaggaa

SEQ ID NO: 9758 - DNA, 432 bp, synthetic construct
  misc_feature 1..432: note = source = /note="Description of Artificial Sequence: Synthetic coding sequence"
  source 1..432: mol_type = other DNA
atgtggctccagtcactgctccttctcggcactgtcgcctgcagcatctcggctccggcgcgctcaccatcgccatcgacccaaccgtgggaacatgtgaatgcgatccaggaagctaggaggttgttgaatctcagcagagataccgctgccgagatgaacgaaactgttgaggtgatttcggagatgtttgatctgcaagagccaacctgcctccagaccaggcttgagctctacaagcaggggctgaggggatccctgaccaaactgaagggccctctcactatgatggcgtcgcattacaagcagcactgtcctccaaccccggaaacgtcctgtgcaactcagattatcactttcgagtccttcaaagaaaacctgaaggacttcctgctggtcatccctttcgactgctgggaaccagtgcaagag

SEQ ID NO: 9759 - DNA, 432 bp, synthetic construct
  misc_feature 1..432: note = source = /note="Description of Artificial Sequence: Synthetic coding sequence"
  source 1..432: mol_type = other DNA
atgtggctgcagtcactgcttcttcttggtaccgtggcatgtagcatttcagcacctgcccgctcgccatcgccatcgacccagccttgggaacatgtgaatgccattcaagaggcgcgtagacttttgaacctctcaagagataccgcagcggagatgaacgagactgttgaagtcatctcggaaatgtttgaccttcaagagcccacttgtctgcagacccggctggaactctacaagcaagggctccgcggttcccttaccaaactcaagggaccccttacgatgatggcttcgcactacaaacaacattgccccccaacccccgaaacttcgtgcgccactcagataatcacgtttgaatcctttaaagaaaaccttaaggatttcctgttggtgattcccttcgactgttgggagcccgtccaggaa

SEQ ID NO: 9760 - DNA, 432 bp, synthetic construct
  misc_feature 1..432: note = source = /note="Description of Artificial Sequence: Synthetic coding sequence"
  source 1..432: mol_type = other DNA
atgtggttgcagagcctacttctgcttggaaccgtcgcctgctccatcagcgccccagcccggagtccttcaccaagcacccaaccgtgggaacatgtcaacgccatacaggaggcgcggagactgttgaatttgtcccgcgatacagcggccgagatgaacgaaaccgtggaggttatttccgagatgttcgatctccaggagcccacctgcctgcaaacccggctcgagttatacaagcagggcttgcggggctcgctcacaaagttgaaaggcccgctgaccatgatggcctcgcattataagcagcactgccccccgacgcccgagacttcgtgtgccacgcagatcattacgttcgagagttttaaggaaaacctgaaggattttttgctagtgatcccctttgactgttgggagccagtccaagag

SEQ ID NO: 9761 - DNA, 432 bp, synthetic construct
  misc_feature 1..432: note = source = /note="Description of Artificial Sequence: Synthetic coding sequence"
  source 1..432: mol_type = other DNA
atgtggctccagtctctgctcctcctgggcactgtggcttgctcaatttcggcgcctgcacggagcccaagcccgtctacgcaaccgtgggaacacgttaatgcaatccaagaagcgaggaggctcctgaacttgtcgagagatactgcagccgagatgaacgaaaccgtggaggtcatctcggaaatgttcgaccttcaagaaccgacttgtctccaaacgcgcctggagttgtacaagcagggacttcgcggttcgctcactaagttgaagggccccctgaccatgatggccagtcattacaaacagcactgcccgcccacccctgaaaccagctgcgccactcagatcattaccttcgagagctttaaggagaatttgaaggatttcctgttggtgatcccgtttgactgctgggaaccggtgcaggag

SEQ ID NO: 9762 - DNA, 432 bp, synthetic construct
  misc_feature 1..432: note = source = /note="Description of Artificial Sequence: Synthetic coding sequence"
  source 1..432: mol_type = other DNA
atgtggctgcagtccctcctgctgttaggcactgtggcctgcagcatttctgcccccgctagaagtccaagtcccagcactcagccatgggagcacgttaatgcgatccaggaagctcggcgattgttgaatttatcaagggatacagctgctgagatgaatgaaaccgtcgaggtgataagcgagatgtttgacctccaggagcccacatgccttcagacacgccttgaattgtataagcagggcctgcggggcagtctaactaagctgaaaggccctcttaccatgatggcttcccactacaagcagcattgtccacccacacctgagacatcctgcgctacccaaattattactttcgaatcttttaaagagaatctgaaggattttctgttggtgatccctttcgattgctgggaacctgtgcaagag

SEQ ID NO: 9763 - DNA, 432 bp, synthetic construct
  misc_feature 1..432: note = source = /note="Description of Artificial Sequence: Synthetic coding sequence"
  source 1..432: mol_type = other DNA
atgtggcttcaatctttgttgcttcttggtacagtcgcttgttctatcagcgcaccagctcgtagcccaagccccagtacacaaccttgggagcatgtcaatgccattcaagaagccagaagacttttgaacttatcaagggataccgcggctgaaatgaacgagactgtggaggtgatatcagaaatgtttgaccttcaggagcccacctgcttacaaactaggctagaactctacaaacaaggtctccggggttctcttacaaagttgaaggggccccttactatgatggcaagccactataaacagcattgtccccctacacccgaaacctcgtgcgccacacagattatcaccttcgaatcattcaaggaaaacctaaaggattttttgttggttattccatttgactgctgggagcctgtgcaagaa

SEQ ID NO: 9764 - DNA, 432 bp, synthetic construct
  misc_feature 1..432: note = source = /note="Description of Artificial Sequence: Synthetic coding sequence"
  source 1..432: mol_type = other DNA
atgtggctgcagtctcttcttctgctgggaacagtcgcatgttctatttccgctcctgccagatcccctagtccttccacgcagccctgggaacacgtgaatgccatccaggaagctcggagactactgaacctgtccagagatactgctgcagaaatgaatgagactgtggaagtgatctctgagatgttcgatctgcaggaaccaacatgtctgcagacacggttggaactctataaacagggactaaggggatccctcactaaactgaaaggacctctgacaatgatggcatcccactataaacagcactgtcctccaacacctgaaacatcctgtgccactcagataatcactttcgagtcattcaaggaaaaccttaaagatttcttactcgttattcccttcgattgctgggagcccgtgcaggaa

SEQ ID NO: 9765 - DNA, 432 bp, synthetic construct
  misc_feature 1..432: note = source = /note="Description of Artificial Sequence: Synthetic coding sequence"
  source 1..432: mol_type = other DNA
atgtggcttcaatccctgcttctgctcgggactgtggcttgctcgatttcggcgcctgcgcgaagcccttcgcctagcactcagccatgggagcatgtcaacgctatccaggaggcaagaaggctcttgaatctgtctcgcgacactgcagccgaaatgaatgaaaccgtcgaggtaattagcgagatgtttgatttgcaggaacctacgtgcctccagactagacttgaactgtacaaacaaggacttaggggatcccttaccaagctgaagggacccctgacgatgatggcatcgcattacaagcaacactgtccaccgacccctgaaacctcgtgcgccacccaaatcattacttttgagtcgtttaaggagaacctgaaggatttcctcctcgtgatcccattcgactgttgggaaccagtgcaggaa

SEQ ID NO: 9766 - DNA, 432 bp, synthetic construct
  misc_feature 1..432: note = source = /note="Description of Artificial Sequence: Synthetic coding sequence"
  source 1..432: mol_type = other DNA
atgtggctgcagagtctgctcctcctaggtacggtggcctgctctatcagcgcgcctgcaaggtccccgtcccccagcacccagccgtgggaacacgtgaacgcaatccaagaggcaaggcgactgctcaatctctctagagacaccgccgccgaaatgaatgagaccgttgaagtcatttcagagatgttcgatttgcaggagccaacctgtctccagacgaggctggaactatataagcaaggtctgaggggatcactaactaagctcaaaggccctttgacgatgatggcttcacactacaagcagcattgtccccccacccctgagacctcatgtgccacccaaatcatcaccttcgaaagtttcaaagaaaatctcaaggattttctcctggtaatcccttttgactgctgggagcccgtgcaggag

SEQ ID NO: 9767 - DNA, 432 bp, synthetic construct
  misc_feature 1..432: note = source = /note="Description of Artificial Sequence: Synthetic coding sequence"
  source 1..432: mol_type = other DNA
atgtggctgcagagtctgctactacttggcacggtggcttgctccattagcgctccagcaaggtctccaagtccatctacccaaccctgggaacacgtaaacgccattcaggaagcccgtaggctgctgaacctatcaagggacaccgcagcggaaatgaatgagactgtagaggtcattagtgaaatgttcgaccttcaggaaccgacttgtctgcaaacacgtctcgagttgtataagcaggggctgcgcggttctctgacgaagctgaaaggcccactgactatgatggcgagtcattacaagcagcattgtcccccaaccccggagacttcctgcgccacccagattatcaccttcgagtcattcaaagaaaacctcaaagattttctgttagttatcccatttgactgctgggaacccgtgcaggag

SEQ ID NO: 9768 - DNA, 432 bp, synthetic construct
  misc_feature 1..432: note = source = /note="Description of Artificial Sequence: Synthetic coding sequence"
  source 1..432: mol_type = other DNA
atgtggttgcaatcgctgctcctgttgggcacggttgcctgttcaatttcagcaccagcgcgctcgccttctccttccactcaaccttgggagcatgtgaacgcaattcaggaggctcggaggcttctgaacctctcgagagatactgcagcagaaatgaatgaaaccgtggaggtgatctcggagatgtttgatctgcaggaaccgacctgtctgcaaacgcgtcttgaactgtataagcaaggcttgagaggttccctcaccaagctcaagggaccactgaccatgatggcctcacactacaagcagcattgcccaccgacccctgaaacctcctgtgcaacccagattatcactttcgaatcatttaaggagaatctgaaggatttcctgctggtgattcctttcgactgttgggagcctgtgcaggag

SEQ ID NO: 9769 - DNA, 432 bp, synthetic construct
  misc_feature 1..432: note = source = /note="Description of Artificial Sequence: Synthetic coding sequence"
  source 1..432: mol_type = other DNA
atgtggttgcagtccctcttactgttagggaccgtcgcatgcagtatctccgcccccgcccggtctccaagtccctccacacagccgtgggaacatgtcaacgccattcaggaggctcgaagattgctgaatctttcgagggacacggctgctgaaatgaacgagactgtggaggtgatttccgaaatgtttgatctgcaagagccaacttgtctgcagacgagactcgagctttacaaacaggggttgaggggctcgctgacgaaactgaaaggccctttgacgatgatggcctcccactacaaacagcattgtccaccaacccccgaaacatcctgcgccacgcagatcattactttcgagagttttaaagaaaatctgaaagatttcctgctggtcatcccatttgattgctgggagcctgtgcaggaa

SEQ ID NO: 9770 - DNA, 432 bp, synthetic construct
  misc_feature 1..432: note = source = /note="Description of Artificial Sequence: Synthetic coding sequence"
  source 1..432: mol_type = other DNA
atgtggctgcagagcctgctgctgctgggaaccgtggcttgttccatatcggcgccagcaaggtctcctagtccaagcacacagccatgggaacatgtgaacgcaatccaagaagcgaggagacttctcaacctttcgagagacactgccgctgagatgaacgagaccgtggaagtcatctctgagatgttcgatctccaagagccaacctgtctccagacaagactggagctgtataagcaggggctgagaggtagtctgaccaaactgaaaggtcctttaacgatgatggcctcgcattacaaacaacactgtcctcccaccccagagaccagttgtgcaacccaaattataaccttcgagtctttcaaggagaaccttaaggattttctcctagtgatccctttcgactgctgggagcccgtccaggag

SEQ ID NO: 9771 - DNA, 432 bp, synthetic construct
  misc_feature 1..432: note = source = /note="Description of Artificial Sequence: Synthetic coding sequence"
  source 1..432: mol_type = other DNA
atgtggctacagtctctgctgctcctgggcacagtggcatgttccatcagcgctcccgctagatcccctagcccatctacccaaccatgggaacacgttaacgcaatccaggaagctaggagactactcaacttaagcagggacacagccgctgagatgaacgaaactgtggaggtgatttctgagatgtttgatctacaggaacctacttgcctacagacccggctagagctgtacaagcagggacttaggggctccctcactaaactgaagggccccctgactatgatggcctcacactacaagcaacactgtccccctaccccagaaacctcctgtgcaacacaaatcatcacattcgagtcatttaaggagaacttaaaggacttcttgctcgtgataccttttgattgttgggaacctgttcaggaa

SEQ ID NO: 9772 - DNA, 432 bp, synthetic construct; identical to SEQ ID NO: 9653
  misc_feature 1..432: note = source = /note="Description of Artificial Sequence: Synthetic coding sequence"
  source 1..432: mol_type = other DNA

SEQ ID NO: 9773 - DNA, 432 bp, synthetic construct
  misc_feature 1..432: note = source = /note="Description of Artificial Sequence: Synthetic coding sequence"
  source 1..432: mol_type = other DNA
atgtggctacaaagcctactcctcctgggcacggtagcatgctccatctcagcaccagcccgctccccttcccccagtacccaaccctgggaacacgtcaacgccatacaggaggctagacgactgctgaatctgtcacgagatactgcagccgagatgaatgagacagtagaggtcatctccgagatgtttgatcttcaggagccaacgtgtctacagactcgcctagagctgtacaagcaaggtcttcgaggtagtttgacaaagctgaaggggcccctgacaatgatggccagccactacaagcagcactgcccccccaccccggaaaccagctgcgctacgcagattatcaccttcgaaagtttcaaggagaatttgaaggacttcctcttggttattccatttgattgctgggaaccagtgcaggag

SEQ ID NO: 9774 - DNA, 432 bp, synthetic construct
  misc_feature 1..432: note = source = /note="Description of Artificial Sequence: Synthetic coding sequence"
  source 1..432: mol_type = other DNA
atgtggctgcagtcacttctattactgggcactgtagcctgttctatctcggccccagctcgtagcccaagtccgagtacccagccatgggaacacgtcaatgcaatccaggaagcgcgaaggcttctgaacctgagcagggatacggccgctgagatgaatgaaacagtggaagttatttctgagatgttcgatctgcaggagccgacctgcctgcagaccagactcgaactttataagcaggggttgcgagggtccttgacaaaactgaaaggacctctgactatgatggcctctcattataaacagcactgtcctcctacaccagaaacttcctgtgcgacgcagattataaccttcgaatcctttaaagaaaacctgaaggatttcctgctagttatcccattcgattgttgggaaccagtccaagag

SEQ ID NO: 9775 - DNA, 432 bp, synthetic construct
  misc_feature 1..432: note = source = /note="Description of Artificial Sequence: Synthetic coding sequence"
  source 1..432: mol_type = other DNA
atgtggctccagtccctcctcctgttgggaactgtggcctgtagtatctctgccccagctagatcaccttcaccgtccacacagccctgggagcacgtgaatgctatccaggaagccagaaggcttctaaatctctctcgcgatacagccgccgagatgaatgaaactgtcgaggtgatttcagaaatgttcgacttgcaggaaccaacatgtcttcagacaaggttggaactctataagcagggactccgggggtcgcttacaaaactgaaaggaccactgacaatgatggcttcacactataaacagcattgtcctcctactcccgaaacttcttgcgctactcagatcatcacatttgagtccttcaaagaaaacctgaaagatttccttcttgtcattccctttgattgctgggaacctgtgcaggag

SEQ ID NO: 9776 - DNA, 432 bp, synthetic construct
  misc_feature 1..432: note = source = /note="Description of Artificial Sequence: Synthetic coding sequence"
  source 1..432: mol_type = other DNA
atgtggctccagagcctgcttctcttgggtactgtggcctgtagcatttccgccccggcaaggagcccctccccttcgacccaaccgtgggaacatgtgaacgcaattcaagaagcaagaagattgcttaatctgagcagagataccgcagcggaaatgaacgaaaccgtggaggtcatttcggagatgtttgaccttcaagagcctacctgtctgcagacccgccttgagctttacaagcaaggtcttagaggttcgctgaccaagctcaaagggccacttacgatgatggcatcacactacaagcaacattgtcccccaactcccgaaacttcatgcgctactcagattatcactttcgagtcatttaaggaaaatctgaaggatttcctcctggtgatcccattcgattgttgggagcctgtgcaggaa

SEQ ID NO: 9777 - DNA, 432 bp, synthetic construct
  misc_feature 1..432: note = source = /note="Description of Artificial Sequence: Synthetic coding sequence"
  source 1..432: mol_type = other DNA
atgtggcttcagtccctactgttgctgggaacggtggcttgttccatctctgcccccgctcgctcaccctctccttctactcagccttgggaacacgtgaatgcaatacaggaagcgcgcaggctccttaacctttctagggatactgccgcagaaatgaatgaaacagtggaagtcatcagtgaaatgtttgacctgcaggagcccacatgcctccagacaagactggaactctataaacaagggttacggggaagtctcacaaaactaaaaggacccctgacaatgatggcatcacattataaacagcactgcccgcctacacctgaaacttcttgcgctacacagataataacatttgagtcatttaaagaaaatctcaaagattttcttctggtcattcctttcgattgttgggaacccgtccaggag

SEQ ID NO: 9778 - DNA, 432 bp, synthetic construct
  misc_feature 1..432: note = source = /note="Description of Artificial Sequence: Synthetic coding sequence"
  source 1..432: mol_type = other DNA
atgtggcttcaatcgcttttgcttttgggtacagtggcttgcagcatatctgcccctgcccgcagcccctccccgtcaactcaaccctgggagcacgtcaacgcaatacaggaggcaagaaggctattaaatctttcgagagatacagccgcagaaatgaatgaaacggttgaagttatctccgagatgttcgatctccaagagcccacttgtctccaaaccagattagagctgtacaaacaagggcttagaggttctctaactaaacttaagggtcccttgactatgatggcatcacattataagcagcactgcccaccaactccagaaacttcatgcgccacccaaattataacattcgagtcattcaaagagaatttgaaggacttcttgctcgtcattccgttcgactgttgggagcctgtgcaagag

SEQ ID NO: 9779 - DNA, 432 bp, synthetic construct
  misc_feature 1..432: note = source = /note="Description of Artificial Sequence: Synthetic coding sequence"
  source 1..432: mol_type = other DNA
atgtggctccagtctctgctactgttggggactgtcgcttgctcgattagcgcacctgccagatccccttccccctccacacagccctgggagcatgtgaacgctatccaggaggcacgccgcctgcttaatctgtctcgggacacagcagccgaaatgaacgagaccgtagaggtgatttccgagatgttcgatttacaggagccaacctgtctgcagacaagactcgagctgtacaagcagggtctacgggggtccctcactaagcttaaggggcctctgaccatgatggctagccactacaagcagcattgtccacctactcccgagactagctgcgccacccagattatcactttcgagagtttcaaggagaatctcaaagactttcttctggtcatcccattcgactgttgggaacctgtccaggaa

SEQ ID NO: 9780 - DNA, 432 bp, synthetic construct
  misc_feature 1..432: note = source = /note="Description of Artificial Sequence: Synthetic coding sequence"
  source 1..432: mol_type = other DNA
atgtggctgcagtcgctgcttctgttgggaaccgtggcctgttcgatctcagccccagcccggagcccgtccccgagcacccagccgtgggaacacgtgaacgcgatccaggaggctcgccgactcctgaacctctcccgcgataccgcggccgaaatgaacgaaactgtggaggtcatcagcgaaatgttcgacctccaggagccaacttgccttcaaacccgcctggaactgtacaaacaaggtttgcgcggatcactgactaaactgaagggtccgctgaccatgatggcctcacactacaaacaacactgccctcctactccggagacttcatgcgccacccagattatcactttcgaatcgttcaaggaaaacctgaaggactttctgctggtgatcccgttcgattgctgggaacctgtgcaggaa

SEQ ID NO: 9781 - DNA, 432 bp, synthetic construct
  misc_feature 1..432: note = source = /note="Description of Artificial Sequence: Synthetic coding sequence"
  source 1..432: mol_type = other DNA
atgtggctgcagtcactcctgctcctcggcactgtagcctgcagtatttctgctcctgcccgctctcctagtccatctacccagccatgggaacacgtgaatgccatacaggaagcccggcgcctcctgaatctgagccgagatactgcagcagaaatgaacgagaccgtggaggtgatcagcgagatgttcgatctccaggagcctacctgcctgcagacccggctggaattgtataaacagggcctaaggggctctctgaccaaactaaagggtcctctaaccatgatggcatctcactacaaacagcactgcccgcctactcctgagacctcctgtgctactcaaataatcacatttgagtcttttaaagagaatctgaaagactttcttttggttatcccctttgactgctgggaaccggttcaagaa

SEQ ID NO: 9782 - DNA, 153 bp, synthetic construct
  misc_feature 1..153: note = source = /note="Description of Artificial Sequence: Synthetic coding sequence"
  source 1..153: mol_type = other DNA
atggcaggccctgccacacaaagtcccatgaagttaatggccttacagctgttgctgtggcattctgcattatggaccgtgcaggaggcaaaactgttacttctgaagctattactgctgaagttgctcttactaaaactactgctgctgaaa

SEQ ID NO: 9783 - DNA, 153 bp, synthetic construct
  misc_feature 1..153: note = source = /note="Description of Artificial Sequence: Synthetic coding sequence"
  source 1..153: mol_type = other DNA
atggccggccctgcaacccagagcccaatgaaactcatggcgctccaactgctgttgtggcactcggccctgtggacggtgcaggaagcaaagctgctgctgttgaaactgctgctgctgaaacttttgctgttgaagttgctgttgctcaaa

SEQ ID NO: 9784 - DNA, 153 bp, synthetic construct
  misc_feature 1..153: note = source = /note="Description of Artificial Sequence: Synthetic coding sequence"
  source 1..153: mol_type = other DNA
atggccggtccggcgactcaaagccccatgaagctgatggcactgcagctcctgctgtggcactccgcgctctggaccgtgcaagaagctaagctcttgctcttgaagttgcttctcctgaaacttttgctgctcaagttgctgcttctgaaa

SEQ ID NO: 9785 - DNA, 153 bp, synthetic construct
  misc_feature 1..153: note = source = /note="Description of Artificial Sequence: Synthetic coding sequence"
  source 1..153: mol_type = other DNA
atggccggtccagccacccagagcccaatgaagctgatggcgctgcagctcctgctctggcactcggcactgtggactgtgcaagaagcaaagctgttgttgttgaaactcctcctgcttaagttgctgcttctgaaacttctcctgctgaaa

SEQ ID NO: 9786 - DNA, 153 bp, synthetic construct
  misc_feature 1..153: note = source = /note="Description of Artificial Sequence: Synthetic coding sequence"
  source 1..153: mol_type = other DNA
atggccggaccagccacccagagccctatgaagctgatggcgctgcaactcttgctttggcattccgccctttggactgtgcaagaggctaagttgctgctcctgaagctgctgctgctgaagctcctgttgttgaaactgctgctgctcaaa

SEQ ID NO: 9787 - DNA, 153 bp, synthetic construct
  misc_feature 1..153: note = source = /note="Description of Artificial Sequence: Synthetic coding sequence"
  source 1..153: mol_type = other DNA
atggcgggacctgcaacccaatcccccatgaagctcatggcactccaactccttctctggcattcggccctttggactgtgcaggaagctaaactgcttctgcttaagttgctgcttcttaagctgttgcttctgaagctccttttgctcaag

SEQ ID NO: 9788 - DNA, 153 bp, synthetic construct
  misc_feature 1..153: note = source = /note="Description of Artificial Sequence: Synthetic coding sequence"
  source 1..153: mol_type = other DNA
atggcgggaccagctactcagtctccgatgaaattgatggccctgcagctgctcctttggcactcggcgctgtggaccgtgcaagaggcaaagttgctgctcttgaagctcctcctgctgaaactgcttctcctcaagctgttgctgctgaag

SEQ ID NO: 9789 - DNA, 153 bp, synthetic construct
  misc_feature 1..153: note = source = /note="Description of Artificial Sequence: Synthetic coding sequence"
  source 1..153: mol_type = other DNA
atggccgggccggccacccaaagtcctatgaagctgatggcactgcagttgctgctgtggcatagcgctttgtggaccgtgcaggaggccaaactcttattgctgaagctgctcctcctgaaactgctgttactgaaactgctgctccttaag

SEQ ID NO: 9790 - DNA, 153 bp, synthetic construct
  misc_feature 1..153: note = source = /note="Description of Artificial Sequence: Synthetic coding sequence"
  source 1..153: mol_type = other DNA
atggccggacccgccactcagagcccaatgaaactgatggcccttcaactgctcctgtggcactcggccctgtggaccgtgcaggaagcaaagctcctccttctcaaactgctgctgctgaagttgctcctgttgaagctgcttctgctcaag

SEQ ID NO: 9791 - DNA, 153 bp, synthetic construct
  misc_feature 1..153: note = source = /note="Description of Artificial Sequence: Synthetic coding sequence"
  source 1..153: mol_type = other DNA
atggctggaccagctacgcagtctcccatgaaacttatggctttacagctcttgttgtggcactcggctctgtggacagtgcaggaagctaaactcttacttttgaaacttttgcttttgaaacttttgcttttgaagctcctattgcttaag

SEQ ID NO: 9792 - DNA, 153 bp, synthetic construct
  misc_feature 1..153: note = source = /note="Description of Artificial Sequence: Synthetic coding sequence"
  source 1..153: mol_type = other DNA
atggccggcccggccacacagagccctatgaagctgatggccttgcagctgcttctgtggcactcggctctctggactgtgcaggaagccaaattgttattgctaaaacttctgctcttgaaactgctccttctgaagttgctgcttctcaaa

SEQ ID NO: 9793 - DNA, 153 bp, synthetic construct
  misc_feature 1..153: note = source = /note="Description of Artificial Sequence: Synthetic coding sequence"
  source 1..153: mol_type = other DNA
atggcaggccctgctacccaatctccaatgaagctaatggcactccaactgctgttgtggcattctgccttgtggaccgtccaggaggctaagctgcttttgcttaagctgctcctcctcaagctcctgctcttaaagctgctacttttgaaa

SEQ ID NO: 9794 - DNA, 153 bp, synthetic construct
  misc_feature 1..153: note = source = /note="Description of Artificial Sequence: Synthetic coding sequence"
  source 1..153: mol_type = other DNA
atggctggacctgcgacccagagcccgatgaagctcatggcactccagttgctcctctggcactcggccctctggactgtgcaagaggcgaagttgctgctcctgaagttgttgctgctgaaactcctgctgctgaagctgctcctgctcaaa

SEQ ID NO: 9795 - DNA, 153 bp, synthetic construct
  misc_feature 1..153: note = source = /note="Description of Artificial Sequence: Synthetic coding sequence"
  source 1..153: mol_type = other DNA
atggcaggccctgcgacccaatccccgatgaagctgatggccctccagctcctgctgtggcacagcgctttgtggactgtgcaggaagcgaagctcctgctcctgaagctgctgctcttgaaactgctgttgctgaaactgcttctgcttaag

SEQ ID NO: 9796 - DNA, 153 bp, synthetic construct
  misc_feature 1..153: note = source = /note="Description of Artificial Sequence: Synthetic coding sequence"
  source 1..153: mol_type = other DNA
atggcgggccctgcgacccagtcccccatgaagctgatggcccttcagcttctgctctggcacagcgccctgtggacggtccaggaggcaaagctcttgctgctcaagctgcttctgctgaagctgctgctcctaaagctccttctgttaaag

SEQ ID NO: 9797 - DNA, 153 bp, synthetic construct
  misc_feature 1..153: note = source = /note="Description of Artificial Sequence: Synthetic coding sequence"
  source 1..153: mol_type = other DNA
atggccgggcctgccacacagtccccaatgaagctcatggcactgcagctcctgctgtggcactcagcactttggaccgtccaggaggcgaagttgttgctgctcaagctactccttctgaagttgttacttctgaaactcctcctgttgaaa

SEQ ID NO: 9798 - DNA, 153 bp, synthetic construct
  misc_feature 1..153: note = source = /note="Description of Artificial Sequence: Synthetic coding sequence"
  source 1..153: mol_type = other DNA
atggccggccctgcgacccagtcacccatgaagctgatggcacttcagctgctgctgtggcacagtgccctctggacagtgcaggaggccaagctgctattactgaagctgctactcctcaagctcttgctgctgaaacttctgcttttaaag

SEQ ID NO: 9799 - DNA, 153 bp, synthetic construct
  misc_feature 1..153: note = source = /note="Description of Artificial Sequence: Synthetic coding sequence"
  source 1..153: mol_type = other DNA
atggcgggcccagcgacccagtccccaatgaaactaatggccctgcagttactcttatggcacagtgctctctggaccgtgcaggaagccaagttgttactgctgaagctgcttttacttaagcttctgctgctcaaactgctcctcctgaag

SEQ ID NO: 9800 - DNA, 153 bp, synthetic construct
  misc_feature 1..153: note = source = /note="Description of Artificial Sequence: Synthetic coding sequence"
  source 1..153: mol_type = other DNA
atggcaggccccgctacacagagccccatgaaacttatggccctgcagctgctgctgtggcactctgccctgtggaccgtgcaggaagccaaacttctgttgctgaagctgctcctgcttaagctcctcctgctgaagcttctgctcctcaaa

SEQ ID NO: 9801 - DNA, 153 bp, synthetic construct
  misc_feature 1..153: note = source = /note="Description of Artificial Sequence: Synthetic coding sequence"
  source 1..153: mol_type = other DNA
atggcaggcccagcgactcaatcccctatgaagttgatggcacttcagcttctcctttggcactccgccctctggaccgtccaggaagctaagctgctgcttctgaaacttcttttgctgaagctgcttctgctcaagctcctgctgctgaaa

SEQ ID NO: 9802 - DNA, 153 bp, synthetic construct
  misc_feature 1..153: note = source = /note="Description of Artificial Sequence: Synthetic coding sequence"
  source 1..153: mol_type = other DNA
atggcaggtccagcaacgcaatcgcctatgaaactgatggcgctgcaactgctgctgtggcactccgctctttggaccgtgcaggaagcaaagctcctgcttcttaaacttcttcttctgaagctgctgcttctgaagttgctcctccttaag

SEQ ID NO: 9803 - DNA, 153 bp, synthetic construct
  misc_feature 1..153: note = source = /note="Description of Artificial Sequence: Synthetic coding sequence"
  source 1..153: mol_type = other DNA
atggcaggaccggccacccagtcccctatgaaactcatggccttgcagctgctcctttggcacagcgcgctctggactgtgcaagaggctaagttgctgctgctcaaactcctgctcctgaaattgctgctcctcaagctgctcctgctgaaa

SEQ ID NO: 9804 - DNA, 153 bp, synthetic construct
  misc_feature 1..153: note = source = /note="Description of Artificial Sequence: Synthetic coding sequence"
  source 1..153: mol_type = other DNA
atggcaggacctgcaacacaatcaccaatgaaacttatggcattacaacttcttttatggcactctgctctttggacagtacaagaagctaaacttcttttgttaaagttattattattaaaattacttcttttaaaattgttattacttaag

SEQ ID NO: 9805 - DNA, 153 bp, synthetic construct
  misc_feature 1..153: note = source = /note="Description of Artificial Sequence: Synthetic coding sequence"
  source 1..153: mol_type = other DNA
atggctggtccagcgacgcaaagcccgatgaaactcatggcactgcagttgctactctggcactctgcactatggactgtgcaggaagctaaattactcctactgaaattacttcttcttaaactgctgcttctcaagttgctgctacttaaa

SEQ ID NO: 9806 - DNA, 153 bp, synthetic construct
  misc_feature 1..153: note = source = /note="Description of Artificial Sequence: Synthetic coding sequence"
  source 1..153: mol_type = other DNA
atggcaggccccgcaacccagagccccatgaagctcatggcgctgcagcttctgctgtggcattcggccctgtggacagtgcaagaggccaaactgttgctactgaaactgcttctgcttaagcttctgttactgaagctcctgctcttgaag

SEQ ID NO: 9807 - DNA, 153 bp, synthetic construct
  misc_feature 1..153: note = source = /note="Description of Artificial Sequence: Synthetic coding sequence"
  source 1..153: mol_type = other DNA
atggctggcccagctacccaaagtcccatgaagctgatggcccttcagctcttgctctggcactccgctttgtggacagtacaagaggctaagttgctcctgctgaaacttctgctgctgaagctgctgctcctcaagctgttgctgctgaag

SEQ ID NO: 9808 - DNA, 153 bp, synthetic construct
  misc_feature 1..153: note = source = /note="Description of Artificial Sequence: Synthetic coding sequence"
  source 1..153: mol_type = other DNA
atggcaggtccagccacacagtcccctatgaaattgatggcccttcagttactattgtggcatagcgctctttggactgttcaagaagcgaaacttttacttttaaaactccttcttctcaaattacttctgcttaagctgctgttgctgaaa

SEQ ID NO: 9809 - DNA, 153 bp, synthetic construct
  misc_feature 1..153: note = source = /note="Description of Artificial Sequence: Synthetic coding sequence"
  source 1..153: mol_type = other DNA
atggccgggccagcaactcagtctcccatgaagctgatggcgttgcaattgctcctttggcactctgccctgtggaccgtgcaggaggctaagctgctgcttctcaagcttttgttgctgaaactgctcctccttaagctgctgttgctgaag

SEQ ID NO: 9810 - DNA, 153 bp, synthetic construct
  misc_feature 1..153: note = source = /note="Description of Artificial Sequence: Synthetic coding sequence"
  source 1..153: mol_type = other DNA
atggccggcccagcaacccaatcgccgatgaagctgatggcactccagctgctgctgtggcatagcgcactttggactgtgcaggaagcaaaactgctgctgttgaagctcctcctgctgaagctgcttcttctgaagttgctgcttctgaag

SEQ ID NO: 9811 - DNA, 153 bp, synthetic construct
  misc_feature 1..153: note = source = /note="Description of Artificial Sequence: Synthetic coding sequence"
  source 1..153: mol_type = other DNA
atggccggccccgccacccagtccccaatgaaactcatggcgttgcagctgctcctgtggcactctgctttgtggacagtgcaggaggccaaactcctgctgcttaaacttctgctgctgaaacttcttttgctgaaactgctcttgttgaaa

SEQ ID NO: 9812 - DNA, 153 bp, synthetic construct
  misc_feature 1..153: note = source = /note="Description of Artificial Sequence: Synthetic coding sequence"
  source 1..153: mol_type = other DNA
atggccgggccagctacccagagtcctatgaagctgatggccctgcagctgttgctgtggcatagcgctctatggaccgttcaggaggcgaagctgctgctcctcaagctgctgcttctgaagctgctgctcttgaaactcctgctgctgaaa

SEQ ID NO: 9813 - DNA, 153 bp, synthetic construct
  misc_feature 1..153: note = source = /note="Description of Artificial Sequence: Synthetic coding sequence"
  source 1..153: mol_type = other DNA
atggcgggtcctgcgactcagtcgccgatgaagttgatggccctgcaacttcttctttggcattcagcactttggacggtgcaagaagcaaagctgttgctcctgaagctgcttcttcttaagctcctgttgctgaaactcctgcttcttaaa

SEQ ID NO: 9814 - DNA, 153 bp, synthetic construct
  misc_feature 1..153: note = source = /note="Description of Artificial Sequence: Synthetic coding sequence"
  source 1..153: mol_type = other DNA
atggcgggacccgcaactcagagcccaatgaagttgatggcacttcaattgcttctgtggcactccgctctgtggacggtgcaggaggcaaaactcctgttgcttaaacttctgctgctgaagctgcttcttcttaaactcctcctgctgaaa

SEQ ID NO: 9815 - DNA, 153 bp, synthetic construct
  misc_feature 1..153: note = source = /note="Description of Artificial Sequence: Synthetic coding sequence"
  source 1..153: mol_type = other DNA
atggctggacctgcgacccagtcgccgatgaagttgatggccttgcaacttttgctgtggcactccgccttgtggactgtgcaggaagcaaaattgctgctcctcaagctgttgctgcttaaactgctcctgctcaagctcctcctgctgaag

SEQ ID NO: 9816 - DNA, 153 bp, synthetic construct
  misc_feature 1..153: note = source = /note="Description of Artificial Sequence: Synthetic coding sequence"
  source 1..153: mol_type = other DNA
atggccgggccagcaactcagtctcctatgaaactcatggcactgcagttactgctctggcactctgctctctggactgtgcaggaagcaaaactgctgttactgaaattgctcctcctgaaattgcttctgctcaaactattgctcctgaaa

SEQ ID NO: 9817 - DNA, 153 bp, synthetic construct
  misc_feature 1..153: note = source = /note="Description of Artificial Sequence: Synthetic coding sequence"
  source 1..153: mol_type = other DNA
atggcaggccccgcgacgcagtcgccgatgaagctgatggccctgcagctgctgctgtggcactccgccttgtggaccgtgcaagaagcgaaactcctccttcttaagctgctgctgctcaaactgctgctgctgaaactgctgcttctgaag

SEQ ID NO: 9818 - DNA, 153 bp, synthetic construct
  misc_feature 1..153: note = source = /note="Description of Artificial Sequence: Synthetic coding sequence"
  source 1..153: mol_type = other DNA
atggctggccctgccacccagagccccatgaagctcatggccctgcagctcctgttgtggcactcggccctctggaccgtgcaagaggccaagttgctgctcctgaaactgttgctgttgaagctgctcctgctgaaacttctgctgcttaag

SEQ ID NO: 9819 - DNA, 153 bp, synthetic construct
  misc_feature 1..153: note = source = /note="Description of Artificial Sequence: Synthetic coding sequence"
  source 1..153: mol_type = other DNA
atggcgggacccgcgacacaatcccccatgaagctgatggcactgcagttactcctctggcactccgccttgtggaccgttcaggaggccaagttgcttctgttgaaactattgctgctgaagctgctgttactgaagctcctcctattgaag

SEQ ID NO: 9820 - DNA, 153 bp, synthetic construct
  misc_feature 1..153: note = source = /note="Description of Artificial Sequence: Synthetic coding sequence"
  source 1..153: mol_type = other DNA
atggcagggcctgccacacagtcacctatgaagttgatggccttacagctccttttgtggcatagtgctttgtggaccgttcaggaggccaaattgcttttgcttaagctactgctcctgaagctgctcttgctgaagctgctcctcctcaaa

SEQ ID NO: 9821 - DNA, 153 bp, synthetic construct
  misc_feature 1..153: note = source = /note="Description of Artificial Sequence: Synthetic coding sequence"
  source 1..153: mol_type = other DNA
atggcagggccggccacccagagccctatgaaactcatggccctccagctcctgctgtggcatagcgcactctggaccgtgcaggaggcaaaactgctgctgttgaaactattgctgctgaaactgctgctccttaaacttctgctgctgaaa

SEQ ID NO: 9822 - DNA, 153 bp, synthetic construct
  misc_feature 1..153: note = source = /note="Description of Artificial Sequence: Synthetic coding sequence"
  source 1..153: mol_type = other DNA
atggcaggtcccgcaacgcagtcgccaatgaaacttatggcacttcaactcctgctctggcattccgcgctgtggaccgtccaggaagctaagctgctgctccttaagttgctcctcctcaaacttcttcttcttaagctcctgctgcttaaa

SEQ ID NO: 9823 - DNA, 153 bp, synthetic construct
  misc_feature 1..153: note = source = /note="Description of Artificial Sequence: Synthetic coding sequence"
  source 1..153: mol_type = other DNA
atggccggccccgctacgcaaagtcccatgaagctaatggccctgcagctgctgctgtggcacagcgcactgtggaccgtccaagaggccaagctgcttctgctcaaactcctcctattgaagcttctactcctaaaactattgctcctaaaa

SEQ ID NO: 9824 - DNA, 153 bp, synthetic construct
  misc_feature 1..153: note = source = /note="Description of Artificial Sequence: Synthetic coding sequence"
  source 1..153: mol_type = other DNA
atggccggcccagctactcagtcacccatgaagctcatggcgctgcagttgctcctatggcatagtgcgctgtggaccgtccaggaggccaagctgctgctgctgaagctcctcctgctgaagctcctgctgctcaagctgctactgctgaag

SEQ ID NO: 9825 - DNA, 153 bp, synthetic construct
  misc_feature 1..153: note = source = /note="Description of Artificial Sequence: Synthetic coding sequence"
  source 1..153: mol_type = other DNA
atggctggacctgccactcagtctcccatgaaactgatggcacttcagttattgctgtggcattctgcgttgtggaccgtgcaggaggccaaattgcttctgctgaaactgttgctactgaaactgcttctgcttaaattgctcctgctgaaa

SEQ ID NO: 9826 - DNA, 153 bp, synthetic construct
  misc_feature 1..153: note = source = /note="Description of Artificial Sequence: Synthetic coding sequence"
  source 1..153: mol_type = other DNA
atggctggacccgcaacccagtctccaatgaagctcatggccttacaactcctgctgtggcacagcgctctgtggacggtccaggaagccaaattgctcttgctgaagctcctcttactaaaactgctgctgctcaagctcctgcttctgaaa

SEQ ID NO: 9827 - DNA, 153 bp, synthetic construct
  misc_feature 1..153: note = source = /note="Description of Artificial Sequence: Synthetic coding sequence"
  source 1..153: mol_type = other DNA
atggcgggtccggcgacgcaatcgccgatgaaactaatggcgctacaactattattatggcattcggcgctatggacggtacaagaagcgaaattactattactaaaattactactattaaaactattactattaaaattattactattaaaa

SEQ ID NO: 9828 - DNA, 153 bp, synthetic construct
  misc_feature 1..153: note = source = /note="Description of Artificial Sequence: Synthetic coding sequence"
  source 1..153: mol_type = other DNA
atggcaggcccagccactcagagtcccatgaaactgatggccctccagctgttattgtggcatagtgcactgtggaccgtgcaggaggctaaactccttttgctgaagcttctgctcctgaagctgcttctgctcaagttgttgcttctgaaa

SEQ ID NO: 9829 - DNA, 153 bp, synthetic construct
  misc_feature 1..153: note = source = /note="Description of Artificial Sequence: Synthetic coding sequence"
  source 1..153: mol_type = other DNA
atggctggtccagctactcagagcccaatgaaactgatggccttgcagttactgttgtggcattctgccctgtggactgttcaagaggctaaacttcttctgcttaaactactgctcctgaagttactccttctaaagctgctcctccttaag

SEQ ID NO: 9830 - DNA, 153 bp, synthetic construct
  misc_feature 1..153: note = source = /note="Description of Artificial Sequence: Synthetic coding sequence"
  source 1..153: mol_type = other DNA
atggcgggacctgccacgcaatcgccaatgaaacttatggccctgcaactgttgctgtggcattcagcactttggaccgtccaggaagcgaaactccttctgctgaagctgctcctgcttaaacttctgctccttaagctgcttctgctgaaa

SEQ ID NO: 9831 - DNA, 153 bp, synthetic construct
  misc_feature 1..153: note = source = /note="Description of Artificial Sequence: Synthetic coding sequence"
  source 1..153: mol_type = other DNA
atggcggggccggccacgcagtcccccatgaaacttatggcattgcaactccttctttggcactcggcactttggactgtgcaggaagcaaagctgctcctcctgaaactgctgctgctcaagctgcttctgctcaaattgttgttgctgaag

SEQ ID NO: 9832 - DNA, 153 bp, synthetic construct
  misc_feature 1..153: note = source = /note="Description of Artificial Sequence: Synthetic coding sequence"
  source 1..153: mol_type = other DNA
atggcaggcccggctacgcagagtcccatgaagctgatggcactccaactgctgctgtggcatagtgctctctggacggttcaggaggctaaactcctgcttcttaagttgcttctgctgaaactgctgctcctgaagctcctcctgttgaag

SEQ ID NO: 9833 - DNA, 153 bp, synthetic construct
  misc_feature 1..153: note = source = /note="Description of Artificial Sequence: Synthetic coding sequence"
  source 1..153: mol_type = other DNA
atggcggggcctgcaactcagagtccaatgaaactgatggccctccagctgctcctgtggcattccgcactgtggacagtacaggaagccaagttgctgctgctgaagctgctgctgctgaagttgctactactaaagttactgcttctgaaa

SEQ ID NO: 9834 - DNA, 153 bp, synthetic construct
  misc_feature 1..153: note = source = /note="Description of Artificial Sequence: Synthetic coding sequence"
  source 1..153: mol_type = other DNA
atggccggcccagccacccaaagccctatgaagcttatggcccttcagctcctgctgtggcactccgccttatggacagtccaggaagctaagttgctcctgctcaagctgctcttactgaagctgctcctcctgaagctcctactacttaag

SEQ ID NO: 9835 - DNA, 153 bp, synthetic construct
  misc_feature 1..153: note = source = /note="Description of Artificial Sequence: Synthetic coding sequence"
  source 1..153: mol_type = other DNA
atggcgggacccgctacccaaagccccatgaaactcatggccctccagttactgctgtggcactccgctttgtggaccgtgcaggaggcaaagctgttattgctgaagctcctgcttcttaagttacttctgttgaaactcctgctgctgaag

SEQ ID NO: 9836 - DNA, 153 bp, synthetic construct
  misc_feature 1..153: note = source = /note="Description of Artificial Sequence: Synthetic coding sequence"
  source 1..153: mol_type = other DNA
atggccggacctgccacccagtctccgatgaagctgatggctctgcaacttctcctgtggcatagcgccttgtggacagtgcaagaggctaagctgctcctgcttaagctactcctccttaagctgctgcttcttaaactgctgcttctgaaa

SEQ ID NO: 9837 - DNA, 153 bp, synthetic construct
  misc_feature 1..153: note = source = /note="Description of Artificial Sequence: Synthetic coding sequence"
  source 1..153: mol_type = other DNA
atggccggacctgcaactcagtcgccgatgaagctcatggcactgcaactgctcctctggcactcagccttgtggaccgtgcaggaagcaaaactgcttttgcttaagctcctgctcctcaaactgctgctgctgaagttgctcctgctgaag

SEQ ID NO: 9838 - DNA, 153 bp, synthetic construct
  misc_feature 1..153: note = source = /note="Description of Artificial Sequence: Synthetic coding sequence"
  source 1..153: mol_type = other DNA
atggcagggcccgctactcagagcccgatgaagctgatggcactgcagctcctgctgtggcactccgccctgtggactgtgcaggaggcgaaactgctgttgttgaagctgctcctcctgaagttgctgctccttaagctgcttctgctcaag

SEQ ID NO: 9839 - DNA, 153 bp, synthetic construct
  misc_feature 1..153: note = source = /note="Description of Artificial Sequence: Synthetic coding sequence"
  source 1..153: mol_type = other DNA
atggcaggcccagccactcaaagtcccatgaaactcatggccttgcaattacttctttggcatagcgctctttggaccgtgcaagaggccaaattgctgctcctgaaacttctcctccttaagcttttgttactgaagctgctgctgctgaaa

SEQ ID NO: 9840 - DNA, 153 bp, synthetic construct
  misc_feature 1..153: note = source = /note="Description of Artificial Sequence: Synthetic coding sequence"
  source 1..153: mol_type = other DNA
atggcgggaccggccacgcagagcccgatgaagctcatggcacttcagctcttgctgtggcactccgccctttggactgtgcaagaagccaaactgctccttttgaaactgctcctcctcaaactccttctgctgaagttgctgctgctgaaa

SEQ ID NO: 9841 - DNA, 153 bp, synthetic construct
  misc_feature 1..153: note = source = /note="Description of Artificial Sequence: Synthetic coding sequence"
  source 1..153: mol_type = other DNA
atggccggcccagcgacacaatctccgatgaaacttatggcactgcagcttctcttgtggcatagcgctctctggactgtacaagaggctaagctgcttcttctcaaactcttgctcctgaaactcttgctgctcaagttgttgttgttgaaa

SEQ ID NO: 9842 - DNA, 153 bp, synthetic construct
  misc_feature 1..153: note = source = /note="Description of Artificial Sequence: Synthetic coding sequence"
  source 1..153: mol_type = other DNA
atggctggacctgccacccagtcccccatgaaactgatggcacttcaactgctcctgtggcattcggcactctggactgtgcaagaagcgaagctcttgttgcttaaactcctgctgctgaagctccttcttttgaagctgttgctgctcaag

SEQ ID NO: 9843 - DNA, 153 bp, synthetic construct
  misc_feature 1..153: note = source = /note="Description of Artificial Sequence: Synthetic coding sequence"
  source 1..153: mol_type = other DNA
atggccggaccagcaacccagtccccgatgaagttgatggccctgcaattgttgctttggcattccgctctttggaccgtccaagaagcgaagctgctgctgcttaagctgcttctgctcaaactcctccttttgaaactccttctgcttaag

SEQ ID NO: 9844 - DNA, 153 bp, synthetic construct
  misc_feature 1..153: note = source = /note="Description of Artificial Sequence: Synthetic coding sequence"
  source 1..153: mol_type = other DNA
atggctggtcccgcaactcagagccctatgaaacttatggcgctgcagctcctgttgtggcatagtgccttatggacggtccaagaagccaaactgctgctgctgaagttgctgctccttaaactgttgctgttaaagctactactcctgaag

SEQ ID NO: 9845 - DNA, 153 bp, synthetic construct
  misc_feature 1..153: note = source = /note="Description of Artificial Sequence: Synthetic coding sequence"
  source 1..153: mol_type = other DNA
atggcagggcctgctacacagtctccaatgaaacttatggctctccaactacttctctggcactctgctctctggactgttcaggaagccaaacttcttctattaaaactgttactgttaaaactcctgctcttgaagctcctattgctaaaa

SEQ ID NO: 9846 - DNA, 153 bp, synthetic construct
  misc_feature 1..153: note = source = /note="Description of Artificial Sequence: Synthetic coding sequence"
  source 1..153: mol_type = other DNA
atggcgggtcctgctacccaatcacctatgaagctgatggcactccagctgcttctttggcacagcgccttgtggacagtccaggaagcaaagctactcctgctgaagctattacttcttaaactcctgctgttgaagctgctcctcttgaaa

SEQ ID NO: 9847 - DNA, 153 bp, synthetic construct
  misc_feature 1..153: note = source = /note="Description of Artificial Sequence: Synthetic coding sequence"
  source 1..153: mol_type = other DNA
atggctgggccagccacacaaagccccatgaagctaatggcgttgcaactgctcctctggcactccgccttgtggaccgtgcaggaggccaagttactcctgcttaagttgcttctgcttaaactcctgctcttgaaactgctcctactgaag

SEQ ID NO: 9848 - DNA, 153 bp, synthetic construct
  misc_feature 1..153: note = source = /note="Description of Artificial Sequence: Synthetic coding sequence"
  source 1..153: mol_type = other DNA
atggccggaccggcgactcagtctcccatgaaactcatggcgctgcagttgcttttgtggcactctgcgctttggacggtgcaggaagccaagctgctcctcctgaagctcctactgctgaaactgctgctgctgaagttgttgttgctgaaa

SEQ ID NO: 9849 - DNA, 153 bp, synthetic construct
  misc_feature 1..153: note = source = /note="Description of Artificial Sequence: Synthetic coding sequence"
  source 1..153: mol_type = other DNA
atggccggacccgcaacacagtcaccaatgaaactcatggcattacagcttctcctgtggcactcagccctttggacagtgcaggaagccaaactactcttgctgaagctgttgctgcttaaactgttactcttaaaactcctcttactgaag

SEQ ID NO: 9850 - DNA, 153 bp, synthetic construct
  misc_feature 1..153: note = source = /note="Description of Artificial Sequence: Synthetic coding sequence"
  source 1..153: mol_type = other DNA
atggctgggcctgccacgcaatctcctatgaagcttatggccctccagctgctgctgtggcatagtgctttgtggacagtgcaagaggctaaactactgctcctaaaactgctgctgttgaagctcctgcttctcaaactactgctcttgaaa

SEQ ID NO: 9851 - DNA, 153 bp, synthetic construct
  misc_feature 1..153: note = source = /note="Description of Artificial Sequence: Synthetic coding sequence"
  source 1..153: mol_type = other DNA
atggccggaccggcaactcagtccccaatgaaactgatggctttgcagttgctgctgtggcactcggcgctttggaccgtgcaagaagccaagctcctgctcctgaagctgctgcttctgaagttgctcctgctgaaactcctcctgctcaag

SEQ ID NO: 9852 - DNA, 153 bp, synthetic construct
  misc_feature 1..153: note = source = /note="Description of Artificial Sequence: Synthetic coding sequence"
  source 1..153: mol_type = other DNA
atggctgggccagcaactcaatcgcctatgaaactgatggcgctccaactgctgctgtggcacagcgcactgtggaccgtccaggaagcaaagctcctcttgcttaaacttcttctccttaaactccttcttctgaaattgctgctgctgaag

SEQ ID NO: 9853 - DNA, 153 bp, synthetic construct
  misc_feature 1..153: note = source = /note="Description of Artificial Sequence: Synthetic coding sequence"
  source 1..153: mol_type = other DNA
atggccggaccagcgactcaaagccctatgaagctgatggccttgcagctgctgttgtggcattctgcactgtggaccgtgcaggaagctaaactccttttgctgaagttgctgctgcttaagctcctgctgctcaagctcctcttgctgaaa

SEQ ID NO: 9854 - DNA, 153 bp, synthetic construct
  misc_feature 1..153: note = source = /note="Description of Artificial Sequence: Synthetic coding sequence"
  source 1..153: mol_type = other DNA
atggctggacctgctacacagtcaccaatgaagctgatggcgctgcagctcctcttatggcacagcgctttatggactgtccaggaagccaagttgctgttgctaaagcttttgcttttaaagttactgctcctcaagctgctgctcctgaag

SEQ ID NO: 9855 - DNA, 153 bp, synthetic construct
  misc_feature 1..153: note = source = /note="Description of Artificial Sequence: Synthetic coding sequence"
  source 1..153: mol_type = other DNA
atggctggccctgcgacccagagcccgatgaagttgatggccttgcagctgctgttgtggcattcggccctgtggactgtgcaagaagcaaaactcctgctgctgaagctccttctcctgaagctgctccttctgaaactcttgctgttgaag

SEQ ID NO: 9856 - DNA, 153 bp, synthetic construct
  misc_feature 1..153: note = source = /note="Description of Artificial Sequence: Synthetic coding sequence"
  source 1..153: mol_type = other DNA
atggcgggacctgcaactcagtcacctatgaaactgatggcattgcaactgctgctttggcatagcgctctttggactgtccaagaagcaaagctcctcctgctcaagttgctcttgcttaaactgcttctgcttaagttgctcctgctgaag

SEQ ID NO: 9857 - DNA, 153 bp, synthetic construct
  misc_feature 1..153: note = source = /note="Description of Artificial Sequence: Synthetic coding sequence"
  source 1..153: mol_type = other DNA
atggcagggccagctacccagtcacccatgaaactgatggcattgcagctacttctgtggcacagtgccctctggaccgtgcaggaagctaagttgctcctgttgaagctgctgcttctgaagctgttgctcctgaaactgctgctgctcaag

SEQ ID NO: 9858 - DNA, 153 bp, synthetic construct
  misc_feature 1..153: note = source = /note="Description of Artificial Sequence: Synthetic coding sequence"
  source 1..153: mol_type = other DNA
atggccggccctgcaacccagtcccctatgaagctcatggcactgcagctgttgctgtggcactccgctctgtggacagttcaggaagctaaacttctcctgctgaagcttctgctgctaaaattactgttattgaagctcctgcttctaaag

SEQ ID NO: 9859 - DNA, 153 bp, synthetic construct
  misc_feature 1..153: note = source = /note="Description of Artificial Sequence: Synthetic coding sequence"
  source 1..153: mol_type = other DNA
atggccgggcccgcgacacagtctcctatgaagctaatggcattgcagctcttactgtggcattcggccctgtggaccgtgcaagaggcaaagctgttactattgaagcttctgttgttgaagctgctgctcctcaaactgttgctcctcaag

SEQ ID NO: 9860 - DNA, 153 bp, synthetic construct
  misc_feature 1..153: note = source = /note="Description of Artificial Sequence: Synthetic coding sequence"
  source 1..153: mol_type = other DNA
atggctggtccggcaacccagtccccgatgaaactgatggcgctgcaacttcttctgtggcattcggcactgtggaccgtgcaagaagcaaagctcctccttctcaaacttttgctgctgaaactgcttctgctcaaacttctgcttctgaag

SEQ ID NO: 9861 - DNA, 153 bp, synthetic construct; identical to SEQ ID NO: 9797
  misc_feature 1..153: note = source = /note="Description of Artificial Sequence: Synthetic coding sequence"
  source 1..153: mol_type = other DNA

SEQ ID NO: 9862 - DNA, 153 bp, synthetic construct
  misc_feature 1..153: note = source = /note="Description of Artificial Sequence: Synthetic coding sequence"
  source 1..153: mol_type = other DNA
atggccggccccgcaacccaaagccccatgaagctcatggccttacagctcctcctgtggcactccgctttgtggacagtgcaggaggcaaaacttcttctacttaagctgttgttactgaagttgcttttgctgaagttgctgttgctgaaa

SEQ ID NO: 9863 - DNA, 153 bp, synthetic construct
  misc_feature 1..153: note = source = /note="Description of Artificial Sequence: Synthetic coding sequence"
  source 1..153: mol_type = other DNA
atggcaggtccggccactcaatccccaatgaagttgatggcactgcagctgctcctgtggcacagtgccctgtggaccgtccaggaggccaagctgctgctcctgaaattgctccttcttaagctgctgctgttgaaacttctgctgctgaag

SEQ ID NO: 9864 - DNA, 153 bp, synthetic construct
  misc_feature 1..153: note = source = /note="Description of Artificial Sequence: Synthetic coding sequence"
  source 1..153: mol_type = other DNA
atggcaggcccagccacacagtcccccatgaaactgatggcgctgcagctgctcttgtggcactcagccctgtggacggtgcaagaagccaaattgttactgctcaaacttcttcttctgaagcttctgctcctaaagctcctgctgctcaag

SEQ ID NO: 9865 - DNA, 153 bp, synthetic construct
  misc_feature 1..153: note = source = /note="Description of Artificial Sequence: Synthetic coding sequence"
  source 1..153: mol_type = other DNA
atggccggcccagcgacccaatcaccaatgaagctcatggccctgcaactgcttctgtggcattccgccctttggactgtgcaagaagcaaaactgcttctgcttaaactcctgctcctgaagctgttgctgcttaaacttcttctgctgaag

SEQ ID NO: 9866 - DNA, 153 bp, synthetic construct
  misc_feature 1..153: note = source = /note="Description of Artificial Sequence: Synthetic coding sequence"
  source 1..153: mol_type = other DNA
atggccggacctgcaacccagtcgcctatgaaactgatggcacttcaactcctgctgtggcactcggccctgtggactgtccaagaggcaaaactgctgctccttaagctgctgcttcttaaacttcttcttctcaagttgcttctgcttaag

SEQ ID NO: 9867 - DNA, 153 bp, synthetic construct
  misc_feature 1..153: note = source = /note="Description of Artificial Sequence: Synthetic coding sequence"
  source 1..153: mol_type = other DNA
atggccggacctgcgactcagagccccatgaaacttatggcacttcagctcctcctctggcactccgccctttggaccgtgcaagaagcgaagctgcttctgctcaagctcctgctgctcaagctgctgctgcttaaacttcttcttctgaag

SEQ ID NO: 9868 - DNA, 153 bp, synthetic construct
  misc_feature 1..153: note = source = /note="Description of Artificial Sequence: Synthetic coding sequence"
  source 1..153: mol_type = other DNA
atggcaggtcctgcaacgcagtccccaatgaagttaatggcgctgcaactgctactctggcactcggctttgtggacagtccaagaggctaaactgctgcttcttaaattgctgcttcttaaactactattactcaaattgttgctgttgaaa

SEQ ID NO: 9869 - DNA, 525 bp, synthetic construct
  misc_feature 1..525: note = source = /note="Description of Artificial Sequence: Synthetic coding sequence"
  source 1..525: mol_type = other DNA
atggcccctctcggaccaactggtccgctgcctcagagctttctgctcaagtgtctggaacagatgcgcaaggtgcaggccgacggcacagctctccaggagacactgtgcgcaacacaccagctgtgtcaccccgaagaactggtcctgctgggccacgccctgggcattccacagcctcccctctcctcttgttccagtcaggccctgcagctgatggggtgtctccggcagcttcactctggcctgttcctctaccagggactgctgcaggccctggcaggaatttctcctgagcttgcccctacgcttgacactctgcagttggacaccaccgattttgccattaatatctggcagcagatggaggatctgggaatggcacctgcagttccaccaacccagggcacaatgcctgcctttacgagtgcattccagcgacgcgctggcggggtgctggtggcctctaatctccagagttttctcgaactggcatacagggcactcaggcatttcgctaaaccg

SEQ ID NO: 9870 - DNA, 525 bp, synthetic construct
  misc_feature 1..525: note = source = /note="Description of Artificial Sequence: Synthetic coding sequence"
  source 1..525: mol_type = other DNA
atggctcctctgggtccaactggtccgctcccccaatctttcctgcttaagtgcctggagcagatgagaaaggtccaagccgatggcaccgccttgcaggaaaccctttgtgcgactcatcaattgtgccatccagaagagttggttctgctgggacacgccctgggcattccgcaaccccccctcagctcctgctcatcccaggcgctccagttgatgggctgtctgaggcagttgcattccggcctcttcctgtaccaaggcctgctccaggccctggcgggtatttcccctgagctggctccaaccctcgataccctacaacttgacacgactgacttcgctatcaatatctggcaacagatggaggacctcggcatggcccctgctgtcccccctactcaaggtactatgcccgccttcacgtctgcgttccagaggcgtgctgggggcgtccttgtcgctagcaacttgcaaagcttcctggagcttgcgtaccgggcgctgcggcattttgctaagcca

SEQ ID NO: 9871 - DNA, 525 bp, synthetic construct
  misc_feature 1..525: note = source = /note="Description of Artificial Sequence: Synthetic coding sequence"
  source 1..525: mol_type = other DNA
atggccccccttggccccaccggtccattgccccaatccttccttttgaaatgcctcgaacaaatgagaaaggtgcaggccgatggtaccgctctgcaggagaccctctgcgctacacaccaattgtgccaccccgaggagctggtgctgctgggccatgcactgggaatccctcagcctcccctctcttcatgctccagccaagctcttcagcttatgggttgcttgaggcagctgcattctggtttgttcttgtaccaaggcttgttgcaggcactggctggaatctccccagagctggcccccaccctggacactctgcagttggacacaactgatttcgctatcaatatttggcagcagatggaggatcttggcatggctccagcagttccacccacccagggaaccatgcccgctttcacctcagcattccagcgtagagcaggcggtgtgcttgtagctagcaatctccaatcctttctggaactggcttatagggccctccgccacttcgctaagcca

SEQ ID NO: 9872 - DNA, 525 bp, synthetic construct
  misc_feature 1..525: note = source = /note="Description of Artificial Sequence: Synthetic coding sequence"
  source 1..525: mol_type = other DNA
atggcaccgctgggtcccacgggaccgctgccacaatcgtttctgctcaagtgcctcgagcaaatgcgaaaagtccaggctgatggcacggcactccaggaaaccctgtgtgcgactcatcagctgtgtcacccagaagagctcgtgctcctcggacacgcactcgggatcccccagccccctctgtcgtcatgctcaagccaggctctgcagctcatggggtgcttgaggcagctgcactctgggttgttcttgtaccaaggcctgctccaagcactcgctggaatatcccctgaactggccccgactctggacaccctccaattggacaccactgacttcgcgatcaacatctggcagcagatggaagatcttggcatggccccggccgtgccgccaacccaggggaccatgccagccttcacttcggccttccagcggcgcgccggaggagttctggtggcaagcaatctccaatcgtttcttgagcttgcgtaccgcgcgctgcggcatttcgctaagcca

SEQ ID NO: 9873 - DNA, 525 bp, synthetic construct
  misc_feature 1..525: note = source = /note="Description of Artificial Sequence: Synthetic coding sequence"
  source 1..525: mol_type = other DNA
atggcgccgctaggtccgacgggtccgttaccgcaatcgtttttactaaaatgtttagaacaaatgcgaaaagtacaagcggatggtacggcgttacaagaaacgttatgtgcgacgcatcaattatgtcatccggaagaattagttttactaggtcatgcgttaggtataccgcaaccgccgttatcgtcgtgttcgtcgcaagcgttacaactaatgggttgtttacgacaactacattcgggtctatttctatatcaaggtctactacaagcgttagcgggtatatcgccggaactagcgccgacgttagatacgctacaactagatacgacggattttgcgataaatatatggcaacaaatggaagatctaggtatggcgccggcggttccgccgacgcaaggtacgatgccggcgtttacgtcggcgtttcaacgtcgagcgggtggtgttttagtagcgtcgaatttacaatcgtttttagaactagcgtatcgtgcgttacgtcattttgcgaaaccg

SEQ ID NO: 9874 - DNA, 525 bp, synthetic construct
  misc_feature 1..525: note = source = /note="Description of Artificial Sequence: Synthetic coding sequence"
  source 1..525: mol_type = other DNA
atggccccactgggtcctacggggcccctgccccagtccttcctgctgaaatgtctcgaacagatgcgtaaggtccaagcggacggaaccgcactgcaagaaaccctgtgcgctacccaccaactttgccaccctgaagagctggtgcttctcggacatgccctcggaatcccacagccgccgctgtcaagctgctcgagtcaggccctgcaactcatgggctgcttgaggcagctccattcaggcctgttcctctaccagggcctgctgcaggccctcgcaggcattagcccagagctcgcgcctacccttgacacgttgcaactggacacgaccgattttgctataaacatctggcaacagatggaggatctcggaatggccccagccgtgcctcccactcagggaactatgccagcctttacctccgccttccagcgccgggcgggtggagtcctggtggcctcgaatctgcaatcgttcctcgaacttgcatacagagcgctccgccacttcgcgaagcct

SEQ ID NO: 9875 - DNA, 525 bp, synthetic construct
  misc_feature 1..525: note = source = /note="Description of Artificial Sequence: Synthetic coding sequence"
  source 1..525: mol_type = other DNA
atggctccactgggacctacggggccactcccacagagctttctgctgaaatgtttggagcagatgaggaaagtgcaagccgacgggactgctctgcaggaaacactgtgtgccacccatcagctgtgtcaccccgaggaactggtgttgttgggccacgctctgggcattccgcagccgcccctgtcatcctgctcctctcaggccctgcagttgatgggttgtctgcgacagcttcactcgggcctgttcctctaccagggcctactgcaggccctcgctggaatatcacctgagctggccccaaccctcgacaccctccagctggacactaccgatttcgccattaatatatggcagcagatggaggatttagggatggccccagcggtgccacccacgcaagggaccatgcctgcattcacatccgccttccagcgccgtgcagggggcgtgctggtggcaagtaatctccagtccttcttagagttggcatatcgagccctccgtcacttcgccaagccc

SEQ ID NO: 9876 - DNA, 525 bp, synthetic construct
  misc_feature 1..525: note = source = /note="Description of Artificial Sequence: Synthetic coding sequence"
  source 1..525: mol_type = other DNA
atggccccactgggacctactggaccattgccccagagctttcttcttaaatgtctggagcagatgagaaaggtgcaggctgatggtactgcattgcaagaaactctttgcgcgacccaccagctctgccatccagaggaactggtgctcctcggacatgccctgggaatcccacaaccaccactgagctcatgttcatcgcaggctctgcagctgatgggctgcctgagacagctgcatagcggactgttcctgtaccagggcctcctgcaggccctggccggaatcagcccagaactggccccaaccctcgacaccctccagctcgacactaccgacttcgccatcaacatctggcagcagatggaggacttgggaatggcgccagcggtgccgccgacccaggggactatgcctgccttcacctcagccttccagagacgcgccggcggagtccttgtcgcttccaacctgcaatcgttcctggaactcgcgtaccgggctctgcgccacttcgcgaagccg

SEQ ID NO: 9877 - DNA, 525 bp, synthetic construct
  misc_feature 1..525: note = source = /note="Description of Artificial Sequence: Synthetic coding sequence"
  source 1..525: mol_type = other DNA
atggcccccctcggtcccaccggccccctgccacagtctttcctgctgaagtgtttggagcagatgcggaaagtgcaagcagacggcaccgcgctgcaggagactctgtgcgccacccatcagctgtgtcaccctgaggaactggtactcttaggccacgcgcttgggataccccagccacctctgtcctcttgcagctcccaggcccttcaacttatgggttgccttagacagctgcatagtgggttgttcttgtatcagggtcttctgcaggctttggcggggatttctcccgagctggcccctaccctggacaccctgcagctagatacaacagacttcgctatcaacatctggcagcagatggaggatctgggtatggccccagccgtgcctccaacccaggggactatgcctgcttttacaagcgctttccagagacgggccggaggcgtgctagttgcctccaacctgcagtctttcctcgagcttgcctaccgcgcactgagacacttcgccaaacct

SEQ ID NO: 9878 - DNA, 525 bp, synthetic construct
  misc_feature 1..525: note = source = /note="Description of Artificial Sequence: Synthetic coding sequence"
  source 1..525: mol_type = other DNA
atggcaccgctgggtccaacgggcccacttcctcagtcgttcttgcttaagtgcctggaacagatgcggaaagtccaagcagacggaaccgcactgcaggaaacgctttgcgctacccatcaactgtgtcaccctgaagaacttgtcctccttggccatgcactcggtattcctcaacctcccctctcgagctgcagcagccaggctttgcaactgatgggttgccttaggcagttgcatagcgggctgtttctgtaccagggcctccttcaagccctggcgggaatctccccggaacttgcccccactctcgatactctgcagcttgatacgacggatttcgcgatcaatatctggcaacagatggaggatctgggtatggcaccagctgtccctcccactcaagggaccatgcctgcatttacctcggcctttcaacgtagggcgggaggcgtgctcgtggcatcaaatctccagagcttcctggagcttgcatacagagcccttcgccacttcgccaagccg

SEQ ID NO: 9879 - DNA, 525 bp, synthetic construct
  misc_feature 1..525: note = source = /note="Description of Artificial Sequence: Synthetic coding sequence"
  source 1..525: mol_type = other DNA
atggcaccccttggacctacgggtccacttccacagtctttcttgctgaagtgtctcgaacagatgcgcaaggtgcaggcagatggcactgccctgcaagaaactctgtgtgcaacccaccaactctgccatcccgaagaacttgtcctccttggacacgcactgggaatcccacagcctcctctcagctcctgctcctcccaggcacttcagcttatgggttgcctcagacagcttcattcagggctctttctgtatcaaggccttcttcaagctctggcaggcatcagccctgagctggcacctaccctggatactcttcagctggatactaccgattttgcgattaacatatggcagcaaatggaagatctgggtatggctcccgcagtcccacctacccaaggtacgatgcctgcatttacttcggcctttcaaaggcgtgcaggtggcgtcctcgtcgccagcaaccttcaatcattccttgagttggcatacagagcgcttagacattttgcaaaacct

SEQ ID NO: 9880 - DNA, 525 bp, synthetic construct
  misc_feature 1..525: note = source = /note="Description of Artificial Sequence: Synthetic coding sequence"
  source 1..525: mol_type = other DNA
atggcccctctggggccaactggcccactgccacagtcgttcctcctgaaatgcctggaacagatgaggaaggtgcaggcggatggtaccgcactgcaggaaaccctgtgtgcaacgcaccagctctgccaccccgaagagttggtgctcctcggacatgcgctcggaataccccaaccgcccctctcatcatgctcaagccaagcacttcagctgatgggatgcctcagacaactccactccggactgttcctgtaccagggccttttgcaagcactcgcgggtatctctcctgaattggctccaactctggacactctgcagttggatactaccgactttgccatcaacatttggcaacagatggaggacctcgggatggcgccggccgtcccgccgacccaaggaaccatgccggccttcacttctgccttccagagacgggccggtggcgtgctggtagcttcgaatctgcagtcgtttctggagctggcctaccgagcgctgcggcatttcgccaagccg

SEQ ID NO: 9881 - DNA, 525 bp, synthetic construct
  misc_feature 1..525: note = source = /note="Description of Artificial Sequence: Synthetic coding sequence"
  source 1..525: mol_type = other DNA
atggcccccctgggccctaccgggcccctgccgcagtcattcctgctgaagtgtctggagcagatgagaaaagtgcaggccgatgggaccgcgctgcaagagaccctctgcgccacccaccagctgtgccatcccgaggagttggtgttgctcggccatgctctgggcataccacagccaccgctgtcatcttgctcttcgcaagctctccaacttatggggtgtttgagacagttacacagtggcctgtttttgtaccagggactgctccaggccttggctggaattagccccgagcttgctcctacccttgacacactccagctggacactacagactttgcgattaacatttggcaacagatggaggacctgggcatggcacccgcagtaccccccactcaaggaacgatgcccgccttcacctccgcattccagcgtcgggccgggggggtccttgtagctagcaatctccaatcgttcctagagctcgcatatcgggctctccgccattttgcaaagccc

SEQ ID NO: 9882 - DNA, 525 bp, synthetic construct
  misc_feature 1..525: note = source = /note="Description of Artificial Sequence: Synthetic coding sequence"
  source 1..525: mol_type = other DNA
atggcaccgctcgggcctactggccccctgccccaaagtttcctcctgaagtgcctagaacagatgagaaaagtgcaggccgatggcaccgcactgcaggagaccctgtgtgctacccaccagctctgccatcctgaagagcttgtcctgttgggccatgccttaggcataccgcagccaccgctgagttcgtgcagtagccaggctttacagctgatggggtgcctgcgacaactgcactcgggacttttcctgtaccaagggctcctccaggcactggctgggatctcccccgagttggccccgaccctggatactctgcagctcgacactactgactttgctataaatatttggcagcagatggaagatcttggtatggcaccagcagtaccgcccactcaaggtactatgcctgccttcacatccgccttccagagacgagctggtggagtcttagtggccagcaacctgcagtcgtttctggaattggcctatagggcgctgaggcattttgccaagccc

SEQ ID NO: 9883 - DNA, 525 bp, synthetic construct
  misc_feature 1..525: note = source = /note="Description of Artificial Sequence: Synthetic coding sequence"
  source 1..525: mol_type = other DNA
atggcccccctgggacccactggtccactgccgcaatcctttctcctcaagtgcctcgaacaaatgcgcaaggttcaagcggatggaacggcgttgcaggaaaccctgtgcgccacccatcagctctgtcaccccgaagaactggtcttgcttgggcatgctcttggtatcccccaacctcctctctcgtcatgctcgagccaggcactgcagctcatgggatgcttgcggcaactgcattccggcttgttcctgtaccagggcctgctgcaggcccttgcaggcatcagcccggaattggcccctacgcttgacaccctgcaacttgacaccaccgactttgcgatcaacatctggcagcagatggaggacctgggcatggcgccagctgtgccaccaactcaaggtaccatgcctgccttcacctcggccttccagcgacgggcgggaggagtcctggtcgcatctaatctgcaatcgttcctcgaactggcctaccgggcccttcgccacttcgctaagcca

SEQ ID NO: 9884 - DNA, 525 bp, synthetic construct
  misc_feature 1..525: note = source = /note="Description of Artificial Sequence: Synthetic coding sequence"
  source 1..525: mol_type = other DNA
atggcgcctctcggtccgactggcccgttgccgcaatccttccttttgaagtgcctcgaacaaatgcgcaaagtgcaggctgatggtactgccctccaggaaaccctgtgcgctacccaccagctgtgtcacccggaggaactggtccttctcggccacgccctggggatcccgcaaccaccgctgtcgtcctgctcgtcgcaagccctgcagctgatggggtgccttaggcaattgcattccggcctcttcctctaccagggattgctgcaggcattggcgggaatctcaccagaactggcaccgactctcgataccttgcagctggacactacggacttcgcgatcaatatctggcaacagatggaggacctcggaatggcccctgccgttcctccaactcagggaaccatgccggcattcacgtcagcttttcagagacgggcgggaggggtgctggtggcgtcaaatctgcagtcgttcctggaactggcatacagagccctgcgccacttcgcgaagccc

SEQ ID NO: 9885 - DNA, 525 bp, synthetic construct
  misc_feature 1..525: note = source = /note="Description of Artificial Sequence: Synthetic coding sequence"
  source 1..525: mol_type = other DNA
atggcgccgctgggaccgactggtccactcccacagtcgttcctgctgaaatgcctggagcagatgcgcaaagtgcaggctgacggaacggcgcttcaggaaactctgtgcgccacgcaccaactttgccatccagaagagctggtcctgctcgggcacgccctgggcatcccgcagcccccgctctcgtcctgttcctcccaagctcttcaactgatggggtgtctgcgccaactccattcgggactttttctgtaccaaggactcctccaggcgctggccgggatctctcccgaactggcccctactctcgatacgctgcagctggacactacggacttcgccatcaacatctggcagcaaatggaagatctcggcatggccccagcggtcccaccgactcagggtaccatgccggctttcacctcagcgttccagcgccgcgccggtggcgtcctcgtggcgtccaatctgcagtcattcttggagctggcttacagggccctccggcacttcgccaagcca

SEQ ID NO: 9886 - DNA, 525 bp, synthetic construct
  misc_feature 1..525: note = source = /note="Description of Artificial Sequence: Synthetic coding sequence"
  source 1..525: mol_type = other DNA
atggccccacttggcccgacaggtcccctaccgcagagcttcctgctaaagtgcctggagcagatgcgcaaagtgcaggcggatggcaccgccctgcaggaaacgttgtgtgccacacaccaactctgccatcctgaagaactagtactgttgggtcatgcgctagggatcccacagccacctctttcttcctgcagcagtcaggccttacagctgatgggttgtctgcgacagctacatagcggcttgttcctgtatcagggactcttacaggccctggccgggatttctcctgagttggccccaacactggataccctgcagttagatactaccgacttcgccataaatatctggcagcagatggaagacctaggaatggcccccgccgtgccgccgactcaggggacgatgcccgcctttacaagcgcctttcagcgacgcgcgggcggtgtcctagtggcgtctaacctgcagtccttcttggaactggcgtatcgagcgttgcggcactttgctaagccg

SEQ ID NO: 9887 - DNA, 525 bp, synthetic construct
  misc_feature 1..525: note = source = /note="Description of Artificial Sequence: Synthetic coding sequence"
  source 1..525: mol_type = other DNA
atggctccgcttgggcctactggacccctgcctcaatctttcctcctgaagtgtcttgaacagatgagaaaggtccaggcggatggaacagccctgcaggagaccctgtgcgctacccaccagctgtgccatcctgaggagctggtgctcctgggccacgctctgggaattccacaaccgcctctgagctcttgttcttcacaggcattacagctgatgggatgtcttaggcagctccactcgggattattcctgtaccagggtcttctgcaagccctggccggcatatctccggagctggcccccacactagacacccttcaacttgacacgaccgatttcgccatcaatatttggcagcagatggaagatctgggaatggccccggcggtgcccccaacccaggggacgatgccagcctttaccagtgcttttcagaggcgcgcagggggagtcctcgtagccagcaacttgcagagctttctggaactggcctacagggcccttaggcactttgccaagccc

SEQ ID NO: 9888 - DNA, 525 bp, synthetic construct
  misc_feature 1..525: note = source = /note="Description of Artificial Sequence: Synthetic coding sequence"
  source 1..525: mol_type = other DNA
atggcccccttgggccccactggccccctgcctcagtcgttcctgttaaagtgtctggagcagatgcggaaagtgcaagccgatggaacagctttgcaggaaaccctctgcgcaactcaccagctgtgccatccagaggaactggtcctgctagggcatgccctggggatacctcagccccctctctcctcttgtagttcccaggccctgcagctgatgggctgcctgcggcagttgcacagtggtctgttcttataccagggactgctgcaggccttggccggaatcagcccagagctggcccccacactagatacccttcagttagatacgacggacttcgcaattaacatctggcagcagatggaggacctgggtatggctccagccgttccacccacacagggcaccatgccggcttttactagcgccttccagagacgcgctggaggggtgttagttgcatcgaacctacaatcttttctggagctcgcatatcgggcgcttcgccattttgcgaagccg

SEQ ID NO: 9889 - DNA, 525 bp, synthetic construct
  misc_feature 1..525: note = source = /note="Description of Artificial Sequence: Synthetic coding sequence"
  source 1..525: mol_type = other DNA
atggccccactgggaccgacggggccgcttccacagtcctttctgctcaagtgcctcgagcagatgcggaaagtgcaggcggatggaactgcattgcaggaaaccctctgcgctactcatcagctgtgccaccccgaagaactggtgctgctcggccacgcccttggaatcccacagcctccgttgagctcgtgttcctcccaggctctgcaacttatgggctgcctccgccaactgcactcaggactgttcctgtaccaagggctgctgcaagcactggctggaatttcgcctgaactggcaccgactttggataccctccagctcgacaccactgacttcgcgatcaatatctggcaacagatggaggacctcggcatggcaccggccgtcccaccgactcaaggaaccatgcctgccttcacctcggccttccagcggagagcgggtggtgtcctggtggcgagcaacctgcagtcatttctggagctcgcgtacagggccttgcgccatttcgccaagccc

SEQ ID NO: 9890 - DNA, 525 bp, synthetic construct
  misc_feature 1..525: note = source = /note="Description of Artificial Sequence: Synthetic coding sequence"
  source 1..525: mol_type = other DNA
atggctcccctgggaccaaccggccccctaccccagtcctttttgcttaaatgcctcgaacagatgcgcaaagttcaggcggatgggactgcacttcaggaaacgctgtgcgccacccatcagctctgccatcctgaggaactcgtcttattgggacacgccctcgggatcccccagccaccattaagcagttgcagttcgcaggccttacagctgatgggctgtctcagacagctccatagcggattgttcctataccaggggctgttacaagcccttgctggaatctctcctgagttggcgccaaccctggatacattgcagctggatacgacagacttcgcgatcaatatttggcagcagatggaggacttagggatggcccctgccgttcctcccacccagggaacaatgcccgcgttcacatcggctttccagcgtcgggccggaggagtattggtagcttcgaacctccaatcttttttagagctcgcatacagggcgctgcgacatttcgctaaaccg

SEQ ID NO: 9891 - DNA, 525 bp, synthetic construct
  misc_feature 1..525: note = source = /note="Description of Artificial Sequence: Synthetic coding sequence"
  source 1..525: mol_type = other DNA
atggcaccattgggacctacaggacccctcccccaatcttttctccttaaatgcctcgagcagatgcgcaaggtgcaggccgacggcaccgccctccaggaaaccctgtgtgctacacaccagctgtgccatccagaggaactagtgttgctgggacacgctttggggattccgcaaccccccctcagctcctgtagtagccaggctctgcagctgatggggtgcctgaggcagttgcattccgggttgtttctttaccaggggctgttgcaagcactggccgggatctcccctgagctcgctcccaccctcgatactcttcagctcgacacaactgattttgccattaatatttggcagcagatggaagatttgggaatggctccggccgtcccaccaactcaagggacaatgccggcatttacgtctgctttccagaggagggcgggaggagtcttggtggcctctaacctgcagtcatttctcgagttagcctatcgggctctgcggcactttgccaagcct

SEQ ID NO: 9892 - DNA, 525 bp, synthetic construct
  misc_feature 1..525: note = source = /note="Description of Artificial Sequence: Synthetic coding sequence"
  source 1..525: mol_type = other DNA
atggctcctctgggacccaccggacctttgccacaatcttttcttctgaagtgtctagaacagatgcgaaaagtccaggctgatggcaccgctctgcaggaaaccctttgcgctacacaccagctgtgtcaccctgaggagctggttctgctgggccatgccctgggcatcccccagcccccgctatcctcctgcagctctcaggccctacagctgatggggtgtctgaggcagcttcacagcgggctttttctgtaccaggggttactccaggcactggcaggaatcagtcccgaattggcacccactctggatacactgcagctcgatacaacggactttgccatcaacatctggcagcagatggaggatctcggcatggctccagccgtgccccccacgcagggcaccatgcctgccttcactagcgcatttcagaggcgagctggtggggtgttggtggcgagcaatttgcagtcatttctagagctggcctacagggcactgcgacactttgctaagcca

SEQ ID NO: 9893 - DNA, 525 bp, synthetic construct
  misc_feature 1..525: note = source = /note="Description of Artificial Sequence: Synthetic coding sequence"
  source 1..525: mol_type = other DNA
atggcacccttgggcccaacaggacctctaccccagtcgttcctcctgaaatgcttagagcagatgcggaaggttcaagccgacggtacagcgctgcaagagacgctgtgcgcaacccaccagctgtgtcaccccgaggaactggtgttgctcggacacgccctgggcatacctcagccacccctctcatcctgctcgtctcaagcgctccagttgatgggctgcctgagacagctgcattctggcttattcctgtaccagggacttcttcaggccctggcaggcatatccccagagctggctccaactttagatacactccagttggacacgaccgactttgctattaacatatggcagcagatggaggatctaggtatggcccccgccgtcccccctacccaggggaccatgccggctttcacgtccgcttttcaacggcgcgccggaggcgttctggtggcctctaacctgcagtcctttctcgaactggcctaccgtgcactgaggcactttgctaaacca

SEQ ID NO: 9894 - DNA, 525 bp, synthetic construct
  misc_feature 1..525: note = source = /note="Description of Artificial Sequence: Synthetic coding sequence"
  source 1..525: mol_type = other DNA
atggctcctttaggacctacaggaccactgcctcaatcttttctgctgaagtgtttggagcagatgagaaaagtccaggcagacggtaccgctttgcaagaaaccctgtgcgcaacccatcagttgtgtcatcctgaggaacttgttctccttgggcacgccctgggcatcccgcagccacccttatccagttgctcttcgcaggccctgcagttaatgggatgtctcaggcaacttcatagcggcctgtttttatatcagggactgctgcaggctctggcaggtatatctcctgaactggcccctaccctggacactttgcagctggataccacagacttcgcaataaacatctggcaacaaatggaggacctgggaatggcacccgctgtcccacctacacagggaacgatgccggcgttcacatctgcattccaaagacgggccggcggcgtgctggtggcgtcaaatcttcagagcttcctcgaattggcctacagagctctcaggcactttgccaaaccc

SEQ ID NO: 9895 - DNA, 525 bp, synthetic construct
  misc_feature 1..525: note = source = /note="Description of Artificial Sequence: Synthetic coding sequence"
  source 1..525: mol_type = other DNA
atggcacccctgggtcctaccggacctctccctcaaagtttcttgttgaaatgtcttgaacagatgcggaaagtgcaggccgacgggaccgccctccaggaaaccttgtgtgccactcatcagctctgtcaccccgaagagctggtgctcctcgggcatgctctcggcattccacagcccccccttagcagctgcagctcccaggccctccagttaatgggttgtctcagacagctccactctggactatttctataccaggggttgcttcaggccctggcaggcatatcgcccgagttagccccgacgctggacactttacagttggataccactgactttgccatcaatatatggcagcaaatggaggatctcggaatggccccggccgtgccacctacgcaaggcactatgcccgctttcacatccgccttccaacgccgtgccgggggggtgttagtagcatcaaacctgcagtcctttttggagctagcttatcgggccttgcgtcacttcgctaagccg

SEQ ID NO: 9896 - DNA, 525 bp, synthetic construct
  misc_feature 1..525: note = source = /note="Description of Artificial Sequence: Synthetic coding sequence"
  source 1..525: mol_type = other DNA
atggccccactcggaccgactggcccgcttcctcagtcctttctccttaaatgtctcgagcagatgcggaaggtccaggcggatggtacggcgctgcaagaaaccctgtgtgcgacccatcaactttgtcatcctgaggaactggtgctcctggggcatgccttgggaattcctcagcccccactgagttcgtgctcctcccaagccctgcaactcatggggtgtttgagacagctccactctggtcttttcttgtaccagggactccttcaagcccttgccggtatctcgccggaacttgcacctactctcgacactctgcaactggacaccactgatttcgcaattaacatctggcagcaaatggaggatctcggaatggcacctgccgtcccacccacccaaggaacgatgccggcatttacctcggcatttcagcgacgcgcaggcggcgtgcttgttgcttctaatctgcagagctttcttgaactggcgtaccgtgcattgcgacatttcgcgaagccg

SEQ ID NO: 9897 - DNA, 525 bp, synthetic construct
  misc_feature 1..525: note = source = /note="Description of Artificial Sequence: Synthetic coding sequence"
  source 1..525: mol_type = other DNA
atggctcccctggggcctaccggaccgcttccacagagctttttattgaaatgtctggagcagatgaggaaggtgcaggccgacggaactgccctgcaggaaacactgtgcgctacacaccagctgtgccacccagaagagctggttcttctggggcacgcccttggcattcctcagcctccactcagttcctgtagcagccaggctctgcagcttatggggtgtctgcggcagcttcattctggtctatttctctaccagggcctccttcaggctcttgccggtatcagtcccgaattagcccccaccctcgatacattacaacttgatacaactgacttcgcaattaacatatggcagcagatggaagatcttggaatggctccagcagtgccacctacacaaggtaccatgcccgcttttacctctgcctttcagcgcagagccgggggcgtccttgtggcctccaacctgcaatcctttttggaattggcctatcgggcgttaagacatttcgctaagccc

SEQ ID NO: 9898 - DNA, 525 bp, synthetic construct
  misc_feature 1..525: note = source = /note="Description of Artificial Sequence: Synthetic coding sequence"
  source 1..525: mol_type = other DNA
atggcgcctcttggaccgaccggaccgctgccgcaatcatttctcctcaagtgcctcgaacagatgagaaaagtgcaggccgacggaactgctctccaagaaaccctgtgcgcgacgcatcagctctgccacccagaagagctggtgctgctgggccacgctctcggaatcccgcagccgccactctcctcgtgctcgtcgcaagccctgcagctcatgggatgcttgcgccagctgcacagcggactgtttctctaccagggactcctgcaagcgctggctggcatctccccggaactggcgccgaccctcgacaccctgcaactcgacactactgatttcgccatcaatatctggcaacagatggaggacctgggaatggcgccagccgtcccacctacccaggggactatgccggctttcacctcggccttccagcggcgggcaggaggagtgcttgtggcgagtaacctgcaatcattcctggagctggcataccgggctctgcgacacttcgcgaagccg

SEQ ID NO: 9899 - DNA, 525 bp, synthetic construct
  misc_feature 1..525: note = source = /note="Description of Artificial Sequence: Synthetic coding sequence"
  source 1..525: mol_type = other DNA
atggcgcccttaggtcccaccggccctctgcctcagagctttctcttaaagtgcctggaacagatgcgaaaggtgcaagcagatggaacagccttgcaggaaactttatgtgccacgcaccagttatgtcatcccgaagagctggtgttgttaggccatgctcttggaatcccccagcccccgctaagttcatgttctagtcaggccctgcagcttatgggctgcctgaggcagctgcatagtggactgttcctctatcagggactcttgcaggctctcgcgggaattagtccagagctcgcccctactctggatactttgcagctggacactactgacttcgccattaacatttggcaacaaatggaggatcttggaatggcgcccgccgtaccaccgacacaaggcaccatgccagccttcacgagtgctttccagcggcgtgccggcggagttctggttgcctctaacctccagtccttcctggagctggcgtatagagctttgcgtcacttcgcaaagcct

SEQ ID NO: 9900 - DNA, 525 bp, synthetic construct
  misc_feature 1..525: note = source = /note="Description of Artificial Sequence: Synthetic coding sequence"
  source 1..525: mol_type = other DNA
atggcgccgttgggccctactggacctctgcctcaatcctttctgctgaagtgcttggagcaaatgagaaaggtccaggctgacgggaccgctttgcaggaaacattgtgtgccacccaccaactctgtcatccagaagagctagtactgttaggtcatgcactgggtataccacagcccccactgtctagttgtagtagccaggcgcttcagctgatgggctgtcttaggcagctccacagcgggctcttcttgtaccagggcctacttcaggcgttggctgggatcagccctgaattggcaccaaccttggatactctgcagctggatactactgactttgccataaacatctggcagcagatggaagacttaggtatggcaccagcagtcccacctacacaaggaaccatgcccgcttttaccagcgcttttcagaggcgagcgggaggggtccttgtagcatctaatttgcagagtttccttgaattagcttaccgggcgttgagacacttcgccaagccg

SEQ ID NO: 9901 - DNA, 525 bp, synthetic construct
  misc_feature 1..525: note = source = /note="Description of Artificial Sequence: Synthetic coding sequence"
  source 1..525: mol_type = other DNA
atggcccctctgggccctacaggacccctcccgcagtcctttcttctgaaatgcctcgaacagatgagaaaagttcaggctgacgggacagccctccaggagaccttgtgcgccacccaccagctgtgtcatccagaggagcttgtcctgcttggtcacgcgctgggaattcctcagccacctctgtcctcatgcagctcccaggctcttcaactgatggggtgtcttagacagcttcattccggactgtttttgtatcaaggattactgcaggcactcgccggaatctctccggagttggctccgacacttgataccctgcaacttgacacaaccgacttcgctatcaatatttggcaacagatggaggacttgggcatggcccctgcagtgcctcctacccaaggtacaatgccagcatttacaagtgcatttcagagaagagctggaggagtactcgtcgcaagcaaccttcagtccttcctcgaactggcatacagggctctgaggcatttcgcaaaacct

SEQ ID NO: 9902 - DNA, 525 bp, synthetic construct
  misc_feature 1..525: note = source = /note="Description of Artificial Sequence: Synthetic coding sequence"
  source 1..525: mol_type = other DNA
atggctcctctgggacctactggacctcttccacagtcgtttctcctgaaatgcctggagcaaatgcggaaagtgcaagcggacggtaccgcccttcaagaaaccctgtgtgccacgcatcagctgtgtcatcccgaagaattggtcctgcttggacatgcactcggtattcctcaacctccacttagctcatgcagcagccaggccctgcaactcatggggtgccttcggcagctgcatagcggtctgtttctgtaccaaggtcttttgcaggcacttgctggcatttcgcctgagcttgccccgactctggacactcttcagctggacaccaccgattttgcgattaacatctggcaacagatggaggatcttggaatggctccagcagtcccaccaactcagggcactatgcccgcctttacttccgcgtttcagcggcgagcagggggagtgttggttgcgagcaatctgcaatcatttcttgaactggcgtaccgtgcactccgtcacttcgccaagccc

SEQ ID NO: 9903 - DNA, 525 bp, synthetic construct
  misc_feature 1..525: note = source = /note="Description of Artificial Sequence: Synthetic coding sequence"
  source 1..525: mol_type = other DNA
atggccccactcggcccgactggaccgctgccgcagagctttctgctgaagtgcctcgagcagatgcgaaaagtgcaagccgacggaactgcattgcaggaaactctgtgcgcaacccaccagctttgtcatccagaagaacttgttctgctgggacatgctctggggatcccgcagccacccctctcgtcatgctcgtctcaggcactgcagttgatgggatgcctcagacagctccactccggactgttcctgtatcaggggttgctgcaggctctggccggcattagcccagagctcgcgccgaccctcgacacgctgcaactcgacactacggatttcgctatcaatatctggcagcagatggaagatctcgggatggctccggcggtccctccgacccaaggaaccatgccagctttcaccagtgcgttccaacgtcgggcgggtggcgtgctggtggccagcaacctccagtcgttcctcgagctggcgtaccgcgccctgcggcattttgcaaagccg

SEQ ID NO: 9904 - DNA, 525 bp, synthetic construct
  misc_feature 1..525: note = source = /note="Description of Artificial Sequence: Synthetic coding sequence"
  source 1..525: mol_type = other DNA
atggctccacttggcccgaccggaccgctgccgcagtccttcctgctgaaatgccttgaacaaatgagaaaggtgcaggcggatggcactgccctccaggagactctgtgtgcaacccaccaattgtgccacccggaggaacttgtcctccttggacatgcactgggaatcccgcagccaccgctctcttcatgctcgagtcaggccttgcagttgatgggatgtctgcgacagctccactcaggactgttcctgtaccagggtctgctgcaggcgttggctggaatttcgccagaactcgcacctacgctggatacgctccagctggatactaccgatttcgcgatcaacatttggcagcagatggaggacttggggatggcgccagcggtccctccgactcaggggaccatgccggcattcacgtccgccttccagcgcagagctggaggggtgctggtggcctcaaatctgcaatcgtttcttgaactggcctaccgggccctgcggcattttgccaaacca

SEQ ID NO: 9905 - DNA, 525 bp, synthetic construct
  misc_feature 1..525: note = source = /note="Description of Artificial Sequence: Synthetic coding sequence"
  source 1..525: mol_type = other DNA
atggcacctctcggacccactggacccctgccacagagctttctcctgaaatgtcttgaacaaatgcgcaaggtgcaggcagatggaaccgcactccaggagactctttgtgctacccaccagctttgccacccagaagaactggtgctgcttgggcatgcgctcggcatcccacaaccgccccttagttcatgttcgagccaagcactccagctgatgggatgccttcggcagcttcattcgggcctctttttgtaccagggcctcctccaggcactggccggcatttctccagaactggcgcctacccttgatactctgcaattggacactaccgactttgccattaacatctggcaacaaatggaggatctgggaatggcccctgcagtgccccctacccaaggaacgatgcctgcattcacctcggccttccagcgaagggcaggtggagttctggtagcatcaaatcttcaatcatttctggagcttgcctatagggctcttagacatttcgcaaagcct

SEQ ID NO: 9906 - DNA, 525 bp, synthetic construct
  misc_feature 1..525: note = source = /note="Description of Artificial Sequence: Synthetic coding sequence"
  source 1..525: mol_type = other DNA
atggccccactcggaccgactggaccactcccgcaatcgttcctcctcaagtgccttgaacagatgagaaaagtccaagcggacggcactgctctgcaggagactctctgcgcgactcatcaactgtgccatcctgaggaactggtgctgctgggccatgccttggggatcccgcagccgcctttgtcctcatgctcatcgcaagctctgcaactcatgggctgcctgagacagcttcacagcggcctttttctctatcagggactgctgcaagcgctcgctggaatctcgccggagctggccccaacgctggataccctgcagctggataccaccgattttgccatcaatatctggcagcagatggaggacctgggaatggcgccagccgtcccgccgacccagggtactatgccggccttcactagcgctttccagagaagggcaggaggggtcctggtggcatcaaacctgcagtcgttccttgaactcgcctaccgcgccctgagacacttcgccaaaccg

SEQ ID NO: 9907 - DNA, 525 bp, synthetic construct
  misc_feature 1..525: note = source = /note="Description of Artificial Sequence: Synthetic coding sequence"
  source 1..525: mol_type = other DNA
atggctccgcttggacccaccggccctctgcctcagtctttcctgctgaagtgcctggaacagatgcggaaggtccaggcagacggcaccgctctgcaagagacactctgtgccacgcaccaactctgccatccagaggagctcgtgcttctgggccatgcattgggaattcctcaaccacctctctctagctgtagttcacaggccctgcagttgatggggtgtctgcgccaactgcactctgggctgtttctgtaccagggacttcttcaggccctggccggcatatccccagaactggctccaacacttgatacgttgcagctggacactaccgatttcgctatcaatatctggcagcaaatggaggaccttgggatggcccctgcggtgccgccaacccagggaacaatgcccgccttcacctccgcttttcaacgcagggctggcggtgttttggtggcatctaatctgcagtccttcctggaactggcttatcgggccttgagacatttcgcaaagcct

SEQ ID NO: 9908 - DNA, 525 bp, synthetic construct
  misc_feature 1..525: note = source = /note="Description of Artificial Sequence: Synthetic coding sequence"
  source 1..525: mol_type = other DNA
atggcgccccttgggcctaccggtcctctcccccagtcttttctgctgaaatgtctcgagcaaatgaggaaagtgcaagctgacggtaccgcattgcaggagaccctgtgtgctactcatcagctctgccaccctgaggaacttgtgctgctgggacatgctctgggaataccacaaccgcctctgagttcatgctcaagccaggctttgcagctcatgggctgcctgaggcagctgcatagcggcttgttcctataccagggtctactgcaggccctcgcaggaatttcccccgaactcgctcctactctcgatactctccagttggataccactgatttcgcaatcaacatttggcagcagatggaagatctggggatggcgcccgccgttccgccgacacagggaactatgccggctttcacttccgcttttcaaagaagggccggtggtgtgctcgtagccagcaaccttcagagctttctagaactcgcatatcgagctcttcgacactttgccaaaccc

SEQ ID NO: 9909 - DNA, 525 bp, synthetic construct
  misc_feature 1..525: note = source = /note="Description of Artificial Sequence: Synthetic coding sequence"
  source 1..525: mol_type = other DNA
atggcgcccctcggtccgactggtccccttccacaatccttcctccttaagtgccttgagcaaatgagaaaagtacaagcggatggcactgctttgcaagaaaccctgtgcgctacccatcaactttgtcacccagaagagcttgtgctgctgggccatgctctcgggatccctcaacccccactgagctcctgctcctcgcaagcgcttcaactcatgggttgtttgagacagctgcactccgggctgtttctgtaccaaggccttctccaggcactggcaggcatttcacctgagttggcaccaactctggatactctgcagctcgataccaccgacttcgcgatcaacatttggcaacagatggaggaccttggtatggcccctgccgtgccgccaacgcagggaaccatgcccgcctttacctcggcctttcagcgacgcgccgggggcgtcctggtggcatcaaatctgcagtcttttcttgaacttgcatacagggcactccgtcattttgcaaagcca

SEQ ID NO: 9910 - DNA, 525 bp, synthetic construct
  misc_feature 1..525: note = source = /note="Description of Artificial Sequence: Synthetic coding sequence"
  source 1..525: mol_type = other DNA
atggctccccttggacctacaggacccctgcctcagagcttcctgctgaagtgcctggagcagatgaggaaagtccaggcagatggtactgctctccaagaaactctgtgcgctacacaccagctgtgtcaccccgaggaactggtactcctcggacacgctttgggtattccccagccacccctttccagctgtagctcacaggcattgcagctcatgggttgcctcagacaactgcatagcggcttgttcctctaccagggcctcctgcaagctttggcaggaatatcccctgagttggccccaactcttgatactctgcagctcgacacaaccgactttgctatcaacatttggcagcagatggaagacctgggcatggctcccgcggtgccaccgacacaaggaaccatgcccgccttcactagcgctttccagagaagagccggcggcgtgctggtggcgtctaacctgcaatcttttctggagctggcttacagagcactccgccatttcgcgaagcct

SEQ ID NO: 9911 - DNA, 525 bp, synthetic construct
  misc_feature 1..525: note = source = /note="Description of Artificial Sequence: Synthetic coding sequence"
  source 1..525: mol_type = other DNA
atggcgccgctaggcccaaccggaccgctgccccagagttttttgctgaaatgcctggagcagatgcgtaaggtgcaggccgacggcaccgcgctgcaggagacactgtgcgcaacgcatcaactatgccaccccgaggaactggtgctgctgggacacgcactcggcataccccagccaccgctgagcagctgtagcagtcaggctctgcagctgatgggctgccttcggcaactgcactcaggactgtttctgtatcagggactgctgcaagctctggccggcatatccccggagctcgctcctactttggacacgctgcaactcgacaccactgactttgcaatcaacatctggcagcaaatggaggacctggggatggccccggctgtgccacccacgcaagggaccatgccggcattcacaagtgcctttcagcgacgcgccggaggcgtcttggtagctagtaatttgcaaagcttcctagagctagcctaccgtgcactgcgacatttcgccaagcct

SEQ ID NO: 9912 - DNA, 525 bp, synthetic construct
  misc_feature 1..525: note = source = /note="Description of Artificial Sequence: Synthetic coding sequence"
  source 1..525: mol_type = other DNA
atggcgccactgggcccaaccggccccctgccacagagcttccttctcaagtgcctggaacagatgcgtaaggtgcaagcagacggaaccgccctgcaggaaaccctgtgtgccactcatcagctgtgccaccccgaagagctcgtccttctcgggcatgcactgggcatcccccagcccccactgtcgtcgtgctcatcccaggcactccagctgatgggctgcctgcggcaacttcactcgggtctgttcctctaccaagggctcctgcaagctctggcaggcatcagcccggaacttgccccgacgctggatactttgcaattggataccacggactttgccataaacatctggcagcagatggaggacctcggaatggctccggcagtcccccctactcaagggaccatgcctgcgttcaccagcgcttttcagcgccgcgctggaggagtgctcgtcgcctctaacctccagtccttcttggagctggcgtacagggccttgcggcatttcgccaaaccg

SEQ ID NO: 9913 - DNA, 525 bp, synthetic construct
  misc_feature 1..525: note = source = /note="Description of Artificial Sequence: Synthetic coding sequence"
  source 1..525: mol_type = other DNA
atggctccgctagggcctactgggccccttccacagtcattccttctgaaatgtttagagcagatgaggaaagtacaggctgatgggactgccctccaggagactctgtgtgccactcaccaactgtgtcatcctgaggagctcgtgctcctcgggcatgcactagggatacctcagcccccgctgtcttcttgttcatcccaggctctgcaactgatggggtgcctgcgacagctgcactctggactcttcttgtaccaggggctacttcaggccttggctggaatctcacccgaactcgctccaactcttgacacacttcagctcgatactactgactttgctatcaacatatggcagcagatggaagacctagggatggctcctgctgtgccccccacacagggaacaatgccagcctttactagtgctttccagaggcgagctgggggagtcttagttgcaagtaatctccagtcatttcttgaactcgcttatagggcattgcgacatttcgctaaaccc

SEQ ID NO: 9914 - DNA, 525 bp, synthetic construct
  misc_feature 1..525: note = source = /note="Description of Artificial Sequence: Synthetic coding sequence"
  source 1..525: mol_type = other DNA
atggctcctttaggccctactggtccactgccacagtctttccttctaaagtgtcttgaacaaatgagaaaagttcaagctgatgggaccgcgcttcaagaaaccctttgtgctacccatcaactgtgccatcctgaggagcttgtgttacttgggcatgctttaggaatccctcaacctcccttatcctcttgctcatctcaagcattacagcttatgggatgtttaagacagcttcattcaggcctattcctttatcagggattgcttcaagcattggcgggaatatcgccagaattggccccgacactcgacaccttacaattggatacgaccgacttcgctattaatatctggcaacagatggaagatctcggcatggcacctgccgtaccccctactcagggtacgatgcctgcattcacctctgctttccaacggagagcaggtggtgtgcttgttgcgtcaaatctacagtcctttcttgaacttgcatacagagccctcaggcatttcgccaaacca

SEQ ID NO: 9915 - DNA, 525 bp, synthetic construct
  misc_feature 1..525: note = source = /note="Description of Artificial Sequence: Synthetic coding sequence"
  source 1..525: mol_type = other DNA
atggcacctctgggacctaccggacccctgccacagtcgttcctgctgaagtgccttgaacaaatgagaaaggtgcaggcagacggcaccgcactgcaggaaactttgtgtgcaactcatcaactgtgccacccagaggagctggtgctgcttggccacgcccttggaattccacaacctccactctcatcttgctcaagccaagctctgcaacttatgggttgtctcagacaacttcactcgggactgtttctgtaccagggtctgcttcaagccctggcaggaatctcgcctgagttggccccgactcttgacacccttcagctcgacactacggatttcgcgattaacatttggcaacaaatggaagatctgggcatggcaccggccgtgccccctactcagggtaccatgccagcattcacttcagcatttcagaggcgggcaggcggagtcctggtcgcaagcaatcttcagtcctttctcgaactggcatacagagcactgcgacatttcgcgaaaccg

SEQ ID NO: 9916 - DNA, 525 bp, synthetic construct
  misc_feature 1..525: note = source = /note="Description of Artificial Sequence: Synthetic coding sequence"
  source 1..525: mol_type = other DNA
atggcgcccctcggaccgaccggcccgcttccgcagagcttcctgctgaagtgccttgaacaaatgcgcaaagtccaggccgatggcaccgccctgcaagaaaccctgtgcgcaacccaccagctgtgtcatccggaggaactggtccttctgggtcacgccctgggtatcccccaaccacctctgtcctcctgctcatcacaggccctgcagctcatgggctgtctgagacagctgcattcaggcctcttcttgtaccaaggcttgctgcaagcactcgctggcatcagcccagagctggcaccgacgttggacactctccagctggataccactgatttcgctatcaacatctggcagcagatggaggacctcggcatggcaccggcggtgccaccgacgcaggggactatgccggccttcacctcagctttccaacgccgcgcgggaggagtgctcgtcgcgtcaaacctccagtccttcctggagctcgcttacagagcgctccggcacttcgcgaaacca

SEQ ID NO: 9917 - DNA, 525 bp, synthetic construct
  misc_feature 1..525: note = source = /note="Description of Artificial Sequence: Synthetic coding sequence"
  source 1..525: mol_type = other DNA
atggctcctttaggaccgacggggccattacctcaatctttcttactgaagtgtctggaacagatgcgtaaggtacaggccgacggtaccgctctacaggaaacactgtgtgctacacatcagctgtgccacccggaagaattggtcctcctcggacacgccctggggattcctcaaccccccctatcgtcatgctcatcgcaagccctacaacttatgggttgcctgcgccagttgcacagcggtttgttcctatatcaaggcttgctgcaggcactcgccggcatatctcctgagctcgctcccactctggataccttacagttggacacaactgactttgcaataaatatctggcagcagatggaggacctgggtatggcaccagccgttccccccacgcaagggacaatgcctgctttcaccagcgcattccaaaggcgggccggcggcgtgttggtcgcgagcaacctgcagagcttcctcgaattggcctaccgggcgcttagacatttcgccaagccc

SEQ ID NO: 9918 - DNA, 525 bp, synthetic construct
  misc_feature 1..525: note = source = /note="Description of Artificial Sequence: Synthetic coding sequence"
  source 1..525: mol_type = other DNA
atggcgcccctgggacccacgggtccacttccccagtcctttttgctgaaatgcttagagcagatgagaaaagttcaagccgacggaacggctctgcaggagaccctgtgtgcgactcaccaactgtgtcaccctgaagaactagtcctgctagggcatgctttgggcatcccccagccaccactgagttcctgttcctctcaagctctgcagcttatgggctgcctcaggcagctgcattccggcctttttctataccagggcctcctgcaggctcttgccggcattagcccagagttggctcccacactggatactctgcagctcgatacaacggattttgccatcaatatttggcaacaaatggaggatctcgggatggctcccgctgtgcctcccacccaggggactatgcccgcctttacctccgcctttcagaggcgcgctggaggtgttcttgtggcctctaacctccaatcctttctggaactggcgtatcgagcactgaggcactttgcgaaaccg

SEQ ID NO: 9919 - DNA, 525 bp, synthetic construct
  misc_feature 1..525: note = source = /note="Description of Artificial Sequence: Synthetic coding sequence"
  source 1..525: mol_type = other DNA
atggctcccttaggtcccaccggccccctcccccagtctttcttgctcaaatgcctagaacaaatgcgaaaggttcaggcagacggaacagctttacaagagaccctctgcgctactcatcagctgtgccaccccgaggagttagtcctgctgggacacgctctggggatcccacagccacctctgtccagttgctcgtcccaggcccttcagcttatgggatgtctccgtcaactgcactccgggctctttctctaccagggtctgctccaggccctggctggcatcagccctgaactcgctccgactctagataccctccagttggacactacggacttcgccattaatatctggcagcaaatggaggatttaggcatggcgcccgcagtgccacctacccagggaacgatgcccgcttttaccagtgctttccaaagaagggccgggggagttcttgtggctagtaaccttcagagcttcctggagctcgcgtatagggccttacgacacttcgccaaaccg

SEQ ID NO: 9920 - DNA, 525 bp, synthetic construct
  misc_feature 1..525: note = source = /note="Description of Artificial Sequence: Synthetic coding sequence"
  source 1..525: mol_type = other DNA
atggcaccattgggtcctacgggaccactgcctcagagcttcctcctgaagtgtctggaacagatgcggaaggttcaagcagatggaactgcactgcaggaaaccctttgtgctacccatcaactttgtcaccctgaagaactggtcctgctcggccatgctcttggaatcccgcaaccacctctgtcgtcatgtagctcacaggctctgcaactgatgggatgtctgcgacaattgcattccggtctgtttttgtaccaaggtctgcttcaagcactcgcaggtattagcccagaactcgcaccgaccctcgataccctgcaacttgatacgactgactttgcaattaacatttggcagcagatggaggatcttggaatggcccccgcagtcccaccaacccagggtaccatgccagccttcacttcagcctttcaaaggcgtgcagggggcgtcctggtggcgtccaacctgcagtcgttcctcgaacttgcataccgagcacttaggcattttgccaaacca

SEQ ID NO: 9921 - DNA, 525 bp, synthetic construct
  misc_feature 1..525: note = source = /note="Description of Artificial Sequence: Synthetic coding sequence"
  source 1..525: mol_type = other DNA
atggcaccactgggacctaccggacccttaccacaaagcttcttacttaagtgcctcgaacagatgcgaaaagtccaggctgatggcactgccctgcaggagacactctgcgcgactcatcagctgtgccaccccgaagagctggtcctgttgggccacgctttgggcatccctcagcctcctctttctagttgtagctcccaggctctccagttgatgggctgtttgcggcagttgcattctgggctgttcctatatcagggactgctgcaggccttagcaggaatttccccggaacttgcccctacactggacacactccagctggataccaccgatttcgcgattaatatatggcagcaaatggaagacctggggatggctcccgctgtccccccaacgcaggggacgatgcccgcgtttacaagcgctttccagagaagggccggaggggtgctagtggcctccaacctacagtctttcctggagctggcatacagagcactgagacatttcgcaaagcct

SEQ ID NO: 9922 - DNA, 525 bp, synthetic construct
  misc_feature 1..525: note = source = /note="Description of Artificial Sequence: Synthetic coding sequence"
  source 1..525: mol_type = other DNA
atggccccactcggacccaccgggcccttgccccaatccttcctactaaagtgtctagaacagatgagaaaggtgcaagcggatggcacagcactgcaggagactttgtgcgccactcatcagctctgtcatcctgaggagctagtgctgctcgggcatgcactgggtatacctcagcctccactatcttcttgttcaagccaggcgctacagctgatggggtgcttgagacaattgcatagcggcctgttcctgtatcagggcctgctgcaggccttggctggcatatcccccgaactcgcaccgaccctcgacacactgcagttggataccaccgacttcgcaatcaatatttggcagcagatggaggatcttggcatggcacctgccgtgcccccaacccaaggtacaatgcctgcctttacctcagcctttcaacggcgcgccggaggagttttggttgcctccaatctgcagtcctttctggagctcgcgtacagggccctgcggcattttgctaaacca

SEQ ID NO: 9923 - DNA, 525 bp, synthetic construct
  misc_feature 1..525: note = source = /note="Description of Artificial Sequence: Synthetic coding sequence"
  source 1..525: mol_type = other DNA
atggcccccttaggacccacggggccactgccacagtcatttctcttgaagtgtttggaacagatgaggaaagtccaggccgacgggactgcactgcaggaaacactctgtgctactcaccagctctgtcaccccgaagaacttgtgcttctggggcatgccttggggatacctcagcctcctctttcctcgtgctcatctcaggcattacagctgatggggtgcctcagacagctacactccgggctgtttctctatcagggattactccaggctctcgctggaatctctcccgaactagcacccactcttgatacactccaactcgatactacagatttcgctataaatatatggcagcagatggaagatcttgggatggcacctgcggtacctcctacacaagggacaatgcctgcttttacatctgccttccagaggcgggccggaggagtcctggtggcatctaaccttcaatcattcctagaactcgcctatcgcgcactcagacactttgctaaaccc

SEQ ID NO: 9924 - DNA, 525 bp, synthetic construct
  misc_feature 1..525: note = source = /note="Description of Artificial Sequence: Synthetic coding sequence"
  source 1..525: mol_type = other DNA
atggcaccattgggccccactggaccacttcctcagagcttcctgctgaagtgtctcgaacaaatgagaaaagtgcaggctgatgggactgcccttcaggaaaccctctgtgcaactcaccagctttgtcaccccgaagaactggtgcttcttggccacgctcttggtattccccagcctcctttgtcgtcttgcagctcacaggcactgcaacttatggggtgcctccgccaactgcattcagggctttttctttaccaaggtcttttgcaggcactcgcgggaataagcccagaactggcacctacgcttgatacgcttcaactggacactacggactttgcgattaacatttggcaacaaatggaggatctggggatggcacctgcagtgcctccaactcagggtactatgccggcctttacctcagctttccagcggcgggcaggaggggtcctggtcgcgtccaacctgcaaagttttctggagctcgcctacagagcccttcgacactttgcaaagcct

SEQ ID NO: 9925 - DNA, 525 bp, synthetic construct
  misc_feature 1..525: note = source = /note="Description of Artificial Sequence: Synthetic coding sequence"
  source 1..525: mol_type = other DNA
atggctccactggggccaacgggtcctctcccacaatcgtttcttcttaagtgcctcgagcaaatgagaaaagtgcaagcagacggtactgcattgcaagaaactctctgtgccactcatcaactttgtcatcctgaggagttggtgcttctgggccatgcactgggtatcccccaaccacctctgtcctcctgttcatcgcaagcacttcaactgatggggtgtctccgacagctccatagcggcctttttctttaccaaggactcctgcaggcgcttgccggcatctccccggaactcgctcctaccctcgacaccctgcaattggataccaccgactttgctataaacatctggcagcaaatggaagatctgggcatggctcctgcagtgccacctacccagggaaccatgccggcatttacgtcggcattccaaaggcgtgcgggtggagtgctggtggcatctaaccttcaatcgtttctggaactggcttaccgcgcactcaggcatttcgcaaagcca

SEQ ID NO: 9926 - DNA, 525 bp, synthetic construct
  misc_feature 1..525: note = source = /note="Description of Artificial Sequence: Synthetic coding sequence"
  source 1..525: mol_type = other DNA
atggcccccctgggccccaccggaccattgcctcagtcttttttactcaaatgtcttgaacagatgagaaaggtgcaagcggacggtaccgctctgcaagaaactctttgcgccactcatcaattgtgtcaccctgaggaattagtcctgcttggccacgcgttgggcatccctcagcctcccctgtcatcctgctccagccaggctctgcagctaatgggatgcctacggcagctgcattctggcctgttcctgtaccaaggcctcctccaggcattggccggaatctcaccagagctagcccccaccctggacacactacagttggatacaaccgacttcgctatcaatatctggcagcagatggaagacctcggcatggccccggcagttccgcctactcaggggacgatgcctgcttttacaagcgccttccagcggcgggcaggaggcgttctggttgcctcaaatttgcagtcttttttggaactcgcctaccgggcgcttcgccactttgcgaagcct

SEQ ID NO: 9927 - DNA, 525 bp, synthetic construct
  misc_feature 1..525: note = source = /note="Description of Artificial Sequence: Synthetic coding sequence"
  source 1..525: mol_type = other DNA
atggcacctctgggaccgacgggccccctccctcagtcattcctgctgaaatgcctggagcaaatgcgcaaagtgcaagccgatggtaccgcccttcaagagacgctgtgcgcaacccatcagctctgtcaccccgaagagctggtgcttcttggtcatgccctcggaatacctcagccaccattgtccagttgttcgtcgcaagccctgcaactgatgggctgtttgagacaattgcactctgggctttttctctaccaaggcctgctccaggcgcttgcgggtatctcccccgagctggcacctactctcgatacccttcaactggataccaccgatttcgcaattaacatttggcaacaaatggaggacctcggaatggcacctgcagtccctccgactcaaggtaccatgcctgcatttacttcggcatttcagaggcgagcgggcggtgtgctggtcgcctccaacctgcagtcattcttggaactcgcgtaccgcgctctccgccactttgcaaagcct

SEQ ID NO: 9928 - DNA, 525 bp, synthetic construct
  misc_feature 1..525: note = source = /note="Description of Artificial Sequence: Synthetic coding sequence"
  source 1..525: mol_type = other DNA
atggcccctttgggaccaactggtccgctgcctcagagcttccttttaaaatgcttggagcagatgaggaaagtgcaggctgacggtacagcactccaagagaccttatgcgccacgcatcaactctgccaccccgaagaattagtgctccttggtcatgccttgggaattcctcaaccgccgctatcttcgtgctcttcgcaggcgcttcagcttatgggatgcctccgccagctacattccgggctcttcctctatcaaggtttgctacaagcactggctggtatttcacccgagttggcacccaccctggataccctccagcttgatacaaccgatttcgcaatcaacatctggcaacaaatggaggacttgggcatggcgcccgcagttcccccgactcagggcacaatgccagcctttacaagcgcattccagagaagggccggcggcgtgctagttgcatccaacctccagtcgtttttggagctcgcttaccgcgcgttgaggcattttgcaaaacct

SEQ ID NO: 9929 - DNA, 525 bp, synthetic construct
  misc_feature 1..525: note = source = /note="Description of Artificial Sequence: Synthetic coding sequence"
  source 1..525: mol_type = other DNA
atggctccgcttggaccaactggacccctgccgcaatctttcctgcttaaatgtcttgaacaaatgcgaaaggtccaggctgacggcacggcgctccaagaaaccctgtgcgcaacccaccaactgtgccatcctgaggaactcgtccttcttgggcacgcactgggtattccgcagccgccgctctcctcgtgctcgtcacaggctctccagttgatgggttgcctccgccagctccatagtggcctgttcctctaccagggacttctgcaggcgctggctgggatctcgccggagctcgcgccgactctcgatactttgcagctcgataccacggactttgcaatcaacatttggcagcaaatggaggacctgggaatggcacctgccgtgccgccaacgcaaggtactatgccagccttcacctcggcgttccaaagaagggccggaggggtgctggtagcttcaaatctccaatcattcctcgaattggcgtaccgcgccctgcgccactttgccaagccg

SEQ ID NO: 9930 - DNA, 525 bp, synthetic construct
  misc_feature 1..525: note = source = /note="Description of Artificial Sequence: Synthetic coding sequence"
  source 1..525: mol_type = other DNA
atggcacccctgggaccaactggcccgttgcctcagagcttcctgttgaagtgcctcgagcagatgcgcaaggtccaggcagatggaactgccctgcaagaaactctctgtgcgactcaccagttgtgccatccagaagaactcgtcctgctgggacatgccttgggaatcccgcaaccacctctgtcaagctgctcaagccaagcgctccagttgatgggatgtctgcgccagctgcactcgggactgtttctctaccagggtttgctgcaggccctggccggaatcagccccgagcttgcgccaacgctcgacaccctgcaactcgacaccactgacttcgccattaacatttggcaacaaatggaggacctgggaatggcgccagctgttccacctacgcagggaaccatgccggcttttacctccgcgtttcaaagacgggcaggcggtgtgctggtggcgtccaacctgcagtccttccttgaactcgcgtaccgcgccctgcggcacttcgcgaagcct

SEQ ID NO: 9931 - DNA, 525 bp, synthetic construct
  misc_feature 1..525: note = source = /note="Description of Artificial Sequence: Synthetic coding sequence"
  source 1..525: mol_type = other DNA
atggctccactggggccaactggacccctgccccagtcctttctgctcaagtgtctggagcagatgaggaaagtgcaagcggatggtaccgcattgcaggaaactctgtgtgcaactcaccagctttgtcatccagaagaacttgtcctgcttggtcacgccctgggaattcctcaacccccgcttagctcctgctcgtcgcaggcactccaactcatgggatgcctgaggcagctgcactcgggtttgttcctgtaccagggactgctgcaggcacttgccgggatctcgcccgaacttgcaccaactctcgacaccctgcaactggacactaccgatttcgcaataaacatctggcaacagatggaagatcttggaatggcaccagcggtgccccctactcagggaaccatgcccgcatttacctcggccttccagagacgagcaggtggggtgctggtggcttcaaatcttcagtcctttctcgagctggcgtacagagcccttagacattttgccaagcca

SEQ ID NO: 9932 - DNA, 525 bp, synthetic construct
  misc_feature 1..525: note = source = /note="Description of Artificial Sequence: Synthetic coding sequence"
  source 1..525: mol_type = other DNA
atggcacctctggggcccaccggtccacttccccaatcctttctccttaagtgtcttgaacagatgagaaaggttcaggcagatggaactgccctccaagaaactctttgcgccacccaccagttgtgtcatcctgaagagctcgtcctgctgggccatgcactgggaatacctcagccgcccctttccagctgcagctcccaggccctgcagttgatggggtgcctgaggcagctccactccggactgttcttgtaccagggactgttgcaagcattggcaggcatttcgcccgaacttgcccccactctggataccctccaacttgatactactgactttgcgatcaatatctggcagcaaatggaggaccttggtatggcacctgcagtgcctccgacgcaaggtactatgcctgcttttactagtgcattccagcgccgggctggtggagtgcttgtggcaagcaacctgcagagctttctcgagcttgcgtaccgggcacttcgtcatttcgccaagccg

SEQ ID NO: 9933 - DNA, 525 bp, synthetic construct
  misc_feature 1..525: note = source = /note="Description of Artificial Sequence: Synthetic coding sequence"
  source 1..525: mol_type = other DNA
atggccccactggggcctaccggtccactgccacagagctttcttttgaaatgtctggagcagatgcggaaggtacaggctgatggaactgccctacaagaaactctgtgcgcaacccaccagttgtgtcaccccgaggagctcgtcctcctcggtcacgccctgggtatccctcagccaccattgtcgagttgttcttcccaggctctgcagctaatgggctgcctccgacagctacattccgggctttttctctaccaggggctgcttcaggctctcgctgggatctcgcccgaattggcccccacgcttgatacattgcagctggatactaccgactttgccattaatatatggcagcaaatggaagacctggggatggccccggcggtgccccctacgcaaggcacgatgcctgcattcaccagcgctttccaacggcgcgccgggggagtgctcgtggctagtaatttgcagagtttcctggaactagcctatcgggccttgcgccatttcgcgaaaccc

SEQ ID NO: 9934 - DNA, 525 bp, synthetic construct
  misc_feature 1..525: note = source = /note="Description of Artificial Sequence: Synthetic coding sequence"
  source 1..525: mol_type = other DNA
atggcacctctcggcccaaccggacctctcccccaatctttcctgctgaagtgcctcgaacagatgcgcaaggtccaagctgatggcaccgccctgcaggaaactttgtgcgcaactcatcagctctgtcaccctgaggagctggtactcctgggccatgctctgggcattccgcagcccccactgtcaagctgtagcagtcaggctcttcagctcatgggctgtttgcgccagttgcactccggactctttctgtatcaggggctgctccaggcgctggccggtatcagtccagaactcgcacccacactggacacactgcagctcgatacgaccgattttgcaattaatatctggcagcagatggaggacctgggcatggcccctgcagtaccaccgactcaaggcacaatgccggctttcaccagtgcttttcagagaagagctggaggtgtgctggtggcttcaaacctccaatcttttctcgagctggcgtaccgcgccctgcggcatttcgccaagcca

SEQ ID NO: 9935 - DNA, 525 bp, synthetic construct
  misc_feature 1..525: note = source = /note="Description of Artificial Sequence: Synthetic coding sequence"
  source 1..525: mol_type = other DNA
atggctcctctgggcccaactgggcccctgccccaaagtttcctgcttaaatgcttggaacaaatgcgtaaggtacaagctgacgggactgccctgcaggagactctgtgcgccacccatcaactatgccaccccgaagaactagttctcctgggccacgcactgggtataccacagccacccctgagtagctgcagctctcaagccctacagctaatgggatgcctgcgtcagttgcatagtgggcttttcctgtatcagggcctactgcaggcactggctggcatcagccctgaacttgctcccaccctggacactctgcagctggacacaactgattttgctattaacatctggcagcagatggaagatttaggcatggctcctgccgtcccacccacccagggtacaatgccagcttttacaagcgcctttcagaggagagccggcggggttctggtggcctcaaatctgcagtcttttctagaacttgcctacagagctctgaggcacttcgctaaacca

SEQ ID NO: 9936 - DNA, 525 bp, synthetic construct
  misc_feature 1..525: note = source = /note="Description of Artificial Sequence: Synthetic coding sequence"
  source 1..525: mol_type = other DNA
atggctccactcggacctactggtccacttcctcaatcgtttctgctgaagtgcctggagcagatgcgtaaggtgcaagcagacggcactgcactgcaggaaaccctttgtgcaactcatcaactgtgccacccggaagaacttgtgctgttgggacatgcactgggtattccgcaacctcccctttcgtcttgttcctctcaagctcttcaactgatgggatgtctgcggcaattgcattcagggctgtttctttaccaaggcctgcttcaggcgcttgcgggaatcagcccagagctcgcgcctactctggacacgctccaactggacaccacggattttgcaattaacatctggcagcagatggaagatctggggatggcgccagcagtgcccccaactcagggaaccatgcccgccttcaccagcgcattccaacgaagagcaggtggggtgcttgttgcctcaaatttgcaatcatttttggaactcgcataccgcgcgcttagacatttcgcaaaacct

SEQ ID NO: 9937 - DNA, 525 bp, synthetic construct
  misc_feature 1..525: note = source = /note="Description of Artificial Sequence: Synthetic coding sequence"
  source 1..525: mol_type = other DNA
atggccccactgggtcccacgggtccgctgcctcagtcattccttcttaagtgcctggaacaaatgcgcaaagtgcaagccgatggtaccgcgctgcaggaaaccttgtgtgcaactcatcagctttgccacccggaggagcttgttttgctgggccacgctcttgggattcctcagccgccactgagctcatgttcgtcgcaggcactgcaacttatgggctgcctgcggcagctgcatagcggattgttcttgtaccaaggattgctccaggctctcgccggcatctcgccggaattggctcccaccttggacacgctccagctggacactaccgattttgccatcaacatctggcaacagatggaggacctgggcatggcaccagctgtgcccccgacgcagggaaccatgcctgcttttacttccgcctttcaaagacgcgcaggcggagtgctcgtcgcctccaatctgcaatccttcctcgaattggcgtaccgggcccttcgacacttcgccaagccg

SEQ ID NO: 9938 - DNA, 525 bp, synthetic construct
  misc_feature 1..525: note = source = /note="Description of Artificial Sequence: Synthetic coding sequence"
  source 1..525: mol_type = other DNA
atggcaccgctaggaccgacgggcccgttgccgcaatctttccttttgaaatgccttgaacaaatgaggaaggttcaggcagacggcaccgcactacaagaaacactctgcgctacacatcaattatgccacccggaggagttggtcttgttaggtcatgctctgggtatcccgcaacctccacttagctcttgctcaagtcaagcgctccaactaatgggatgcttgagacagcttcactcaggattgttcctgtatcagggcttacttcaggccttggcgggtatctctcctgaacttgcaccgacactagatacactgcagttggatacaactgattttgcaataaacatctggcaacagatggaagatcttgggatggcacctgctgttccccctacacaaggcacgatgccggcattcacgtcagcgtttcagaggcgggcagggggagttttagtcgcaagcaacttacagtcatttcttgaattagcttatcgcgctttacggcattttgctaaaccg

SEQ ID NO: 9939 - DNA, 525 bp, synthetic construct
  misc_feature 1..525: note = source = /note="Description of Artificial Sequence: Synthetic coding sequence"
  source 1..525: mol_type = other DNA
atggcccccctagggcccaccggacccttgcctcagagcttcctgctcaaatgcctcgagcagatgcgtaaagtccaggccgatgggacagctctccaggaaacactgtgcgctacacaccagctttgtcatccagaagagttggtcttgttggggcatgctctaggaatacctcagcctccattaagcagctgttcttcccaagcactccagttgatggggtgtctgaggcagctccactccggcttattcctgtaccagggtctattgcaagcactggcaggcattagccccgaactggctccaactctagatacccttcagctcgacacaactgattttgccatcaatatatggcagcagatggaggacctcgggatggccccggctgtgccacctacgcagggcacaatgcccgctttcacctctgcgttccagcgtagagccggaggggttttggtcgcttcaaacctccagtccttcctagagttggcttatcgcgcccttcggcacttcgctaagccc

SEQ ID NO: 9940 - DNA, 525 bp, synthetic construct
  misc_feature 1..525: note = source = /note="Description of Artificial Sequence: Synthetic coding sequence"
  source 1..525: mol_type = other DNA
atggcacctcttggccccactggtcctttgccacaatcctttctcctcaagtgtctggaacagatgaggaaggtgcaagccgatggtaccgctcttcaggaaaccctctgtgcaactcatcaactgtgtcatccagaagaactggtgctgctcggacacgcacttggtattcctcaacctcctctctcgagctgctcgtctcaggcacttcagcttatggggtgccttcgccaactgcactcgggtctttttctctaccaaggactcctgcaagcactggcaggcatctcccccgaacttgctcccacccttgatacccttcagctggataccactgatttcgccatcaacatctggcagcagatggaggacttgggaatggcaccggcagtgccaccaactcaaggcaccatgccagcatttacctcggcattccaaagaagggcaggaggagtgcttgtcgcgtccaacctccaatccttcctcgaactcgcataccgtgcgcttcggcactttgccaagccc

SEQ ID NO: 9941 - DNA, 525 bp, synthetic construct
  misc_feature 1..525: note = source = /note="Description of Artificial Sequence: Synthetic coding sequence"
  source 1..525: mol_type = other DNA
atggcgccgctgggccccaccggtccgctcccgcagtcttttctgctgaaatgtctggagcaaatgcgcaaggtgcaagcagatgggactgcgctccaggagacgctgtgtgctacccatcaactgtgccaccctgaagagctggtccttctgggtcacgcattgggaattcctcaaccgcctttgtcgtcctgtagctcccaggccctgcagctgatgggttgtctgcgccagctgcacagcggcctcttcctgtaccagggccttctccaggcgttggctggaatctctcctgagctcgcccctaccctggataccctgcagctagatacgacggatttcgctatcaatatctggcaacagatggaggacttgggcatggccccggcagttccacctacccagggtacaatgccagcattcacctcagcgtttcagcgtcgggcgggaggggttctggtcgcttcaaatctgcagtctttcctggagctcgcatacagggcgctgcgccattttgcgaagccc

SEQ ID NO: 9942 - DNA, 525 bp, synthetic construct
  misc_feature 1..525: note = source = /note="Description of Artificial Sequence: Synthetic coding sequence"
  source 1..525: mol_type = other DNA
atggcgccgctcggacctaccggcccgcttccacaatcattcctgcttaagtgcttggagcaaatgcggaaggtgcaggctgatggcactgctctgcaagaaacgctgtgcgcaacccatcagctttgccatccggaggagttggtgctgctgggacatgccctcggcatccctcaaccgccgctgtcgtcatgtagctcgcaagcattgcagctgatggggtgcttgcggcaactgcactccggactgtttctgtaccagggcctccttcaagcactggcgggaattagccctgagctcgcaccaacgttggatactctccagctggacaccaccgatttcgccatcaacatctggcaacaaatggaggacctgggcatggcccctgcagtgccgccgactcaagggactatgcctgcgttcacctcggcctttcaaaggagagccggcggagtgctcgtcgccagcaaccttcagtccttcctggaactggcctaccgggccctgcgccatttcgccaagcct

SEQ ID NO: 9943 - DNA, 525 bp, synthetic construct
  misc_feature 1..525: note = source = /note="Description of Artificial Sequence: Synthetic coding sequence"
  source 1..525: mol_type = other DNA
atggccccattgggccctacagggcctctgcctcagagcttccttctgaaatgtctggagcaaatgagaaaggttcaggctgacgggacggcactccaggagaccttgtgcgctacccatcagctctgccaccccgaagagctggtactgctgggccacgcccttgggatcccgcaacctcccctgagctcatgcagttctcaagctctgcagcttatgggctgcctgcgccagctgcactccgggttattcctgtaccaaggtctactgcaagccctcgcaggcatcagtccagaacttgctccaaccttggatactttgcaactcgacaccaccgattttgcgatcaacatatggcaacaaatggaggacctgggaatggctcccgccgtcccgccaacccaggggaccatgcctgcattcacatctgccttccagagacgcgctggaggagtattggtggctagcaatctgcagagcttcctcgaactggcttaccgggcactccgtcatttcgccaaacca

SEQ ID NO: 9944 - DNA, 525 bp, synthetic construct
  misc_feature 1..525: note = source = /note="Description of Artificial Sequence: Synthetic coding sequence"
  source 1..525: mol_type = other DNA
atggcacccctaggtccaacaggaccactacctcagtctttcctcctgaaatgtttagagcagatgcgcaaggtgcaagctgacggtacagccctacaggagactctctgtgctacccatcagctgtgtcaccccgaagagctggtgctattagggcacgccctcggaatcccccagcctcccctttcttcctgcagttcacaggctttgcaattaatgggctgcctcagacagcttcattctgggctgttcctctaccagggactcctgcaggccctggccggaatctcaccagaactggcccctactctcgatactctccagctggatactaccgactttgccattaatatttggcaacagatggaggatctgggcatggccccggccgtccctcctacacaggggaccatgccagcattcactagcgcttttcaaaggcgggcaggaggtgtcctcgtggccagcaatctgcaaagcttcttggaattagcctacagagctttgcgtcactttgcaaagcca

SEQ ID NO: 9945 - DNA, 525 bp, synthetic construct
  misc_feature 1..525: note = source = /note="Description of Artificial Sequence: Synthetic coding sequence"
  source 1..525: mol_type = other DNA
atggcgccccttggtcccactggtccccttccgcaatcgtttttgctgaaatgtcttgaacagatgcgcaaagtgcaagcagatggtaccgcgttgcaagaaaccctctgtgccactcatcaactttgtcaccctgaagagctcgtgctcctgggacatgcgctcgggattccgcagcctcccctttcgagctgctcgtcccaagctctccaactgatgggatgtctccggcagcttcattcaggactgtttctttaccaagggcttctgcaagcgctcgcagggatatctccagagcttgcgcccaccctggatactctgcaactggataccacggattttgcaattaacatctggcagcagatggaagatcttggcatggcgcctgcagtgccacctacccagggaaccatgcccgcattcaccagcgcatttcagcggagggcaggaggggtccttgtcgcatcgaacctccagtccttcctcgaactggcataccgggccctgaggcacttcgccaagcca

SEQ ID NO: 9946 - DNA, 525 bp, synthetic construct
  misc_feature 1..525: note = source = /note="Description of Artificial Sequence: Synthetic coding sequence"
  source 1..525: mol_type = other DNA
atggccccgttgggaccaactggacctcttccgcaatccttcctcctcaaatgccttgaacagatgaggaaagttcaagcggatggaactgctttgcaggaaaccctgtgtgccacacatcaactatgtcatccagaagagttggttttacttggacacgctttggggattccccaaccaccactatcatcatgctccagccaggccttgcaacttatgggatgtctccggcagcttcactcggggctctttctctatcagggtcttttacaggctctggcaggaatttcgccggagctagctccaacattggatacgttgcaattggatacaactgatttcgcgattaatatttggcaacaaatggaggaccttggaatggctcctgccgtaccaccaacgcaggggacaatgccggcatttacttcagctttccagagaagagcaggtggagttcttgtggcgtctaatttgcagtcattcctggaattggcttacagagctttgcgtcatttcgctaagccg

SEQ ID NO: 9947 - DNA, 525 bp, synthetic construct
  misc_feature 1..525: note = source = /note="Description of Artificial Sequence: Synthetic coding sequence"
  source 1..525: mol_type = other DNA
atggccccgctcggacccactggccccctcccacagtcatttttgttgaaatgcttggagcagatgagaaaggtgcaagcggacggaactgcactccaggaaaccctgtgcgccacccatcagctttgccaccccgaggaactggtgctgctgggccacgctctgggaatccctcaaccaccgcttagctcgtgctcgagccaggccctccagctcatgggctgtttgaggcagctgcatagtggattgttcctctaccagggtctgctgcaggccctcgcggggatctcgccggaactcgctcctaccctggataccctgcaacttgacactactgacttcgcgattaacatctggcaacaaatggaagatctggggatggccccagcagttccgccgactcagggtaccatgccagcatttacgtcagctttccagcggagagcaggaggtgtcctggtggcgtctaacctgcaatcattcttggagttggcttaccgggcactgcgacacttcgccaagccg

SEQ ID NO: 9948 - DNA, 525 bp, synthetic construct
  misc_feature 1..525: note = source = /note="Description of Artificial Sequence: Synthetic coding sequence"
  source 1..525: mol_type = other DNA
atggccccactgggaccaactgggcctcttccacagtcttttctgttaaagtgcctggagcagatgaggaaagttcaggcggacggtacggccctgcaggaaaccttgtgtgcaacacaccagctgtgccaccccgaagagctcgtgcttctgggccacgctttgggcataccccaaccacccctttcgagttgtagcagccaggccctacagctgatgggatgtctgcgccagctacactccggacttttcctttaccagggtctcctgcaggctctagccgggattagtccagaattggctcccacactcgacactctgcaactcgacactacagatttcgcaatcaacatctggcagcagatggaggatctgggaatggctccagcggtgcctccaacgcagggcacaatgccggcttttacttcggccttccagcgaagagccggaggcgtactggtggctagcaacctgcagagcttcttggaactcgcctaccgcgccctgcgccattttgcgaagcca

SEQ ID NO: 9949 - DNA, 525 bp, synthetic construct
  misc_feature 1..525: note = source = /note="Description of Artificial Sequence: Synthetic coding sequence"
  source 1..525: mol_type = other DNA
atggccccactgggtcccacaggtccactccctcagtctttcctgctgaagtgtctggagcagatgcggaaagttcaggctgatgggaccgcactgcaggagaccctatgcgccacccatcaactgtgtcaccccgaggaactggttctgttgggtcacgccctaggcataccacagcccccgctgtcatcctgcagttctcaggctctgcagcttatggggtgcctgaggcagttgcactctggtttgtttctgtaccagggcttgctccaggccttagcaggtatatccccagaattagcccccaccctcgacactttgcagcttgatacgactgatttcgctataaatatttggcagcagatggaggatctgggcatggcaccagcggttcctcccacccagggcacgatgcctgccttcacatcagcctttcagagacgggctggaggtgtacttgtcgcctcgaatctgcagtcgtttttggagctcgcctatagggccctgcggcacttcgccaaacca

SEQ ID NO: 9950 - DNA, 525 bp, synthetic construct
  misc_feature 1..525: note = source = /note="Description of Artificial Sequence: Synthetic coding sequence"
  source 1..525: mol_type = other DNA
atggctcctcttggaccaacaggacctcttccacaatcatttttacttaaatgtttagaacaaatgagaaaagttcaagctgatggtactgctttacaagaaactctttgcgcaacacaccaattatgtcaccctgaagaacttgtattgttaggacatgctcttggtataccacaaccacctttatcatcatgtagttcacaagcattacaattaatgggttgtcttagacaactacatagtggtctttttctttaccaaggattgcttcaagcattagcagggatttctccagaacttgcaccaacattagatactcttcagcttgatactacagattttgctattaatatttggcaacaaatggaagatttaggtatggcaccagcagttccaccaacacagggtacaatgcctgcttttactagcgcttttcaacgtcgagctggaggagttcttgttgcttcaaatctacaaagttttttagaacttgcttatagagcattgagacattttgctaaacca

SEQ ID NO: 9951 - DNA, 525 bp, synthetic construct
  misc_feature 1..525: note = source = /note="Description of Artificial Sequence: Synthetic coding sequence"
  source 1..525: mol_type = other DNA
atggcccctcttgggcccacgggccctttgccacaatcttttctattaaagtgtctggaacagatgaggaaagtccaggccgatggcacagcattgcaggagaccctgtgcgcgacgcatcaactctgccacccggaggaactggtccttctgggacatgccctaggcattccccagcccccattgtcctcctgcagttctcaggccctgcagctcatgggttgtctcagacaactccattctggcctctttctgtatcagggactgctccaggccctggccgggatctcgccagaattggctcccacgttggataccctccaactggacacgaccgactttgccataaacatctggcaacaaatggaggacctcggcatggccccagcagtgcccccgactcagggcacaatgcctgcctttacaagcgcgttccagagaagggctgggggagtcctggttgcctccaatctgcagtcctttctcgagctagcctacagggccctccggcatttcgccaaacct

SEQ ID NO: 9952 - DNA, 525 bp, synthetic construct; identical to SEQ ID NO: 9888
  misc_feature 1..525: note = source = /note="Description of Artificial Sequence: Synthetic coding sequence"
  source 1..525: mol_type = other DNA

SEQ ID NO: 9953 - DNA, 525 bp, synthetic construct
  misc_feature 1..525: note = source = /note="Description of Artificial Sequence: Synthetic coding sequence"
  source 1..525: mol_type = other DNA
atggcacctctgggacctaccggtccgctgccgcagagcttcctgttgaagtgtctggaacagatgcgaaaagtgcaggcagatggcaccgctctgcaggaaacactgtgcgctacccaccaattgtgtcaccccgaggaacttgttctcctggggcacgccctcgggatcccacagccccctctatcctcttgcagcagtcaggctcttcagttaatgggctgcctgcggcagctacattcaggactcttcctctaccaggggctgctacaagcactagctggaatttccccggaactggcccctaccttagacacactgcaactggatacaaccgactttgcaatcaatatctggcagcaaatggaggatctcggtatggcacccgcagtgccaccaacgcaaggcacgatgccggcatttacctcggccttccagcgccgagccggtggtgtactcgtcgcctcgaacttgcagagtttcctggaactcgcttaccgggccctaaggcacttcgctaaaccc

SEQ ID NO: 9954 - DNA, 525 bp, synthetic construct
  misc_feature 1..525: note = source = /note="Description of Artificial Sequence: Synthetic coding sequence"
  source 1..525: mol_type = other DNA
atggcaccgctgggtcccaccggacccttgccacagtcttttctcctgaaatgcctggaacagatgagaaaggtccaggccgatggtacagccctgcaggagacactgtgtgccactcaccagctctgccaccccgaagaattggtgcttctggggcacgcactgggaataccccaaccgcctctgagttcgtgttctagccaggcactgcagctcatgggatgcctccgtcagctccatagcggactgttcctttaccagggcctgcttcaggcccttgcaggaatttctcctgagctagcgcccaccttggatacccttcagctggacaccacggactttgcgataaacatttggcaacagatggaagacctgggcatggcccctgctgtgccacctacgcagggcacgatgcctgccttcacatcagcattccagagacgggcgggaggcgttctggtcgctagtaacctgcagagtttcctggaactcgcctatcgcgccttgcggcactttgccaaaccg

SEQ ID NO: 9955 - DNA, 525 bp, synthetic construct
  misc_feature 1..525: note = source = /note="Description of Artificial Sequence: Synthetic coding sequence"
  source 1..525: mol_type = other DNA
atggcacccttgggacctactgggccccttcctcagtcctttttgcttaaatgcctggaacaaatgcggaaggtgcaggccgacggcactgcactccaagagactttgtgtgcaacccatcagctgtgtcatcccgaagaacttgtgctgctcggtcatgccctgggaatcccacagccaccccttagctcctgttcgtctcaggccttgcaacttatgggttgcctccgccaacttcacagcggtctgttcctttaccagggattgctgcaagcactggcaggcatctcaccagaacttgcacccacccttgatactcttcaactcgatactaccgactttgcaattaacatttggcagcaaatggaagatcttgggatggcacctgcagtgcctccaacccagggaactatgcctgcttttacctcagccttccagagaagggccggtggggttctcgttgccagcaatctgcaatcgttcttggaactcgcataccgtgcactgcgccattttgctaagcca

SEQ ID NO: 9956 - DNA, 612 bp, synthetic construct
  misc_feature 1..612: note = source = /note="Description of Artificial Sequence: Synthetic coding sequence"
  source 1..612: mol_type = other DNA
atggcaggaccagcaacgcaatcgccaatgaagctgatggcacttcaattgctcctgtggcattcggccctttggactgttcaggaggcaacccctctgggacccgcatcatccctccctcaatcatttctgctcaagtgtctcgagcaggtgagaaagatccaaggcgacggcgcagcactgcaggagaagctctgcgcaacgtacaaactgtgtcatccagaagagctggtccttctggggcactcacttggcataccttgggctcctttgtcctcttgtccctcacaagccctccaactggcaggttgtctgtcgcagctgcactcgggactgtttctttaccaaggtctgctccaagccctcgagggtatttctccagagcttggcccaacccttgataccctgcaacttgatgttgcagacttcgcaactacgatatggcaacaaatggaagaactcgggatggcacctgcacttcaacccactcagggtgcgatgcctgcttttgcctcggcgttccaaagacgagcgggaggtgtgttggtggccagccacctgcagtcctttctcgaagtgtcgtaccgcgtgctgaggcatctggcccaacca

SEQ ID NO: 9957 - DNA, 612 bp, synthetic construct
  misc_feature 1..612: note = source = /note="Description of Artificial Sequence: Synthetic coding sequence"
  source 1..612: mol_type = other DNA
atggcaggccccgcaacccaaagccccatgaagctgatggcattgcaactgctcttgtggcactcggcactttggactgtgcaagaagccactccccttggccctgcatcgtccctgcctcaatcgttccttcttaaatgtctggaacaagtgagaaagatccagggggatggtgcggccttgcaggaaaaactctgtgcgacttacaagctctgccatccagaggaactggtgttgcttggtcattcgctgggaattccgtgggcacccctgtcgtcgtgtccgagccaggctctgcaacttgcaggatgtttgtcccagctccactctggacttttcctgtaccaaggactcctgcaggccttggagggaattagcccagaactcggaccaactcttgataccctgcagctggacgtggcagattttgcaactaccatttggcagcaaatggaagaattgggtatggcacctgcactgcaacctactcagggcgcgatgccagcatttgcatccgcttttcaaagaagggccgggggcgtgctcgtcgcaagccacctgcaatcatttctggaagtgtcgtacagagtgctgagacatctggcacagcca

SEQ ID NO: 9958 - DNA, 612 bp, synthetic construct
  misc_feature 1..612: note = source = /note="Description of Artificial Sequence: Synthetic coding sequence"
  source 1..612: mol_type = other DNA
atggcagggccagccacccagtcccctatgaaactgatggcattgcaactccttctctggcactcggccctttggaccgtgcaagaagccacccctctgggacccgcgagcagccttccacaatcgttccttctgaagtgtctcgagcaggtccgcaaaatccaaggagacggagcggcgcttcaagaaaagctctgcgccacttacaaactttgtcatccagaggaactggttctgctcggccactccttgggtataccttgggcgcccctgtcgtcatgcccaagccaggcactgcagctggcaggttgtctgtcccagttgcactcaggcctctttttgtaccaagggctcctgcaagcactggaaggaattagccctgagttgggtccaaccctggatacgctgcagttggacgttgccgattttgcaaccaccatctggcaacagatggaggagcttggtatggcgcccgcactccaacccactcaaggggctatgccagcctttgcatcggcatttcaacgacgggccggtggtgtccttgtggcttcgcatcttcaatcctttctggaagtgtcgtaccgcgtccttaggcaccttgcccaaccc

SEQ ID NO: 9959 - DNA, 612 bp, synthetic construct
  misc_feature 1..612: note = source = /note="Description of Artificial Sequence: Synthetic coding sequence"
  source 1..612: mol_type = other DNA
atggccggaccggcaactcaatcacctatgaaactgatggcccttcagcttctcctttggcattcggcgctttggactgtgcaagaggccaccccgcttggtccggcatcctcccttcctcaatctttcctgctcaagtgtctggagcaggtccggaagatccaaggtgacggagcagcgctccaggaaaagctgtgtgcaacctacaagctgtgccatccagaagagcttgtcctgctgggacactcgctcggaattccctgggcgccactctctagctgcccttcacaagccctccagctggcaggttgtctgtcccaactgcacagcggactgttcctgtaccaggggcttttgcaggccctcgaaggaattagcccagagctcggccccactcttgatacgctgcaactggatgtggctgatttcgcaacgactatatggcaacagatggaagaactcggcatggcccccgcactgcagccaactcaaggcgcgatgcccgcatttgcatccgcttttcaacggagagcaggcggggtgcttgtggcgtctcatcttcagtcgtttcttgaagtgtcctacagagtgctgcgccatctggcccagccc

SEQ ID NO: 9960 - DNA, 612 bp, synthetic construct
  misc_feature 1..612: note = source = /note="Description of Artificial Sequence: Synthetic coding sequence"
  source 1..612: mol_type = other DNA
atggctggccctgctacccagagcccgatgaaactaatggccctgcaactgctgctgtggcattcagcgctttggactgtacaagaggctactccattggggcctgcatcatcactcccccagtccttcctgctgaaatgtttggagcaggtccgcaaaatccagggcgacggagctgcccttcaggaaaagctgtgtgcaacatacaagctgtgtcatccggaagaactggttctcctagggcacagtcttgggataccttgggcccccctgagttcttgccctagtcaggctctccagctcgccggctgtctctctcaactccacagcggtctgttcctatatcaggggctgctccaggctctcgaaggtatttccccggagctgggccctacactggatacactgcaactcgatgtagcagattttgctacgacaatctggcaacaaatggaggaactcggtatggcaccagccctgcagccaacccaaggtgctatgcctgcttttgcgtctgcctttcagagacgcgctggaggggttctcgtggcgtcccacctacagagcttcttggaagttagctatcgcgtgctcagacacctcgctcagccc

SEQ ID NO: 9961 - DNA, 612 bp, synthetic construct
  misc_feature 1..612: note = source = /note="Description of Artificial Sequence: Synthetic coding sequence"
  source 1..612: mol_type = other DNA
atggccggaccggccacccaatcgccaatgaaactgatggcacttcaactgctcctgtggcactcagccctctggaccgttcaggaagcgactcctctgggaccggcctccagcctgcctcaatcctttctgctcaagtgcctggagcaggtccggaagatccagggagatggagccgccctgcaagagaaactttgcgcgacttacaagctctgtcatccggaagagttggtgctccttggtcatagcctgggcattccgtgggccccgcttagctcatgcccgagccaggctcttcaactggcagggtgcttgtctcagctccattcgggactgtttctgtaccaaggattgctccaagcgctcgaaggtatctcgcccgagctcggcccgaccctcgacaccctgcagctggatgtggcagactttgcaactacgatctggcagcagatggaagagctgggaatggcccctgccttgcagccaacgcaaggtgcaatgccggcgttcgcgtccgccttccagcgccgggctgggggagtgctggtggcctctcacctccagtcgttcctcgaagtgtcatacagagtcttgcggcatcttgcccaaccc

SEQ ID NO: 9962 - DNA, 612 bp, synthetic construct
  misc_feature 1..612: note = source = /note="Description of Artificial Sequence: Synthetic coding sequence"
  source 1..612: mol_type = other DNA
atggcaggacccgccacccaatctcccatgaaactcatggcactccagctcctcctgtggcatagtgccctttggaccgtgcaggaagctacccctttaggacccgcaagcagcctgccccagagcttcctgctgaaatgcttggaacaggtcaggaaaattcagggggacggcgcagctcttcaggaaaagctgtgcgcaacatataagctttgtcatcctgaggagcttgttctgctgggccacagcctggggataccctgggctccactgtcaagctgcccctctcaggcgctgcagttggctggttgcctgagccagctccactccggcctgtttttatatcaagggctcttgcaggcactcgaaggcatcagcccagagctgggaccaaccctggataccctgcagctggatgtagctgactttgctaccacaatctggcagcaaatggaagagttgggaatggctcccgctcttcagcctacccaaggagccatgcctgcatttgcttctgctttccagcgccgcgctgggggggtgttggtcgctagccatttgcagtccttcttggaagtctcgtacagggtcttgagacacctggcccaacca

SEQ ID NO: 9963 - DNA, 612 bp, synthetic construct
  misc_feature 1..612: note = source = /note="Description of Artificial Sequence: Synthetic coding sequence"
  source 1..612: mol_type = other DNA
atggcagggcctgcaacccagtcacctatgaagttaatggctttacaactcctcctgtggcactccgccctttggactgtgcaggaagccacacctttggggcctgccagcagtttgccacaatcttttctgctgaaatgtcttgagcaggtgagaaagatccagggcgatggcgcggcactgcaggagaaactgtgtgcgacatataagttatgtcacccagaggaactggtccttctcggacactccctcgggatcccatgggcccctctctcttcctgcccatcccaagctcttcaattagctgggtgtctgtctcagctccatagcgggctgttcctgtatcagggactgctgcaggctctcgagggcattagtcccgaactcggcccaacgctggacactctccagctggatgttgctgactttgctaccaccatctggcagcagatggaggagctcggaatggcccctgccctccagccgacgcagggagcaatgccagccttcgcatccgcttttcaacgtcgcgcaggtggcgtgctagttgcctcccatttgcagtcgttcctggaggtgtcttaccgcgtactgagacatctcgcgcagccc

SEQ ID NO: 9964 - DNA, 612 bp, synthetic construct
  misc_feature 1..612: note = source = /note="Description of Artificial Sequence: Synthetic coding sequence"
  source 1..612: mol_type = other DNA
atggctgggcctgctacccaatccccgatgaagctgatggctctgcaattattactctggcactcggccctgtggactgtccaggaagctaccccactcggacccgcttcttccctgccccaatccttccttcttaagtgcctggagcaagtgagaaaaattcagggagacggagcagccctccaggagaagctctgtgccacctacaagctgtgtcaccccgaggaattggtcctgttgggccattcactggggataccttgggcccccctgagctcttgtccatcacaggccctgcagctggcgggctgcctgtctcagctccattccggcctgtttctgtaccagggcttgctgcaggctctggaaggtatatcccccgagctgggacccacactggacactctgcagctagacgtggccgattttgcaacaactatctggcaacagatggaagagcttggcatggcccctgctcttcagccaacacagggcgcaatgccagccttcgccagcgccttccagagacgggctgggggggtgctggtggcctcccatctccagtcttttctcgaggttagttaccgtgtcctgaggcacctggcgcagccc

SEQ ID NO: 9965 - DNA, 612 bp, synthetic construct
  misc_feature 1..612: note = source = /note="Description of Artificial Sequence: Synthetic coding sequence"
  source 1..612: mol_type = other DNA
atggcggggccggcgactcaatcgcctatgaagttgatggcactgcagctgctgctgtggcactcggcgctctggaccgtgcaagaggctactcccctgggccccgcctcatctctgccacaatccttcctcctcaaatgcctggaacaggttagaaagatccagggagatggagccgcactgcaggagaagctgtgcgccacctataaactgtgccacccggaagaactcgtcctcctcggtcatagccttggaatcccgtgggctccactgtcgagctgcccatcccaggccctgcagcttgccgggtgtctgtcccaactgcattcagggctttttctctaccaaggcctgctgcaagcccttgagggaatctcaccggagctcggcccaactttggacaccctgcagttggatgtcgcagacttcgccaccactatttggcagcagatggaagaactcggaatggctccagcgcttcagccaacccagggagcaatgccggctttcgcaagcgcgttccaaagacgggctggtggcgtgttggtggctagtcacctgcagtccttcctggaagtgtcgtaccgtgtgctgaggcacctcgcacagcca

SEQ ID NO: 9966 - DNA, 612 bp, synthetic construct
  misc_feature 1..612: note = source = /note="Description of Artificial Sequence: Synthetic coding sequence"
  source 1..612: mol_type = other DNA
atggcaggtccagccacgcaatcgcctatgaagctgatggccctgcaactgcttctctggcactcagccctctggaccgtacaagaagcaaccccgctcggacctgcgtcctccctgccccaatcgttcctgctcaagtgtcttgaacaggtgcgtaagattcagggcgacggagcagcgctccaggagaagctgtgcgcaacttacaaactgtgtcatcccgaagagctggtgctgctcgggcactcacttggtattccctgggcacctctctcgtcatgcccttcgcaagcgctccagcttgcgggctgtctgagccaactgcattcggggctctttctttaccaaggacttctccaagccctggagggtatttcaccggaacttgggccaaccttggatactctccaactggatgtggcggattttgctaccactatatggcagcaaatggaggaacttggcatggcacccgcattgcagcctacccaaggagcaatgcccgcctttgcatcggcatttcagagacgcgctggaggagtgttggtggcctcccacttgcagtcattcctggaagtgtcctaccgcgttctgagacatcttgcacaacct

SEQ ID NO: 9967 - DNA, 612 bp, synthetic construct
  misc_feature 1..612: note = source = /note="Description of Artificial Sequence: Synthetic coding sequence"
  source 1..612: mol_type = other DNA
atggctgggccagcaactcaaagtcccatgaagctcatggccctgcagctgctgttgtggcacagcgccctgtggacagtccaggaagctactcctctgggacccgcctcatcactgccccagtctttccttctgaagtgcctggagcaggttcgcaagatccaaggtgacggagctgctctccaggagaaactctgtgcaacatataaactatgccaccccgaggagttggtcttgttgggccattctctgggtatcccctgggccccgctgtccagctgtccttcccaggcacttcagctggcagggtgcttgagccagctgcactctgggctgttcctgtaccaaggccttcttcaagcattggagggtatctctccggagctgggcccaaccctggatacactgcagttggacgtagcagacttcgccacaactatctggcagcagatggaagagctgggcatggcccccgcgctgcagcccacccagggcgccatgcccgcgtttgccagcgccttccagagacgagctggaggcgttctcgtcgcatcccacctgcagtcattcctggaggtttcctatcgagtactccgccacctcgctcagccg

SEQ ID NO: 9968 - DNA, 612 bp, synthetic construct
  misc_feature 1..612: note = source = /note="Description of Artificial Sequence: Synthetic coding sequence"
  source 1..612: mol_type = other DNA
atggcagggcctgcaacgcagtcgcccatgaagctcatggcactccaactgcttctgtggcattccgcactctggaccgtgcaggaagcaacccctctgggtcccgcctcctcgctgcctcagtcatttcttcttaaatgtctggagcaagtgcggaagatacaaggagacggagcagccctgcaggaaaagctctgtgcaacttacaaactttgtcacccagaagaactcgtgctgctgggtcattcactcggtataccttgggcaccgctctcatcctgcccctcccaagcgctgcaattggcaggttgcttgagccagcttcatagcggacttttcttgtaccaagggctgcttcaagcacttgaaggaatttcgcctgaacttggacctaccctggataccctgcagctggatgtggcagactttgccacgaccatttggcagcaaatggaagagctcggcatggcacctgcgcttcagccaacccagggtgcgatgccagcgttcgcgtccgcttttcagagacgggccggcggggtcctcgtcgcatcgcacctccaatccttcctggaagtttcctaccgagtgcttagacatcttgcgcagcct

SEQ ID NO: 9969 - DNA, 612 bp, synthetic construct
  misc_feature 1..612: note = source = /note="Description of Artificial Sequence: Synthetic coding sequence"
  source 1..612: mol_type = other DNA
atggcagggccagcaacacagtccccgatgaaactgatggccctgcagcttctcctgtggcactccgcactgtggacggtgcaggaggccacacccttgggcccagcttcaagcctgcctcagtcatttctgttgaaatgcttagagcaggtacgcaagatccaaggcgacggggccgcgctccaagagaagctgtgcgccacttataagctctgccaccccgaagaactggttctgctgggacacagtctggggataccctgggcccctctctctagctgcccgagccaggccctgcagcttgcaggctgtctgtcccagctacactccggcctgtttctgtatcaaggcttgttgcaggctctggaggggatctcccccgaattgggtcctacgcttgataccctgcaactcgacgtggccgacttcgctacaactatttggcagcaaatggaggaactgggaatggcacccgcattgcagcctacccagggggccatgcccgcctttgccagcgcttttcaacgaagggccgggggggttctcgttgccagccacctgcagtcgtttctcgaggtcagctaccgggtccttagacatctggctcagcct

SEQ ID NO: 9970 - DNA, 612 bp, synthetic construct
  misc_feature 1..612: note = source = /note="Description of Artificial Sequence: Synthetic coding sequence"
  source 1..612: mol_type = other DNA
atggccggacccgctactcaatccccaatgaagcttatggctctgcaactcctcctatggcattctgctctttggactgtgcaggaagcaacacctctaggacctgctagttctcttcctcagagttttctgcttaaatgcctcgaacaggtacggaagattcagggggatggggctgcactgcaggaaaaactgtgtgcgacttataaactatgtcaccctgaggagttagttctgctgggacattctctggggataccctgggcacctctttcatcttgccctagtcaggccctccagctcgccgggtgcctgtcacaacttcactctgggctcttcctttatcagggactcctccaagctctggaagggatatctccagaacttggacctactctcgatacactccagctggatgtagcggacttcgctacaactatatggcagcagatggaagaactgggaatggcccccgccctgcagccaacgcagggagcaatgcccgctttcgcctccgcttttcagaggagagcggggggagttctggttgcatcacacctacagtctttcctcgaagtgtcgtatcgcgtgttaaggcacctcgctcagcct

SEQ ID NO: 9971 - DNA, 612 bp, synthetic construct
  misc_feature 1..612: note = source = /note="Description of Artificial Sequence: Synthetic coding sequence"
  source 1..612: mol_type = other DNA
atggccggccctgccacgcagtcgcctatgaagctgatggcgctgcaattgctcctgtggcacagcgccctctggacggtgcaggaggccaccccactgggaccggccagtagcctgccacaatcattcctgctgaaatgcctcgagcaggtgcggaagatccaaggagatggagctgcgctgcaggaaaagctgtgcgcaacctacaagctgtgtcaccccgaggaactggtcctgctgggacactccctgggaatcccttgggccccgctttcatcctgtccgtcgcaggcactccaactggcgggatgtctgtcacaactgcattcgggactttttctgtatcagggcctgctgcaagcgttggaaggaatctccccagaactgggaccgactctggataccctccaactggacgtcgctgacttcgcaactaccatctggcagcaaatggaggaattgggcatggcaccggcgctgcagccaactcaaggcgccatgccggccttcgcatccgcgtttcagagaagggccgggggcgtgctcgtcgcctcccatctccaatcgttcctggaggtgtcctaccgcgtcttgcggcacctggcgcagcca

SEQ ID NO: 9972 - DNA, 612 bp, synthetic construct
  misc_feature 1..612: note = source = /note="Description of Artificial Sequence: Synthetic coding sequence"
  source 1..612: mol_type = other DNA
atggctggccccgctacccagagccccatgaaattgatggccttacagctgctgttgtggcatagcgccttgtggaccgtccaggaggccactccccttggcccagcgagttcacttccccagtcttttctcctgaagtgcctggagcaggtcagaaaaatacagggagacggcgccgcattgcaggagaagctgtgcgccacatataagctctgccaccccgaggagctcgtgctcttgggccatagtttggggattccatgggctcctctgagttcttgtccctcgcaagctctacaactagctggatgcctctcacagcttcatagcgggctattcctgtaccagggcctgttacaagcactcgaggggatctctccagagctaggaccaaccctggatactttgcaactggacgttgccgacttcgcgactaccatttggcaacagatggaggagctgggcatggcacctgcactacaaccaacgcagggggcaatgcccgccttcgcgtcagctttccagcgcagagctggtggggtgctcgttgcttcacacctccagtcattcttggaagtatcttacagggtgctgcggcacctcgcccaacct

SEQ ID NO: 9973 - DNA, 612 bp, synthetic construct
  misc_feature 1..612: note = source = /note="Description of Artificial Sequence: Synthetic coding sequence"
  source 1..612: mol_type = other DNA
atggcgggacctgccacgcagagcccgatgaaacttatggcgctccagcttcttctgtggcactcagcgctgtggactgttcaggaggctaccccgctcggacccgcctcttcactgccgcaatcgttcctcctcaagtgcttggagcaggtgcgcaagattcagggggacggtgccgccttgcaggaaaagctgtgcgcaacttacaaactgtgccacccagaggaattggtgctgctcggacattcgctcggcatcccttgggcaccgctttcgagctgcccttcccaggctcttcaactggcgggttgtctctcccagctccattccggcttgttcctgtaccagggcctgctgcaggctctggaaggcatctccccagaactcgggccaaccctcgatactctgcaactggacgtggccgatttcgcaactaccatctggcagcagatggaagagctgggaatggcacccgccctgcaaccaacccagggagccatgccggcctttgctagcgccttccaaagaagggcgggaggagtcctggtggcaagccacctccaatcgtttctggaggtgtcataccgggtcctgcgccacctggcgcaaccg

SEQ ID NO: 9974 - DNA, 612 bp, synthetic construct
  misc_feature 1..612: note = source = /note="Description of Artificial Sequence: Synthetic coding sequence"
  source 1..612: mol_type = other DNA
atggcaggcccggcaacccagtcgcctatgaagcttatggccctccagctactattatggcatagcgcactatggacagtgcaagaggctaccccacttgggcccgccagctccctgcctcaatctttcctgttaaaatgtctggagcaagtgcggaaaatccagggagatggtgcggctctgcaggaaaaactctgtgcgacgtacaagctgtgccacccagaggagctggtcctgctgggccatagtctggggattccatgggccccgctgagctcttgccccagtcaggctctgcagttggcggggtgtctgagccagctccattcggggctgttcctctatcagggcctattacaggctttggaggggattagtcccgaactgggccctaccctagatacccttcagctagacgtggcggatttcgccaccactatttggcagcagatggaagagttgggcatggcccctgctcttcagcctacccagggggcgatgcccgcttttgcctccgccttccaacgcagggctggaggcgtactcgttgcttcccatttgcagtcgtttctagaggtgtcgtatagggtgctgcgccaccttgctcagcca

SEQ ID NO: 9975 - DNA, 612 bp, synthetic construct
  misc_feature 1..612: note = source = /note="Description of Artificial Sequence: Synthetic coding sequence"
  source 1..612: mol_type = other DNA
atggccggacccgcaacccagagccccatgaaattgatggcgttacagcttcttctgtggcactcagctctttggactgtgcaagaagcaacgccgctggggcccgcttcatccttaccacagtcttttctcctgaagtgccttgagcaagtacggaagattcagggggacggggccgctttgcaagagaagctctgcgctacctataagctgtgccacccagaggagctggtgctgttaggccactcactcggcataccctgggctccattatcaagctgccccagtcaggctttacagttggcaggctgcctttcacaactgcacagcgggttgttcctctaccaagggctcctgcaggctctggaaggcatttctccagaactcgggccgacacttgacaccctgcaacttgatgttgccgactttgccaccacaatctggcagcaaatggaagagctggggatggcaccagccttgcagcctacgcagggcgccatgcccgcttttgcgagtgcattccaaagacgggcaggaggagtccttgtcgctagtcaccttcagtcttttttggaagttagctatcgtgtgctgaggcatctggcccaaccc

SEQ ID NO: 9976 - DNA, 612 bp, synthetic construct
  misc_feature 1..612: note = source = /note="Description of Artificial Sequence: Synthetic coding sequence"
  source 1..612: mol_type = other DNA
atggccggccctgcgactcagagccctatgaaactgatggcgctgcagctgcttctctggcactcagctctgtggacggtccaagaagcaaccccactcgggccagcttcaagcctcccccaatcgtttctgctgaagtgtctcgagcaagtgagaaagattcaaggagacggcgcagcactccaggagaagttgtgtgctacctacaagctctgccatccagaggaactggtcctgcttggccacagccttggaataccgtgggcacctctctcctcctgcccgtcgcaagcgctgcaacttgcgggatgtctttcccaacttcactccgggctgttcctttaccagggacttctgcaagcgctcgaaggaatctccccggagcttggacccactctcgataccctgcaacttgacgtggcagattttgccactaccatctggcaacaaatggaagaactgggaatggccccagccttgcagccgacccagggcgccatgcctgcatttgcttcagctttccaacggagagcaggtggtgtcctggtggcatcccatctgcagagcttcttggaagtgtcatacagggttctgcgacatctcgctcagcca

SEQ ID NO: 9977 - DNA, 612 bp, synthetic construct
  misc_feature 1..612: note = source = /note="Description of Artificial Sequence: Synthetic coding sequence"
  source 1..612: mol_type = other DNA
atggcaggccctgccactcagtccccaatgaaacttatggcactgcagctactgctgtggcattccgccctgtggaccgtgcaagaggctactccacttggacccgcatccagcctgcctcagtctttcctcttaaagtgtcttgagcaggtgcgaaagatacagggggatggcgccgctctgcaagagaagctctgcgccacctacaagctgtgccaccctgaagaattggtgctgctcggtcactctctgggcataccatgggctcccctcagtagctgccctagccaagccctccaactggctggctgcttatcacagctgcacagcggcctcttcctataccagggcctgctgcaggcactcgagggcatctcaccagagctcgggcctaccctggatactcttcagttagatgtggcagacttcgcaacaacaatctggcagcagatggaggagttaggcatggctcctgctctgcagccaacacaaggtgccatgcccgccttcgcttccgcttttcagaggagagccggcggcgtgttagtggcatctcacctgcagtcatttctggaggtgtcctaccgcgttctgaggcacctggcccagcca

SEQ ID NO: 9978 - DNA, 612 bp, synthetic construct
  misc_feature 1..612: note = source = /note="Description of Artificial Sequence: Synthetic coding sequence"
  source 1..612: mol_type = other DNA
atggctgggcccgccacgcagagtcctatgaaactgatggccctccagttacttctgtggcacagtgccctgtggaccgtgcaggaggccactcccctgggcccagccagttctctgccccagtctttcctgctgaagtgtcttgaacaggtaaggaaaatccagggcgatggtgccgcgctgcaagagaaattgtgtgccacctacaaattatgccaccctgaagaactcgtgctgctgggacattccctcggcatcccctgggcccccttgagttcgtgtccttctcaggcacttcagctcgccggttgcctctcccagctacacagcggactattcctgtatcagggactactgcaagccttggagggcatttcccctgaactgggccctactctggatacactgcagttagatgttgccgactttgctactacaatttggcagcagatggaagagcttggaatggcacctgcccttcagcctacgcagggcgcaatgccagccttcgcatctgcatttcaacgccgggcgggtggcgttctggtggcttcccatctccaatctttcctggaggtatcctaccgcgttctgcggcatctggcacagcca

SEQ ID NO: 9979 - DNA, 612 bp, synthetic construct
  misc_feature 1..612: note = source = /note="Description of Artificial Sequence: Synthetic coding sequence"
  source 1..612: mol_type = other DNA
atggctggaccagccactcagtcaccaatgaagctgatggccctccaactgctcctctggcattcggccctttggaccgtccaggaggctactcctctggggccggcctcatccttgcctcagtccttcctgctcaagtgcctggagcaggtcaggaaaatccaaggagacggagccgcgctgcaagagaagctgtgcgcaacttacaagctctgccatcctgaagaactggttcttctcggtcacagcctgggcatcccgtgggccccgctctcttcctgcccttcacaggccctgcagctggccggatgcctgagccagctgcactcggggctgttcctgtaccagggactcctgcaagctctggaaggaatttcaccagagctggggccaaccttggataccctccagctcgacgtggcagactttgcaaccacgatctggcaacaaatggaagaactgggaatggcaccggccctgcagcctactcagggggccatgccagcgttcgcatctgctttccaacggcgggctggaggagtgttggtggcaagccacctccaatcctttctggaggtgtcttaccgcgtcctgcggcacctcgcccagccg

SEQ ID NO: 9980 - DNA, 612 bp, synthetic construct
  misc_feature 1..612: note = source = /note="Description of Artificial Sequence: Synthetic coding sequence"
  source 1..612: mol_type = other DNA
atggccggccccgccacccagtcacccatgaaactcatggctctacagttgttgctgtggcacagtgcactatggacggtccaggaggccacacctttgggccccgcctcctccctgccgcaatcttttctgctgaagtgcctggagcaagtccgtaagatccagggagacggcgctgccctacaggagaagctttgcgcaacctataagctgtgccacccggaggaactggtgctcttggggcattctttgggcatcccatgggctccgctgtcgtcatgcccaagtcaggccctgcagctcgccggctgcctaagccaacttcactcaggactgttcttataccaggggttgctccaggccctggaagggatctccccagaattaggacctactttagacaccctccagctggacgtggccgattttgcgactactatttggcagcagatggaggagcttggcatggcacccgctctccagcctacgcagggagctatgccggctttcgcatctgctttccaacggcgggccggcggggtgttggtggccagtcatctgcagtcgttcctggaggtgtcatatcgggtcctgaggcacctggcccagcct

SEQ ID NO: 9981 - DNA, 612 bp, synthetic construct
  misc_feature 1..612: note = source = /note="Description of Artificial Sequence: Synthetic coding sequence"
  source 1..612: mol_type = other DNA
atggcaggtcctgcaacccagtcacctatgaaactgatggcattgcaactgctgctgtggcattccgcactctggaccgtgcaggaagcaactccgctgggaccggcgtcctcacttccccagtcatttcttctgaagtgccttgagcaggtgaggaagattcaaggtgatggagcagcactgcaggaaaaactctgtgcaacgtacaaattgtgccatccagaagagctggtgctgcttggccatagcttggggataccttgggcaccgcttagctcgtgtccaagccaagcacttcaactggccggttgcttgtcccaacttcattctggattgttcctgtaccagggacttcttcaggcattggaagggatctcacctgaacttggacctacgcttgatactctgcagctggatgttgcggattttgctactactatctggcagcaaatggaagagcttgggatggccccagcgttgcagccaacccaaggcgccatgcccgcatttgcttcggcctttcaacgtagagcaggtggtgtgctggtggcttcgcacctccagagcttcctggaggtgagctaccgcgtgctgcgccatcttgcacagcca

SEQ ID NO: 9982 - DNA, 612 bp, synthetic construct
  misc_feature 1..612: note = source = /note="Description of Artificial Sequence: Synthetic coding sequence"
  source 1..612: mol_type = other DNA
atggcaggaccagcaacccagtcgcctatgaagctgatggcactccagttgctgctgtggcactcggctctgtggactgttcaagaggcaaccccgctgggcccggcaagctcattgccgcagtcgttcctgttgaagtgtctcgagcaagtccgaaaaatccaaggtgatggggcagctctgcaggagaaactgtgcgcaacttacaagctgtgtcatcctgaagaattggtgttgcttggtcattccctgggtatcccttgggccccgctttcctcgtgccctagccaggcactgcaacttgctggttgtctctcccaactgcattccgggctgttcctttaccagggactccttcaagcgctcgaaggtatttccccagaactgggcccaaccctcgacacccttcaactggatgtcgcagactttgcaacgactatttggcagcagatggaagagttgggaatggccccggcacttcaaccaactcaaggagctatgccggcattcgcgtcagcattccaaagacgcgccggaggagtgctcgtggcctcccatctccagtcgtttctggaggtgtcgtatcgggtgctcagacaccttgcccagcct

SEQ ID NO: 9983 - DNA, 612 bp, synthetic construct
  misc_feature 1..612: note = source = /note="Description of Artificial Sequence: Synthetic coding sequence"
  source 1..612: mol_type = other DNA
atggcaggtccagccacccaatcgccaatgaagctgatggcactgcaactgctgctgtggcattccgccctgtggaccgtgcaggaagcaactccgctgggaccagcgtcgtccctgccgcagtcctttctgctcaagtgccttgaacaggtgcggaagatccaaggagatggggccgccctgcaggaaaaactttgcgcgacctacaagctctgccacccggaggagttggttctgctgggacactcactgggaatcccgtgggctccactgagctcatgtccatctcaggcactccagctcgccggttgcttgtcgcagctgcattcaggactgttcctgtaccagggacttttgcaggctttggagggcatctcgcctgaactgggcccgaccctggacacgctgcagctggatgtggcagactttgccactactatctggcagcaaatggaggaactcgggatggcacctgccctgcagccaactcaaggagccatgccggccttcgcgtccgccttccagcgccgggccggaggagtgcttgtggcgtcgcacctgcaaagtttcctggaggtgtcgtaccgggtcctgcggcaccttgctcagccg

SEQ ID NO: 9984 - DNA, 612 bp, synthetic construct
  misc_feature 1..612: note = source = /note="Description of Artificial Sequence: Synthetic coding sequence"
  source 1..612: mol_type = other DNA
atggcgggaccggccacccagtctccgatgaaactgatggctctgcaactgctgctttggcattccgccttgtggaccgtgcaagaagcgacccctctcggaccggcctcgagcctgccccagtcctttctgctgaagtgtctcgaacaggtgaggaagatccagggagacggtgccgccttgcaggagaaactgtgtgcaacctacaagctctgccacccggaggaactcgtcttgctcggtcactcgctgggcataccctgggcaccactctcatcatgccctagccaggccctgcagctggcgggatgcttgtcccaactgcactcgggcctgttcctctaccagggcctcttgcaagcccttgaaggaatttcccctgagctcgggccgacgcttgacactcttcaactggatgtggccgacttcgcaactaccatctggcaacaaatggaagaacttgggatggcaccggctctccagccgactcagggagcgatgccagcgttcgcttcagcttttcagcgccgggcgggaggtgtgcttgtcgcctcgcacttgcagagtttcctggaggtgtcttaccgggttttgcgccatctcgcccaaccg

SEQ ID NO: 9985 - DNA, 612 bp, synthetic construct
  misc_feature 1..612: note = source = /note="Description of Artificial Sequence: Synthetic coding sequence"
  source 1..612: mol_type = other DNA
atggccggaccagccactcagtctcctatgaaacttatggccctgcagctcctcttgtggcactcagcactttggactgtccaagaggcaacgccgctgggaccggcttcatcactgccgcagtcatttctcctcaagtgccttgagcaagtgcgcaaaatccaaggagacggcgcagcgctgcaggagaagctgtgtgccacttacaagctctgtcatccggaagaactggtgcttctgggccatagcctcggtattccctgggcccccctgtcatcgtgcccttcgcaggcactgcagctggcaggatgcttgtcgcaactccacagcggactgtttctgtaccaaggattgctgcaggcactcgagggcatttcaccggaactcggccccacccttgacaccttgcaattggacgtggctgatttcgcgactaccatctggcagcagatggaggaactggggatggctccggctcttcaaccaacccagggtgcaatgccggcttttgcctcagccttccaaagacgcgccggtggagtcctcgtggcctcccacctgcaatcttttttggaagtgtcctaccgcgtcctgcggcacctggcccaaccg

SEQ ID NO: 9986 - DNA, 612 bp, synthetic construct
  misc_feature 1..612: note = source = /note="Description of Artificial Sequence: Synthetic coding sequence"
  source 1..612: mol_type = other DNA
atggctggtccagccactcagtctcccatgaagctgatggccctgcagctgctgttatggcattcagccttgtggactgtgcaggaggcaacaccactcggcccagcgtcttcgttacctcaatccttcttactgaagtgcctcgaacaagtcaggaagatccagggcgatggcgcagccctccaggaaaaactgtgcgctacgtacaaactgtgccatcccgaggagctggtgctcctgggccattcactgggtatcccttgggcccccttatcctcatgcccttcacaggcccttcagcttgccggttgtctgtcccagctgcacagtggactgtttctgtaccagggactgttgcaggccctggagggtattagccccgaactgggaccaaccctggacaccctccagctggacgtcgccgattttgcgactactatatggcagcagatggaagaattgggtatggcaccagctcttcagccaacgcagggggctatgccagcctttgcttccgccttccaacggcgcgccggcggcgtactggtggcctcacacttgcagtcttttctggaggtgtcttatcgcgttctaagacatctggcacagcct

SEQ ID NO: 9987 - DNA, 612 bp, synthetic construct
  misc_feature 1..612: note = source = /note="Description of Artificial Sequence: Synthetic coding sequence"
  source 1..612: mol_type = other DNA
atggctggacctgctacgcaatctccaatgaaacttatggcattacaattacttctttggcatagtgcattatggactgttcaagaagcaacaccattaggtccagcaagttcacttccacaatcttttttattaaagtgtcttgaacaagtcagaaaaattcagggagatggagcagcattacaagaaaaactttgtgctacttataaattatgccacccagaagaattagttttgttaggacattcattaggaattccttgggctccattaagttcttgtccatcacaagcactacaattagctggatgtttaagtcaacttcattcaggactttttctttatcaaggactcttacaagcacttgaaggaatttctcctgaacttggtccaacactagatactttacaattggatgttgcagattttgcaactactatttggcaacaaatggaagaacttggaatggctccagcattacagccaactcaaggagcaatgccagcttttgcaagtgcttttcaaagaagagcaggaggagttttagttgcttcacatttgcaaagttttttagaagttagttatcgtgtattaagacatctagcacaacca

SEQ ID NO: 9988 - DNA, 612 bp, synthetic construct
  misc_feature 1..612: note = source = /note="Description of Artificial Sequence: Synthetic coding sequence"
  source 1..612: mol_type = other DNA
atggctggaccggctactcagtccccgatgaaattgatggccctccaattgctcctctggcattccgctctgtggactgtacaggaagccaccccacttggaccggcgtcaagcctgcctcagtcgtttctcttgaagtgcctcgaacaggtcagaaagatccagggagatggtgcagcactgcaggaaaaactttgcgcgacttacaagctgtgccatcctgaggaacttgtcctgctcggacactcgctgggaatcccatgggcccccctctcatcatgcccgtcgcaagctctgcaattggctggatgtctgagccagctccatagcggcctttttctctaccagggcctgctccaggctctggagggaatctctcctgaactcgggccaaccctggataccctgcagttggacgtggcggacttcgccaccaccatttggcaacagatggaagagctgggtatggctccagcattgcaacctactcagggggcaatgccggctttcgcctcggcgttccagcggcgcgccgggggcgtgcttgtggcttcacatcttcaatccttcctggaggtgagctatagagtgctgaggcacttggcacagccg

SEQ ID NO: 9989 - DNA, 612 bp, synthetic construct
  misc_feature 1..612: note = source = /note="Description of Artificial Sequence: Synthetic coding sequence"
  source 1..612: mol_type = other DNA
atggccggcccggctactcaatctccaatgaagcttatggctcttcagttgcttttatggcactcggctctatggaccgtccaggaagccacaccgctggggcctgcaagttcgttaccccaatcgttcttgctgaaatgtcttgagcaggttagaaagatccagggggatggcgccgcgctccaggagaagctgtgcgcgacatacaaactttgccacccggaggagttggtgctgctggggcatagcctaggaataccttgggccccgctgtcaagctgtcccagccaggcactgcagctggccgggtgtctttctcagttgcactctggcctctttctctaccagggactgctgcaagccctcgaaggcattagccccgaactcggcccgactctggatactctccaacttgacgtggcagattttgccacgactatatggcagcagatggaggagttgggcatggcacccgcactgcagcccactcagggagccatgccggcttttgcatcagccttccagcgcagggctggcggggtgctcgtggctagccacctccaatcttttctggaggtgtcatacagagtgctgcggcacctcgcccagcct

SEQ ID NO: 9990 - DNA, 612 bp, synthetic construct
  misc_feature 1..612: note = source = /note="Description of Artificial Sequence: Synthetic coding sequence"
  source 1..612: mol_type = other DNA
atggcggggccggctacccaatcaccgatgaagctgatggcgttacagcttcttctgtggcactctgcgttgtggactgttcaagaagcgaccccgttggggccagcatcatcacttcctcaatcttttctgctcaaatgtctagaacaagtgaggaaaattcaaggcgatggcgcggccttacaggaaaaactgtgtgcgacttataagttgtgccacccggaggagttggtgttgttaggccatagtctaggaatcccatgggctccgttgtcatcgtgcccaagtcaagcactgcagctggccgggtgtctttctcagctgcactcgggccttttcttatatcaaggactgcttcaagcgctggagggtatctcccctgagctaggcccgactttggatacgcttcagcttgacgtagcagattttgctacgacgatttggcaacaaatggaagaattaggtatggcaccggcgttacaaccaacgcagggagcaatgcctgcgtttgcgtctgcgtttcaacgtcgtgcaggcggtgttttagttgcctctcacctgcaatcttttctggaggtctcataccgcgtcttgaggcacttagcacagcct

SEQ ID NO: 9991 - DNA, 612 bp, synthetic construct
  misc_feature 1..612: note = source = /note="Description of Artificial Sequence: Synthetic coding sequence"
  source 1..612: mol_type = other DNA
atggcaggccccgcaacgcagagcccaatgaagctgatggctctgcagttgctgttgtggcactctgctctgtggacggttcaggaggctacccccctgggcccggcaagcagcctgccacagtctttcctcctgaagtgccttgaacaggttaggaaaatccagggcgacggcgctgctttgcaggagaagctttgtgcgacctacaagctgtgccacccagaagagctcgtgctgttgggtcactccctgggaatcccctgggccccacttagcagctgcccaagccaggctctccaactggctggttgtctgtctcagcttcattctggtcttttcctttatcagggcctgcttcaagctcttgaaggaataagccctgagctgggaccgacactggacacactgcagctggatgtagccgacttcgctacgactatctggcagcaaatggaagaactcgggatggccccggctctgcagccaacccagggtgcgatgccagccttcgcatcagctttccagcgcagggccggcggggtgcttgttgcgagtcaccttcaatcctttctggaagtatcatatagggtcctcaggcatctggcgcagcct

SEQ ID NO: 9992 - DNA, 612 bp, synthetic construct
  misc_feature 1..612: note = source = /note="Description of Artificial Sequence: Synthetic coding sequence"
  source 1..612: mol_type = other DNA
atggcaggtccagccactcagtcaccaatgaaactgatggcgctccagctcctgctgtggcacagtgccttgtggaccgtgcaggaagctactccattaggtccggccagctccctgccacagagctttctgcttaagtgcctcgagcaggtgcgcaagatccaaggtgacggtgctgccctgcaagaaaaactgtgcgcaacatataaactttgtcatcccgaagaactggtactgctggggcacagcttgggtataccatgggccccgctgagctcctgccctagccaggctctgcaactggcgggttgcctgagccagctgcactctggtctgttcttgtatcagggattgttgcaagccctggaaggcattagcccagagcttggcccaacccttgacactttgcagctggacgtggccgacttcgcaaccacaatttggcaacagatggaggaactcggcatggccccggcactccaaccaactcagggtgccatgcctgcatttgcatcagcgtttcagcggcgtgccggcggggtgctggttgcaagccatctccagtcttttctcgaggtgtcctaccgtgtcctgcgtcatctagctcagcca

SEQ ID NO: 9993 - DNA, 612 bp, synthetic construct
  misc_feature 1..612: note = source = /note="Description of Artificial Sequence: Synthetic coding sequence"
  source 1..612: mol_type = other DNA
atggctggccctgccacgcagtcccccatgaagctgatggcccttcaattactcctctggcattccgcactgtggacagtgcaggaagcgacaccgctcggacctgcctcttcactcccccaatccttcttgctcaaatgcctcgaacaggtgaggaagatccagggcgatggcgccgcactgcaggaaaagctgtgcgccacatataagctctgccaccctgaagaactggtcttgctgggacattctcttggaattccctgggcacctctatcatcttgtccctctcaggcactacagttagccgggtgtctgtcccagctccacagcggtctcttcttatatcaaggccttctgcaggcgctggaagggatctctcctgagcttgggcctaccctcgatacactgcagttagacgtggccgacttcgccaccaccatatggcagcaaatggaagagcttggcatggcacctgccttacagcccacccagggtgccatgcctgcctttgccagcgcatttcagcggcgggctggtggcgtgttggtagcctctcacttgcagtcatttctggaggtaagctatcgtgtacttaggcatctcgcccagcca

SEQ ID NO: 9994 - DNA, 612 bp, synthetic construct
  misc_feature 1..612: note = source = /note="Description of Artificial Sequence: Synthetic coding sequence"
  source 1..612: mol_type = other DNA
atggccggcccggccactcaatcgccaatgaagctcatggctctgcagcttctcttgtggcactccgctttgtggaccgtccaagaagcgaccccgctgggtccggcctcctctcttcctcagtccttcttgctcaagtgcctcgagcaagtgcgcaagattcaaggggacggagccgctctccaggaaaagctctgtgccacgtacaaactctgccaccccgaggagctggtcctcctggggcatagcctgggcatcccatgggcgcctctgtcatcttgcccctcgcaagctctgcaactggccggttgtctgtcgcagttgcatagtggactcttcctgtaccaggggctgctgcaggccctggagggaatcagccctgagcttgggcccaccctcgacactcttcagctggatgtggcggatttcgcgactaccatctggcagcagatggaggagcttggcatggcgccagcgctgcagccgacccagggtgctatgccggcatttgcctcggcatttcaacgacgtgcgggtggagtgctggtggcctcccatctccagtccttcctggaagtctcataccgggtgctgcggcacctggcccaaccc

SEQ ID NO: 9995 - DNA, 612 bp, synthetic construct
  misc_feature 1..612: note = source = /note="Description of Artificial Sequence: Synthetic coding sequence"
  source 1..612: mol_type = other DNA
atggctggccctgctacacaatcacctatgaagctgatggcccttcagttgctgctctggcactccgccttgtggacagttcaggaggccacacccctggggcccgcttcctcgctgccgcagtcgtttctattaaagtgccttgaacaagtaagaaagatccagggagatggcgcagctcttcaggagaaactttgcgctacctataagttgtgccatcctgaggagctggttctactcggccattcgttaggcataccctgggctccactgagtagctgtccaagtcaagcccttcagctagctggttgcctgtcccagctgcactccggcctgtttctctatcagggcctgttgcaggccctggagggcatctctccagaactgggaccaaccctggatacactgcagttggacgtggccgacttcgcgacaacaatctggcagcagatggaggaactgggtatggctcccgccctgcagcccacacaaggcgctatgccggcatttgccagcgccttccagcgaagggcagggggggtgcttgtcgcctcccacctgcagtcattcctcgaagtgtcatatcgggtactacgccacttagctcagcca

SEQ ID NO: 9996 - DNA, 612 bp, synthetic construct
  misc_feature 1..612: note = source = /note="Description of Artificial Sequence: Synthetic coding sequence"
  source 1..612: mol_type = other DNA
atggcgggtcctgccacccagtcgcctatgaaactaatggcgcttcagttgttgctctggcactccgcactgtggaccgttcaggaagctacccctctcggaccggcttcttccctgccgcagtcgttcctgctcaagtgcttggagcaagtgcgaaagattcagggagacggagccgctctacaagagaagctttgcgccacctataaactgtgccatcctgaggagctggtgttgctcggccattcgttggggatcccctgggcgcccctcagttcctgcccatcccaagcactgcagctcgccggttgcctgagccagctccattctggcttgtttttgtaccagggcctgctgcaggctctcgaaggaatctcccccgaactgggtcccacactggataccctccagctggacgtggctgatttcgctaccaccatctggcagcagatggaagagcttggtatggcccctgctctccagccgacccagggtgctatgccggcattcgcctctgcattccagcgtagggcggggggggttcttgtggccagccacctgcagtccttcctggaggtgagctaccgcgtcctgcgtcacctggcccaacct

SEQ ID NO: 9997 - DNA, 612 bp, synthetic construct
  misc_feature 1..612: note = source = /note="Description of Artificial Sequence: Synthetic coding sequence"
  source 1..612: mol_type = other DNA
atggccggccctgcaactcaatcacctatgaagctcatggcattgcagttgctcctctggcactcggcactttggaccgtgcaggaagcgacccccctgggacctgcaagctcgctgccacaatcgtttctgctcaagtgccttgaacaggtgagaaagatacagggagatggagccgcacttcaagaaaagctctgtgcgacgtataaactgtgccacccagaggaacttgtgctgctgggtcacagcctgggaattccctgggcacctctgtcctcttgcccttcccaagcacttcagcttgctggttgtctttcccaactgcattccggtcttttcctttaccagggactcctgcaagcactggaagggatttcaccggagctcggtcccaccctcgacaccctgcaacttgatgttgcagactttgccaccactatctggcaacaaatggaggaactcggaatggcacctgcactgcaacccacccagggcgccatgccagcatttgccagcgccttccagcgccgcgccggaggtgtgctggtggcctcccatttgcagagctttttggaggtgtcgtaccgcgtgctgagacacttggcccagcca

SEQ ID NO: 9998 - DNA, 612 bp, synthetic construct
  misc_feature 1..612: note = source = /note="Description of Artificial Sequence: Synthetic coding sequence"
  source 1..612: mol_type = other DNA
atggcggggccggccactcagtcaccaatgaaactcatggcactgcagcttctcctctggcattccgcgctgtggacggtgcaagaggcgactcctctgggaccggcctcatcgctgccacaatcttttctcctgaaatgtctggagcaagtgcggaaaatccagggagacggcgccgctctccaagagaagctgtgcgctacctacaagctgtgccacccggaggaactcgttctgctcggccactcgctcggtatcccgtgggctcctctcagctcgtgcccgtcgcaagcgttgcaactggcaggctgcctgtcgcagttgcactcgggactcttcttgtatcagggcctgctccaggcactggaagggatcagcccggaactcggaccaactctcgacactctgcagctggacgtcgctgattttgctaccaccatctggcagcagatggaggagctgggtatggcgccggctctgcagccaacccaaggagccatgccggccttcgcgtcggccttccaacggcgggccgggggagtgctggtggcctcccacctgcagagctttctggaggtgtcgtacagggtgctgcgccacttggcacagccg

SEQ ID NO: 9999 - DNA, 612 bp, synthetic construct
  misc_feature 1..612: note = source = /note="Description of Artificial Sequence: Synthetic coding sequence"
  source 1..612: mol_type = other DNA
atggccggacccgcgactcagagcccaatgaagctgatggctcttcagctgctgctgtggcattccgccctgtggaccgtccaggaggctactccgctgggaccggcatccagcctcccacagtcgtttcttctcaagtgcctggagcaggttcggaagatccagggcgacggagcagctctccaggaaaaactctgcgccacctacaagctctgtcacccggaggagctggtcctgctgggacactcgctggggattccctgggctccgctgtcgtcctgcccttctcaggcgctgcagctcgctggttgcctgagccagctgcactcgggactgttcctgtaccagggcttgcttcaggcactggaaggcatctcgcctgaactgggaccaaccctggacacgttgcagctggatgtggcagacttcgcgactactatctggcagcagatggaggaactgggaatggcgcccgccctgcagccgacccagggagcgatgcccgccttcgcctcggcgttccaaaggagagctggaggtgtgctggtcgcctcacacctgcagagctttctcgaagtgagctacagagtcctgcgccatttggctcagcct

SEQ ID NO: 10000 - DNA, 612 bp, synthetic construct
  misc_feature 1..612: note = source = /note="Description of Artificial Sequence: Synthetic coding sequence"
  source 1..612: mol_type = other DNA
atggcagggcccgcaacccaatcaccgatgaaactgatggccctccagcttctcctgtggcattcagccctgtggacagtacaggaggcaacacctctggggcccgcaagtagtctgccccagagttttctgttgaagtgtttggagcaagtgagaaaaattcaaggcgacggtgccgcccttcaggagaagctctgcgctacatacaaactgtgtcacccagaggaactcgtgctgctgggacactcgctgggaattccctgggccccactctcttcctgccctagtcaggcactgcagctggctggttgtctgtcacagttacactccggacttttcctctaccaggggcttctgcaggcactagagggcatatctcctgagcttggacccaccttagatacgttgcagcttgatgtggccgacttcgccacgactatctggcagcagatggaggagctgggtatggcgccagcattgcagccaacacagggcgccatgcctgcctttgcatctgcctttcagcggcgcgctggcggcgtgctagtagccagccacctccagagtttcctggaagttagctatcgggtgctgcgccatctggcccagcct

SEQ ID NO: 10001 - DNA, 612 bp, synthetic construct
  misc_feature 1..612: note = source = /note="Description of Artificial Sequence: Synthetic coding sequence"
  source 1..612: mol_type = other DNA
atggctggaccggccacccaatcccccatgaagctgatggctctccagctgcttctttggcactcggcgctgtggaccgtccaggaggccactccgctgggaccggcctcctccttgccacagtccttcctcctgaaatgcctggaacaagtccgcaagatccagggagacggagccgccctccaagagaaactctgtgcaacctacaagttgtgccacccagaggaactggttctgctcggacactcgcttggcatcccatgggcgccattgagtagctgcccttcgcaggccctccagctcgcgggctgcttgagccagctgcattcggggctgttcctctaccaggggctgctgcaggctttggagggaatcagcccggaactgggaccgaccctggatactctccagctcgacgtcgctgatttcgctactactatttggcaacaaatggaggagctcggcatggcccccgccctgcaaccgactcaaggcgcgatgcccgcttttgcgagcgctttccagaggagggccggaggggtgctggtcgccagccacctgcagtcgttccttgaagtgtcataccgcgtgctgcgccacttggcacagccg

SEQ ID NO: 10002 - DNA, 612 bp, synthetic construct
  misc_feature 1..612: note = source = /note="Description of Artificial Sequence: Synthetic coding sequence"
  source 1..612: mol_type = other DNA
atggccggcccggctacccaaagtcctatgaagctgatggcattacagttgcttctgtggcactcagcgctctggacggttcaagaagctaccccccttggtcccgcttctagtctaccccaatcctttcttttgaagtgcttggagcaagttagaaaaatccagggtgatggcgctgcattacaggagaagttgtgtgcaacttataaattgtgccatccagaggagctggtgctcttgggtcattcccttgggatcccatgggccccgctttcaagttgtccaagccaggctttgcaactcgctggctgcctttcacaattgcattcgggtttgtttttgtatcagggattgttgcaggctctggaaggtattagcccagagcttgggcctaccctcgacactctccaactagatgtagccgactttgcgacgaccatttggcaacaaatggaagagttgggtatggcccctgccttgcagcctacacaaggagctatgcctgcatttgcttcagcttttcagagacgtgccggtggtgtcttagtggcaagccacttgcaatctttcttggaagtgtcatatagggtgctcagacatttggcccaaccg

SEQ ID NO: 10003 - DNA, 612 bp, synthetic construct
  misc_feature 1..612: note = source = /note="Description of Artificial Sequence: Synthetic coding sequence"
  source 1..612: mol_type = other DNA
atggcaggacctgcaacccagtcaccgatgaagctgatggccctccaactgcttctttggcactcagcgctttggactgtgcaggaagctacccctctcgggcctgcaagctcactgccacaatcgttcctgctcaagtgcctggaacaggtgaggaagatacaaggggatggggcagctcttcaggagaagctgtgcgcgacttacaaactttgtcatcctgaagaacttgtgctcttgggacacagcttgggaattccatgggccccactctcgagctgtcccagccaggctctgcaactggctggctgcctgtcccagttgcattcgggacttttcctttatcaaggacttctgcaagcactggagggaatttcccctgaactgggtcctactcttgatactcttcaacttgacgtggcagattttgccaccactatatggcagcagatggaagagctcggtatggcacctgcactccaaccaacccagggggcaatgcccgcatttgcctcagcatttcaaaggcgggccgggggcgtccttgtcgcctcacatttgcaaagttttttggaggtgtcctaccgagtgcttcgccacctcgctcaacct

SEQ ID NO: 10004 - DNA, 612 bp, synthetic construct
  misc_feature 1..612: note = source = /note="Description of Artificial Sequence: Synthetic coding sequence"
  source 1..612: mol_type = other DNA
atggctggaccagccactcagagtcctatgaagcttatggccctgcagctgctgttgtggcactctgctttgtggaccgtgcaggaggcaacccctctgggaccagcctcaagcctgccacagagtttcctgctgaaatgcctggagcaggttagaaaaatacagggagacggcgctgcgctgcaagagaagctgtgcgctacatataagctgtgtcatccagaggagctggtcctgctcggccacagtcttggaatcccatgggcacccctgtcatcttgcccttcacaggctctgcagttggctggctgtctctctcagctgcacagtggtctgttcctgtaccagggccttctccaagctcttgagggaatctctcctgagcttggcccaacactggatacactccaattggatgtggccgattttgcaactaccatctggcaacaaatggaggagcttggaatggcacctgccctgcagcctacccagggcgcaatgccagccttcgcctccgcctttcagcgtagagctggtggcgttctggtggcttcgcatcttcagagcttcctggaggtgagctaccgggtgcttagacacctggctcagccg

SEQ ID NO: 10005 - DNA, 612 bp, synthetic construct
  misc_feature 1..612: note = source = /note="Description of Artificial Sequence: Synthetic coding sequence"
  source 1..612: mol_type = other DNA
atggcaggccctgccactcagtctccaatgaagctcatggcactccagttactgctgtggcacagcgcgttatggaccgttcaggaggccacaccactcgggccagcttcatctttgccccagagtttcctgttaaagtgtctggaacaggttcgcaaaatacagggcgatggcgctgccctgcaggaaaagctgtgtgccacctataaactctgccaccccgaggaactggtgttgctgggccattcgctgggcataccctgggctccactgagctcttgccccagccaggccttgcagctcgccggatgtctgtcacagcttcacagcggacttttcctgtatcagggactgttacaggccctggaggggattagtcccgaattgggccccacgctcgacactctgcaactagacgtggccgactttgcgactactatttggcagcagatggaggagcttggcatggctcccgccctccaaccaacgcagggtgccatgcccgcctttgcatccgcattccagcgtagagctggcggtgtcctggtagcctcccatttgcagtctttcctggaagtctcttacagggtcttacggcatctcgcgcagccc

SEQ ID NO: 10006 - DNA, 612 bp, synthetic construct
  misc_feature 1..612: note = source = /note="Description of Artificial Sequence: Synthetic coding sequence"
  source 1..612: mol_type = other DNA
atggccggccctgctacacaaagtcctatgaagctgatggccctccagctgctcctctggcatagcgctttgtggaccgtgcaagaagccaccccgttgggacctgcgtcctcactgcctcaatcttttctgcttaagtgcttagaacaggtccgaaaaatccagggagatggcgcagcactacaagaaaagctctgcgcaacttacaagctctgtcatcctgaagagctggtgctactcggacatagccttggtattccctgggctcccctttcttcctgccccagccaggcactgcagctggcagggtgtctcagccagcttcacagtggactcttcctgtatcagggcctcctgcaggctctcgaggggatttcacccgagctgggaccgaccttggacacattacagttggatgtggcagacttcgctacgacaatctggcagcaaatggaggagctggggatggcgcccgctttgcagcccacgcagggcgccatgcccgccttcgcatctgcatttcaacgtagggctggcggtgtgctagtggcttcccatctgcagtctttcctggaagtctcttacagggtactccgccatctggcacaacct

SEQ ID NO: 10007 - DNA, 612 bp, synthetic construct
  misc_feature 1..612: note = source = /note="Description of Artificial Sequence: Synthetic coding sequence"
  source 1..612: mol_type = other DNA
atggcaggtccagccacccagtctcccatgaaactgatggctctgcagcttctgctatggcactcagccctgtggacggtgcaagaggccacccccctgggaccggctagcagtcttccccaatccttcctcctcaagtgccttgagcaggtgcggaaaatccagggagatggagccgctctgcaagaaaaactttgcgccacctacaagttatgtcatcctgaggaacttgtacttctgggacacagcctgggtattccatgggcccccctgtcaagttgcccttcccaagcccttcagcttgccggttgcctgtcacagctgcactccgggcttttcctctaccagggcctgcttcaggcgctggagggtatttcacccgagttggggccaaccctggatacactccagctcgatgtggcagattttgcgactaccatctggcagcagatggaagaattggggatggcccctgccctacaacccacgcagggcgccatgcctgcgttcgcaagtgcctttcagaggcgggctggaggcgtactcgtggccagtcacctccagtcattcctggaggtgagctaccgggtgttacgccacttggcccaacct

SEQ ID NO: 10008 - DNA, 612 bp, synthetic construct; identical to SEQ ID NO: 9980
  misc_feature 1..612: note = source = /note="Description of Artificial Sequence: Synthetic coding sequence"
  source 1..612: mol_type = other DNA

SEQ ID NO: 10009 - DNA, 612 bp, synthetic construct
  misc_feature 1..612: note = source = /note="Description of Artificial Sequence: Synthetic coding sequence"
  source 1..612: mol_type = other DNA
atggcgggacccgctacccagtctccgatgaagctcatggctttgcagctcttactgtggcatagtgccctttggaccgtgcaagaagccaccccactgggccctgcaagctctctgccacaaagtttcctcctcaagtgcttagagcaggtacggaagattcaaggcgatggtgcagccctgcaggagaagctgtgcgctacttacaaactctgccaccctgaagaactcgtcctgctgggccattcacttggaattccctgggcgccactatctagttgtcctagccaagcactgcaactcgccggttgcctcagccagttgcattctggcctgtttctttatcagggattgcttcaggcacttgaagggatcagtccagagttaggcccaactctcgacaccttacagctcgatgtggccgactttgccaccactatctggcagcaaatggaggagctggggatggccccagcactgcagcctacccaaggggccatgcctgccttcgcttccgcttttcagcgcagagccgggggcgtgcttgtggcttcacacctgcagtcgtttctcgaggtctcctatagggtactgagacacctcgcacaaccc

SEQ ID NO: 10010 - DNA, 612 bp, synthetic construct
  misc_feature 1..612: note = source = /note="Description of Artificial Sequence: Synthetic coding sequence"
  source 1..612: mol_type = other DNA
atggcgggtccggcgacgcaatcgccgatgaaactaatggcgctacaattattactatggcattcggcgttatggacggttcaagaagcgacgccgctaggtccggcgtcgtcgttaccgcaatcgtttctattaaaatgtttagaacaagttcgtaaaatacaaggtgatggtgcggcgttacaagaaaaattatgtgcgacgtataaactatgtcatccggaagaattagtactactaggtcattcgctaggtataccgtgggcgccgctatcgtcgtgtccgtcgcaagcgctacaattagcgggttgtttatcgcaattacattcgggtttatttttatatcaaggtttattacaagcgttagaaggtatatcgccggaattaggtccgacgttagatacgttacaactagatgttgcggattttgcgacgacgatatggcaacaaatggaagaattaggtatggcgccggcgctacaaccgacgcaaggtgcgatgccggcgtttgcgtcggcgtttcaacgtcgtgcgggtggtgttttagtagcgtcgcatttacaatcgtttttagaagtatcgtatcgtgtactacgtcatctagcgcaaccg

SEQ ID NO: 10011 - DNA, 612 bp, synthetic construct
  misc_feature 1..612: note = source = /note="Description of Artificial Sequence: Synthetic coding sequence"
  source 1..612: mol_type = other DNA
atggccggacctgccacccagagcccgatgaaactgatggccctgcaactgctgctgtggcactcggctctgtggaccgtgcaagaggccactccactggggccggcgagcagcctcccgcaatcattcctgctcaagtgccttgagcaggtgcgcaagatccagggtgacggtgccgcactgcaggaaaagctgtgcgctacttacaagctgtgccaccccgaggagctcgtgctcctgggacattccctcggcatcccgtgggctccgttgtcgtcatgcccgtcgcaggctctccagctcgcgggctgtttgtcgcaactgcactctgggctgttcctctatcaaggactgttgcaggcccttgaggggatcagccccgaactgggtccgactctggacaccctgcagctcgatgtggccgattttgcaaccaccatctggcaacagatggaagagctgggaatggcaccagcgctccagccaacccagggcgccatgccggctttcgcctcggcgtttcaacggcgcgcgggcggagtgcttgtcgcttcgcatttgcagtccttccttgaagtgtcgtaccgggtgctgagacacctggcacaacct

SEQ ID NO: 10012 - DNA, 612 bp, synthetic construct
  misc_feature 1..612: note = source = /note="Description of Artificial Sequence: Synthetic coding sequence"
  source 1..612: mol_type = other DNA
atggcaggtcccgctacacagagccccatgaaactgatggctttgcaactcctgctgtggcattcagccctgtggaccgttcaggaggctacccccctgggtcctgcttctagccttcctcaatcatttctgctcaagtgtctcgaacaagtaagaaagatccagggtgatggagctgccctgcaagaaaagctgtgtgccacttataaactttgccatcccgaagagctggtgttgctgggccattcccttggcataccctgggctccacttagttcatgcccttcacaagctctccagttggctggctgcctgtcacaacttcattcaggactctttttgtaccaaggcctgctgcaggccctggagggtatctcccctgagctgggccccacactggacacactgcagctggatgttgctgactttgccactaccatctggcagcagatggaagaactgggtatggctccagccctgcagcccactcagggcgctatgcctgcattcgctagtgccttccaaaggagagcaggcggtgtgctggtggcctctcatctgcaatcattcctggaagtgtcttaccgtgtgctgcgccatttggcccagccc

SEQ ID NO: 10013 - DNA, 612 bp, synthetic construct
  misc_feature 1..612: note = source = /note="Description of Artificial Sequence: Synthetic coding sequence"
  source 1..612: mol_type = other DNA
atggctggccccgccacgcagagtccaatgaagttgatggcgctgcagttgctcctgtggcactccgccctttggactgtgcaggaggctacccctttggggccggcatcctctctcccgcagtcgtttctgcttaagtgtctcgaacaggtccgaaagattcagggggacggagccgccctgcaggagaaactctgtgccacctacaagctgtgtcaccctgaggagcttgtacttctgggccactcgctgggaatcccctgggcgcctctcagttcttgcccatcacaggcgttgcagttggcaggctgcctgagtcagctgcatagcggtctgttcctctaccaggggctgttgcaggccctggagggaatatcacctgaactcggccccacgctcgataccttgcagctcgatgttgctgacttcgcaaccacgatttggcaacagatggaggagctaggtatggcacctgctctccaaccaacccagggagcgatgccagctttcgctagcgcattccagagacgggctggcggggtcctggtggcatctcatctgcagtcatttctcgaagtaagttaccgcgtactcagacacctggcccagcct

SEQ ID NO: 10014 - DNA, 612 bp, synthetic construct
  misc_feature 1..612: note = source = /note="Description of Artificial Sequence: Synthetic coding sequence"
  source 1..612: mol_type = other DNA
atggcaggtcctgcaacccaatcccccatgaagttgatggcgctgcaacttcttctgtggcactcagcactctggactgtgcaggaagcaactcctctcggtcctgcttccagccttccgcaatccttccttttgaaatgcctggaacaggtcaggaaaatccagggtgatggggcagcgctgcaagaaaagctgtgtgcaacgtacaagttgtgccaccccgaggagctcgtgcttttgggacattctcttgggattccttgggctccactctcatcgtgtccatcccaagcccttcagctggctggatgtctcagccagcttcactccggcctttttctgtaccaaggattgctccaggcgcttgaaggtatttcgccagaactgggtcccaccctggacaccctgcagcttgatgtcgcagattttgccaccactatctggcaacagatggaggaactgggaatggcaccagccctgcagcccacccaaggcgcaatgcctgcatttgcgtctgcgttccaacgaagagccggtggggtgcttgtcgcaagccatctgcaatcctttcttgaggtgtcttaccgcgtgcttcgccacctggcacagcct

SEQ ID NO: 10015 - DNA, 612 bp, synthetic construct
  misc_feature 1..612: note = source = /note="Description of Artificial Sequence: Synthetic coding sequence"
  source 1..612: mol_type = other DNA
atggcaggacctgcaactcagtcacctatgaagctgatggcactgcaattgctcctttggcattccgccctgtggaccgtgcaggaagccactcctcttggacctgcatcaagcctgccacaatcctttctgctcaagtgtctcgaacaagtcaggaagattcaaggagatggagccgcattgcaggaaaagctgtgtgctacctataagctgtgccaccctgaagaacttgtccttcttggtcattcgttgggtatcccgtgggcaccactgtcgtcctgtccatcccaggccctgcaacttgctggatgtctctcccaattgcattcgggactttttctgtaccaggggctgcttcaggcacttgaaggtatttcacccgaacttggacctaccctggacacccttcaacttgatgtcgcagattttgcaaccaccatctggcaacagatggaagaacttggtatggccccagccctgcaacctacccagggggcaatgcccgcatttgcaagcgctttccaaagacgggcaggtggagtgctggtggcatcgcaccttcagtcctttttggaagtgagctaccgcgtcctgagacatctggcgcaaccc

SEQ ID NO: 10016 - DNA, 612 bp, synthetic construct
  misc_feature 1..612: note = source = /note="Description of Artificial Sequence: Synthetic coding sequence"
  source 1..612: mol_type = other DNA
atggccggtcccgccactcagtcccctatgaagttaatggccttacaattgctgctttggcactcagctttgtggaccgtgcaggaggccacaccgctcgggccggcaagctctttgcctcagtcattcttattaaagtgtctggagcaggtgcggaaaatccagggagacggtgctgcccttcaggaaaaactgtgtgcgacttataagctgtgtcaccctgaggaacttgtcttgttaggccacagcttaggaatcccctgggctcctttaagcagttgtcccagccaggccttgcagttagcagggtgtctcagtcagctccactccggattattcctgtatcaggggctgctgcaggctctcgaagggatctcgcctgagcttgggcccacactcgatactctgcagctcgatgtggccgacttcgcgactactatctggcagcagatggaggaactgggcatggcacccgctctgcagcctactcagggggccatgcctgcctttgcttccgcctttcaaaggagagcgggtggtgtgcttgtggccagtcatcttcagagtttcctggaggttagctaccgagttctgagacacctcgcacagcca

SEQ ID NO: 10017 - DNA, 612 bp, synthetic construct
  misc_feature 1..612: note = source = /note="Description of Artificial Sequence: Synthetic coding sequence"
  source 1..612: mol_type = other DNA
atggccggaccagccactcaaagccccatgaagttaatggcgttgcaactgctgctgtggcacagtgcgttgtggacagtccaagaagccacccccctaggaccagctagctccctccctcagtccttcctgttgaaatgtctcgagcaggtgcgcaaaatccagggagacggtgccgcccttcaggagaaactgtgcgctacgtacaagctttgtcatccagaagagcttgtcctgctgggtcattcgctcggtatcccctgggcccctttaagctcttgtccctctcaggcactccaactcgctggatgtttgtctcagctgcactccggattgttcctgtatcaaggactgttgcaagctctggaggggatctcgccggagctgggtccaaccctggacacactgcagctcgatgtagctgattttgctactaccatctggcaacagatggaggagctgggcatggctccggccctccagccaacacagggagcaatgccggcatttgcgtctgcgttccaacggagggcgggtggcgtgctcgtagcctcccacttgcaaagcttcctggaggtatcctatcgggtgctgcgtcatctggcacaacct

SEQ ID NO: 10018 - DNA, 612 bp, synthetic construct
  misc_feature 1..612: note = source = /note="Description of Artificial Sequence: Synthetic coding sequence"
  source 1..612: mol_type = other DNA
atggcaggtcctgcgacccagagcccgatgaagctgatggccttgcagctcctgctctggcactctgcactgtggaccgttcaggaagctacgccgctcggacccgcttcctcactccctcagtctttcctcttgaagtgcttggaacaagtgagaaagatacaaggagatggagccgctcttcaggagaagctgtgcgcgacatacaagctttgccacccagaggagttggtccttcttggacattctctgggcatcccctgggcaccgttgtcttcatgcccctcccaggccttgcaactggcgggttgtttgtcccaactgcacagcggactgttcctctaccagggtctcttgcaggctttggaaggaatttctccggagctcggacctactttggatacgcttcaactcgatgtggccgacttcgccacaaccatatggcagcagatggaagaattgggaatggcaccagctctccagcctacccaaggcgctatgccagcgtttgcctctgctttccaaagacgcgcgggcggcgtcctggttgcttcccacctgcaatctttcctcgaggtgagctaccgcgtcctcagacacctggcacaaccc

SEQ ID NO: 10019 - DNA, 612 bp, synthetic construct
  misc_feature 1..612: note = source = /note="Description of Artificial Sequence: Synthetic coding sequence"
  source 1..612: mol_type = other DNA
atggctgggccggccacccagtccccaatgaaactaatggccttgcaactcctgctgtggcattcagcgctgtggaccgtgcaggaagcaacccccctgggccctgcttcttctcttccgcagtcttttctgctgaagtgcctggaacaagtccggaagattcaaggagacggtgcggcactgcaggagaaattgtgcgccacatacaaactgtgtcatccagaggaattggttctcctgggccactctctgggaattccctgggctccactgtcctcatgcccaagccaggctctccagctagctggatgtctgtcacaactgcattctggactgttcctgtaccaaggtcttctgcaggctctcgaaggaattagtcccgagctggggcctacgctggatactctgcagcttgacgtcgctgatttcgccactacaatttggcagcagatggaagagttagggatggctccagccctgcagcctacccagggcgccatgcccgcttttgcatctgcatttcagagaagagctgggggcgtactggtggctagccacctgcagagctttcttgaggtcagctacagagtgctgcggcacctggcacagccc

SEQ ID NO: 10020 - DNA, 612 bp, synthetic construct
  misc_feature 1..612: note = source = /note="Description of Artificial Sequence: Synthetic coding sequence"
  source 1..612: mol_type = other DNA
atggccggccctgctacccaatctcccatgaagctgatggccttgcagctgctcctgtggcacagcgctctgtggaccgtccaggaggcgacacccctaggtcccgccagtagccttccacaatctttcctcctcaaatgcttggaacaggtgaggaagatccagggtgatggagccgccctccaggagaagctatgtgctacatataagctctgtcacccagaggagttggtccttctggggcatagcctaggaataccatgggctcccctgagttcctgcccttctcaggccctgcagctggctggttgcctcagtcagctacactcaggactgtttctataccagggcctgctgcaggcactcgagggcatcagtcccgagctgggtcccacactggacacgcttcagctcgatgtggccgactttgctactacaatatggcagcagatggaggaattaggcatggctcccgccctccagcctacccaaggcgccatgcctgcctttgcaagcgcatttcagcggcgcgccggtggtgtgttagtggcaagccaccttcagtcttttctggaagtttcttatcgcgttctgaggcatctcgctcagcct

SEQ ID NO: 10021 - DNA, 612 bp, synthetic construct
  misc_feature 1..612: note = source = /note="Description of Artificial Sequence: Synthetic coding sequence"
  source 1..612: mol_type = other DNA
atggcgggacccgccacccagtcccctatgaagctcatggctctgcaattgctgctctggcactctgctctctggaccgtccaggaagcgactcccctcggaccggcgtcatcgctgccacagtcatttctgctgaagtgcctggagcaagtcagaaagatccagggagacggagcggctcttcaggagaaactgtgtgcgacctacaagctgtgccacccggaagaactggtgctgctgggtcactcactgggcatcccgtgggcaccactgtcatcatgcccgtcgcaggctctgcagcttgcgggatgcctgtcccagctgcattctggcctgttcctctatcagggactcttgcaggcccttgaggggatctcgccagaactgggtccgaccttggacaccttgcagctggatgtggcggatttcgcgaccaccatttggcagcagatggaggaactgggaatggcacccgccctccagccaacccaaggtgccatgccggcattcgccagcgcctttcaacgccgggctggaggagtcctggtcgccagccatctccagagcttcctggaagtgtcctaccgggtgcttaggcacctggcacagccc

SEQ ID NO: 10022 - DNA, 612 bp, synthetic construct
  misc_feature 1..612: note = source = /note="Description of Artificial Sequence: Synthetic coding sequence"
  source 1..612: mol_type = other DNA
atggctggtccagcgactcaatcaccgatgaagctcatggcactgcaactacttctctggcattcggcgctgtggacggttcaagaggctaccccgttgggtccggcttcttccctcccacagagtttcctacttaagtgtctcgagcaagttcgcaaaatccaaggcgatggggccgcgctgcaggagaagttatgtgcaacctacaagttatgccatccagaggaactcgttctcctcggccattccctgggcatcccctgggcgcctttatccagctgcccaagtcaggcgctacaattagcaggctgcctgtcacagttacatagtggcctcttcctttaccagggattacttcaggcgctggaaggcataagtcctgagctcggccccactctggatactcttcaattagatgtggcagattttgccaccacgatttggcaacagatggaagaattgggtatggctcctgctctccagcccacacagggggcaatgccggcctttgcctccgctttccagaggcgagcgggtggagtcctggtcgcctcccatctgcaaagctttctggaagtatcttacagagtgttacggcatctggcccaacca

SEQ ID NO: 10023 - DNA, 612 bp, synthetic construct
  misc_feature 1..612: note = source = /note="Description of Artificial Sequence: Synthetic coding sequence"
  source 1..612: mol_type = other DNA
atggccggaccagccacccagtcgcctatgaagctcatggcattgcagcttctgctttggcatagcgcactgtggaccgtgcaggaggcgaccccgttggggccagctagctcgctgccgcaatctttcctgcttaaatgcttggaacaggtgcgcaagatccagggcgacggagcagctctccaggaaaaactttgcgccacttacaagctgtgccacccagaggagctggtgctgctgggacattcactgggtatcccgtgggccccgctttcctcatgcccgtcgcaggcgctccaacttgcagggtgtctctcacagttgcactcgggtctgtttctctaccagggactgctgcaggcgctcgagggaatctctccggaactgggaccgacgctggacacccttcaactcgatgtcgctgatttcgccactactatttggcaacagatggaagaactcggcatggcacccgccctccagcccacccaaggcgcaatgcctgcattcgcctcggctttccaacgcagggctggcggtgtactcgtggcctctcacctgcaatcctttctggaggtgtcctaccgagtcctgagacaccttgctcaacct

SEQ ID NO: 10024 - DNA, 612 bp, synthetic construct
  misc_feature 1..612: note = source = /note="Description of Artificial Sequence: Synthetic coding sequence"
  source 1..612: mol_type = other DNA
atggccggtcctgccacccagagccccatgaagctgatggcattgcagcttttgctttggcattccgcgttgtggaccgtgcaagaagcaaccccactcgggccagcatcttcgttgccacagtcattcctgctcaaatgtcttgaacaggtgcggaagatccaaggagatggagcagcacttcaagagaaactttgcgccacctacaagctgtgccatcctgaagagcttgtgctgcttggacattcactgggcattccatgggcacccctcagctcctgcccatcgcaggcactgcaactcgctggatgtctttcgcagctgcattcgggtctgttcctttaccaaggactcctccaggctctggagggaatcagcccggagctgggaccaaccctggataccctccagctcgacgtcgcagactttgccaccactatttggcaacagatggaggaactcggaatggcacccgccctgcaaccaacccagggagcaatgccagcttttgcaagcgcatttcaaagacgagcaggaggcgtcctcgtggcgtcgcatcttcagtcgttcctcgaagtgagctacagagtgctgcgtcatctggcgcagcct

SEQ ID NO: 10025 - DNA, 612 bp, synthetic construct
  misc_feature 1..612: note = source = /note="Description of Artificial Sequence: Synthetic coding sequence"
  source 1..612: mol_type = other DNA
atggctggccccgcaacccagagccctatgaagctgatggcgctccagctgctcctctggcacagtgccttgtggaccgtgcaggaagccacaccactggggcccgcgtcctcactgcctcagagtttcctgctcaagtgtctcgagcaggtgcgtaagatacagggtgatggggctgcccttcaagagaagctttgcgccacatataagctctgccatccagaggagctggtcctgttggggcacagcttgggtattccctgggctcccctgtcaagctgcccctcgcaggctttgcaactggccgggtgcctgtctcagctgcacagcggcctttttctgtatcagggcctcttacaggcactggagggaatcagtccagaactggggcctacgctggacacccttcagctggatgtggccgattttgctactacaatatggcagcagatggaagagctgggcatggcccccgccctccagccgacccagggtgcaatgccggcattcgcaagcgcattccaaagaagggcgggcggggttttagtggcaagccatctgcagtccttccttgaagtgtcctatcgcgtgctcaggcatctcgctcaacct

SEQ ID NO: 10026 - DNA, 612 bp, synthetic construct
  misc_feature 1..612: note = source = /note="Description of Artificial Sequence: Synthetic coding sequence"
  source 1..612: mol_type = other DNA
atggccgggcctgctacccaatccccaatgaagctgatggcactccaactgctgctctggcattcggcgctgtggaccgtccaagaggcaacccctctcggacctgcgagcagccttccacagagttttctccttaagtgtttggagcaagtcaggaagatccagggggatggagccgcactgcaagagaaactttgcgcaacctacaaactgtgtcatcctgaagagctggtgcttctcggacactcgcttgggattccctgggcacccctgtctagctgtccatcccaggcgctgcagctcgctggatgtctcagccagctccattcaggtctgtttctttaccagggactgcttcaggcccttgaaggaatctcacccgaacttggacccacgcttgatactctccaactcgatgtcgccgacttcgcaacgacgatttggcaacaaatggaagaacttggtatggccccggcgttgcaaccgactcaaggtgcaatgccagcatttgcgtctgcattccagaggagagccgggggcgtgctggtggcttcgcatcttcaatcttttctcgaagtttcctaccgcgtgcttcgtcacctggcgcagcct

SEQ ID NO: 10027 - DNA, 612 bp, synthetic construct
  misc_feature 1..612: note = source = /note="Description of Artificial Sequence: Synthetic coding sequence"
  source 1..612: mol_type = other DNA
atggctggacctgctactcagagtccgatgaagctgatggccctgcagctgcttctgtggcactccgctctctggaccgtccaagaggccacaccacttgggccagcctcctccctgccgcaatcttttttgctgaagtgcctggagcaggtgcgcaaaatccagggggatggcgctgcactccaggagaaactttgtgctacttacaagctgtgccatcctgaggagctcgtccttctcggccattctctcgggattccgtgggctcctttgtcctcctgcccttcccaagcactccagctggctggttgcctgtctcaactgcacagcggactgttcctctatcaaggtctgctccaggccttggagggtatttcacctgaactcggccctacgctggacacactgcagctggatgtggctgacttcgcaacaacaatctggcagcaaatggaggaactgggcatggcacccgctctccagccaacgcagggggcaatgcctgcattcgccagcgcgttccagaggcgggccggcggcgtactggtggcttcccacttgcagagctttcttgaggtgtcctatagggtgctccggcacttggcccagccc

SEQ ID NO: 10028 - DNA, 612 bp, synthetic construct
  misc_feature 1..612: note = source = /note="Description of Artificial Sequence: Synthetic coding sequence"
  source 1..612: mol_type = other DNA
atggccggccccgcaacccaatcacccatgaaacttatggcacttcagttacttttgtggcattctgcgctgtggaccgtgcaggaggccaccccgcttggtcctgcatctagtctgccccagtcctttttactgaaatgcctggagcaggtgcgaaaaatacagggggatggtgccgcacttcaggaaaagctgtgcgctacgtataaattgtgtcatccagaggagctagttctgttgggacattccctgggcatcccgtgggcacccctgtcctcctgcccttcacaggccctgcagcttgcagggtgcctgagtcagctgcattccggcctctttctctatcagggtttactccaggccctggagggaatcagccccgagttggggccgaccctggatacgctccagctcgacgtcgccgacttcgctactaccatttggcagcagatggaagaactggggatggctccagccctgcagccaacacagggtgctatgcccgcgtttgccagtgcgttccagagacgcgctgggggagtactagtagcaagccacctccagtcgttccttgaggtctcttacagggtgttgcggcatcttgctcagcct

SEQ ID NO: 10029 - DNA, 612 bp, synthetic construct
  misc_feature 1..612: note = source = /note="Description of Artificial Sequence: Synthetic coding sequence"
  source 1..612: mol_type = other DNA
atggctggtcccgccacacagtcgcctatgaaactgatggcactacagctgttactgtggcactcagccctttggacggttcaagaagccacgcccctcggccccgcatcttcgcttccacaatcttttctgcttaagtgcctggaacaggtacgaaagattcaaggagatggcgccgccctccaggagaagttgtgcgccacgtacaagttatgccaccccgaggaattggtgcttctgggacattcgctcggtataccatgggcgccgctctccagctgcccctcccaagcactccagctggccggctgcttgagtcagctgcacagcggtttgttcctataccagggattgctccaagcacttgaggggatttcgccggaactaggcccgaccctggatacgttgcaactcgatgtggctgattttgcaacgacgatctggcagcagatggaggagttgggcatggccccggccctgcagccgacacagggcgcgatgcccgccttcgcatccgccttccagcgacgcgctggaggcgtcctggtcgcctcgcatctgcagagcttcctggaggtcagctacagagttcttcgacatctggcccagccg

SEQ ID NO: 10030 - DNA, 612 bp, synthetic construct
  misc_feature 1..612: note = source = /note="Description of Artificial Sequence: Synthetic coding sequence"
  source 1..612: mol_type = other DNA
atggccggaccagccacccaaagccccatgaagctcatggcgttacaactcctcctctggcactccgctttgtggacggtgcaagaggcgactccactgggaccagcatcatcgctcccacaatcgtttcttttaaagtgcctcgaacaagttcgaaaaatccaaggcgatggtgcagctttgcaagagaagctctgtgcgacatataagctttgccatccggaagaacttgtgttgctgggtcatagcctgggaattccgtgggcgcctctatcatcgtgcccatcacaggccctgcagctcgcaggatgtctttcacaactacattcgggattgtttttgtaccaaggtttgctacaagcgctagaagggatttccccagagctcggaccaacccttgacacattgcaacttgatgtggctgattttgccacaaccatctggcagcagatggaggagcttggtatggctccagcactacagccaactcaaggtgcgatgccagcgttcgcatcagcttttcaaagacgagcaggaggcgttttggtggcttcgcatctacaatcatttttggaagtcagctatcgagtcttgaggcatcttgctcagcca

SEQ ID NO: 10031 - DNA, 612 bp, synthetic construct
  misc_feature 1..612: note = source = /note="Description of Artificial Sequence: Synthetic coding sequence"
  source 1..612: mol_type = other DNA
atggcaggccctgcaactcaatctccaatgaagctcatggcccttcagctgctgttgtggcactcggcactttggaccgtgcaagaggcaacccccctcggaccagcgtcgtcgctgcctcagtcgtttctgctgaagtgtcttgaacaagtgagaaagatccaaggagacggtgccgccctgcaggaaaagctgtgtgccacttacaagctctgccatccagaagaactggtgcttcttggccattctcttggtattccgtgggcgcccctttcgtcatgtccttcccaagcactccaacttgcagggtgtctctcgcaactgcattccggactgtttctctaccagggccttcttcaggcactggagggaatcagccctgaactgggacctaccctggacactctgcagctcgatgtcgcggatttcgccacgactatatggcaacaaatggaggaactcgggatggctcctgcgcttcaacctactcagggggcaatgcctgccttcgcatcggcatttcaacgcagggcaggtggtgtgcttgtcgcaagccatcttcaatcttttctggaagtgtcatatcgggtgttgagacaccttgctcagcca

SEQ ID NO: 10032 - DNA, 612 bp, synthetic construct
  misc_feature 1..612: note = source = /note="Description of Artificial Sequence: Synthetic coding sequence"
  source 1..612: mol_type = other DNA
atggctggacccgcgacacagtcccctatgaaactgatggccctccagcttttactgtggcactctgccctgtggactgtgcaggaagcgactccactgggaccagcttcatcactccctcagagtttcctattgaaatgcctagaacaggtgcgaaagatccagggagatggggccgctctccaggaaaaactttgtgcaacttacaaactgtgtcatcccgaggaattagttttacttgggcactccctgggaattccttgggccccactgtcctcttgtccaagtcaggcacttcaattggcaggatgtctttcccagctccactcaggactttttctctaccaggggttgttgcaggcactggaagggatctcccccgagctggggcccactttggacacactgcagctcgatgtcgctgactttgctactacaatatggcagcagatggaggaactggggatggcccccgccctccagccaacacaaggggctatgcctgctttcgcctcagcttttcagcggcgggcagggggggttcttgtggccagtcaccttcagtccttcttagaagtctcctaccgcgtactccgccacttagcacagcca

SEQ ID NO: 10033 - DNA, 612 bp, synthetic construct
  misc_feature 1..612: note = source = /note="Description of Artificial Sequence: Synthetic coding sequence"
  source 1..612: mol_type = other DNA
atggctgggcctgccacccagtcaccgatgaagctgatggcccttcagctcctcctgtggcactctgctctgtggaccgttcaggaggcaaccccactgggtccagcatcttctctcccacagtcgtttcttctgaaatgtctggagcaggtccggaaaatccaaggagatggcgccgccctgcaggagaagctgtgcgccacttataagctctgtcaccccgaggagctggtgctactgggccactcccttgggatcccgtgggctcccctttcgagctgtccgagccaagccctccagttggctggctgtctctcccagcttcatagcggtctgttcctctaccaggggctgctgcaggctctcgaaggaatctctcccgagctcggtccaactctggacaccctgcagctggacgttgccgacttcgccaccactatctggcagcagatggaagagctgggcatggccccagccctgcagcccactcagggagcgatgcctgcctttgcttctgcctttcagagacgcgccggcggcgtgctggtggcatctcatctccaatccttcctggaagtatcctaccgggtgctccggcacctggctcagccg

SEQ ID NO: 10034 - DNA, 612 bp, synthetic construct
  misc_feature 1..612: note = source = /note="Description of Artificial Sequence: Synthetic coding sequence"
  source 1..612: mol_type = other DNA
atggccggacctgctacgcagtccccaatgaagctcatggcactgcagctgttgttgtggcacagcgctctttggaccgtgcaggaggcaacacctctcgggcccgcttcatccctgccacagagttttctgctgaagtgtctggaacaggtaaggaaaatccagggagatggcgccgccctccaggagaaattgtgcgcgacttacaagctgtgccaccccgaggagctggtgcttcttggacactctctcggtataccctgggctccattgtcctcttgtcctagccaggccctccagctcgccggctgcctgagtcagttgcactccggtctgtttttgtaccagggactcctgcaggccctggaggggattagcccagagttgggtccgacactcgacaccctgcagttggacgtcgccgatttcgccacgacaatctggcaacagatggaagaactgggtatggcgccagctctccagcccacgcaaggtgctatgccagctttcgccagtgcttttcaacgccgcgctggtggggtgctggtggcaagtcacctgcagagtttccttgaggtgagttacagagtgcttcgacatctcgctcaacca

SEQ ID NO: 10035 - DNA, 612 bp, synthetic construct
  misc_feature 1..612: note = source = /note="Description of Artificial Sequence: Synthetic coding sequence"
  source 1..612: mol_type = other DNA
atggccggacctgctacccagtcccccatgaaactcatggccctgcagttattactctggcactcggccttgtggaccgtccaagaggcaaccccactcggccctgcctcatcgttaccccaatcttttctcctcaagtgtctagaacaggttcgtaaaattcagggagacggggccgctctgcaagagaaactgtgtgcgacttataagctgtgtcacccagaggaactcgtgctgctgggacattcactcgggataccttgggcaccattgtcgagttgtcccagccaggcactgcagcttgctggctgcctgagccagctgcactctggactttttctctatcaagggctgctgcaggcactggagggcatcagccctgagttaggtcctacgctcgacactttgcagctggatgtggctgactttgcaacgacaatatggcagcagatggaggagctgggcatggccccagctttacagccaacccagggggcaatgcctgccttcgcctcagcttttcagcggagggctggaggggtcctggttgctagccatctccagtccttcctggaggtgagttatcgggtgttacgccatctcgctcagcca

SEQ ID NO: 10036 - DNA, 612 bp, synthetic construct
  misc_feature 1..612: note = source = /note="Description of Artificial Sequence: Synthetic coding sequence"
  source 1..612: mol_type = other DNA
atggcaggcccggccacccaatccccgatgaagttgatggcactgcaactgctcctttggcactcggcactttggactgtgcaagaagctacccctcttggcccagcatcgtcgctccctcaatcctttcttcttaaatgcctggagcaggtccgtaagattcaaggagatggagcagcccttcaagaaaagctgtgtgctacctacaagctgtgtcatcccgaagagctcgtgctgctcggacattcgctgggcatcccttgggcacccctctcttcatgccctagccaggcgctgcagctggccggttgtttgtcccaattgcactcgggtttgtttctgtaccaggggctgcttcaggcgttggaaggaatcagccctgagctcggtcctaccctcgatactcttcaactcgatgtggcagactttgcaaccactatatggcaacagatggaggaactggggatggcgcctgccctccagcctactcaaggggcaatgcctgcatttgcctcggcatttcagagaagagctggcggggttctggtggcatcgcatcttcagagcttccttgaagtgagctacagggtgcttcgccatctggcccaacca

SEQ ID NO: 10037 - DNA, 612 bp, synthetic construct
  misc_feature 1..612: note = source = /note="Description of Artificial Sequence: Synthetic coding sequence"
  source 1..612: mol_type = other DNA
atggcggggccagcaacccagagcccaatgaagctcatggcgctccaactgctgctttggcattccgcactctggacagtacaggaggcaactccccttggccctgcttcctctctgccccagtcgttcctgctcaagtgtttggaacaggttaggaaaattcagggagacggtgccgctctgcaggagaaactttgcgccacctacaagctctgccatcccgaggaattggtcctgctcgggcacagcctgggtataccctgggcacctttgtctagctgccccagtcaggcactgcagctggctggatgcctctctcagctgcactcgggactttttctctatcagggcttgctccaggcccttgaaggcatctctcctgagctgggacctactctggacaccctgcagctggatgtcgcggacttcgcaacgaccatctggcaacagatggaggagctgggaatggcacctgcacttcagccaacacaaggagctatgcccgcatttgcgtcggcctttcagaggagagcgggaggggtgctggtagctagccatctccaaagtttccttgaggtgtcttacagagtgttaagacacctggcacagcca

SEQ ID NO: 10038 - DNA, 612 bp, synthetic construct
  misc_feature 1..612: note = source = /note="Description of Artificial Sequence: Synthetic coding sequence"
  source 1..612: mol_type = other DNA
atggccgggcccgccacacagtctcctatgaagctgatggcgctgcagctcctgctttggcacagcgcgctctggaccgttcaggaggcaactccactgggtcctgcgtcttctttgccccagtccttcctgctcaagtgcttggagcaggtccggaaaattcagggagatggcgctgccctacaagaaaaattatgtgcgacatataagctgtgccaccctgaggagctggtgctgttaggccactccctgggcatcccctgggcgccgttgtcctcctgccccagccaagccctccaactcgcaggttgtctctctcagttgcactctgggctgtttctttaccagggactgctccaggccctggaggggatctcgcctgagctgggtcccaccctggacacattgcaattggatgttgctgattttgccacaacaatctggcagcagatggaagaactgggcatggcccctgcactgcagccaactcagggcgcaatgcccgcgttcgcctccgcctttcagagaagggccggaggggtccttgtcgcctcccatttacagtccttcctggaggtgtcttacagggtcctcagacatcttgcacaaccc

SEQ ID NO: 10039 - DNA, 612 bp, synthetic construct
  misc_feature 1..612: note = source = /note="Description of Artificial Sequence: Synthetic coding sequence"
  source 1..612: mol_type = other DNA
atggcaggcccggcgacccagtctccgatgaaactcatggcactgcagctccttctgtggcattccgctctgtggactgtgcaggaagccaccccgctgggaccagcctcctcactcccacaatcgtttctgctcaagtgcctcgaacaggtgagaaaaatccaaggtgacggcgctgccctgcaggaaaaactgtgcgcaacgtacaaactctgccaccctgaggaacttgtgctgctgggacactcgttggggattccgtgggctccactcagctcctgcccttcccaggccctgcaactggcaggatgcctgagccagctgcactcggggctgttcctgtaccagggcctgctgcaagcgcttgagggtatcagcccggagctggggccgactctcgacaccctccaactggacgtggccgacttcgcaactactatctggcagcaaatggaagagctcggaatggccccggccctgcagcctacgcagggggcgatgccggcgttcgccagcgcgttccaaaggagggccggaggtgtgctggtggccagccacttgcaatctttcttggaagtgtcctaccgcgttctccggcatctggcacagcct

SEQ ID NO: 10040 - DNA, 612 bp, synthetic construct
  misc_feature 1..612: note = source = /note="Description of Artificial Sequence: Synthetic coding sequence"
  source 1..612: mol_type = other DNA
atggcgggcccagcaacccagtctcccatgaagctgatggcactccagttgctcctctggcacagtgccctgtggacagtgcaggaggctacccctctgggccccgcttccagtctgccgcagagtttcctgctgaaatgtctagagcaggtcaggaagattcagggggacggtgcggcgctccaggagaagttgtgtgctacatacaaattgtgtcatccagaggagttggtgctcctcgggcactcgctgggcattccctgggcccctctgagctcgtgtcctagtcaggcactgcagctcgctgggtgccttagtcaacttcattctggcctattcctttaccaggggctgctgcaggcactggagggcatatccccagagcttggccctaccctggatacactgcaactggatgtggccgactttgcaactaccatttggcagcagatggaggaactggggatggcccccgccctacaaccaacccagggcgccatgccagcgttcgcctccgcctttcagcgcagagcaggcggcgtgttggtcgccagccatctgcaatccttccttgaggttagttatagagtgctgcgccacttagctcagcct

SEQ ID NO: 10041 - DNA, 612 bp, synthetic construct
  misc_feature 1..612: note = source = /note="Description of Artificial Sequence: Synthetic coding sequence"
  source 1..612: mol_type = other DNA
atggcagggccggcgactcagtcgccgatgaagctcatggccctgcagctgttgctttggcactcagctctgtggaccgtgcaagaggcaactccactgggccctgcctcctcgctcccccaatcgttcctgctcaagtgccttgaacaagtgcgcaaaatacagggtgatggtgctgctctgcaggaaaaactgtgtgccacctacaagctgtgccacccggaggagctggtcttgctgggacattcgctgggcatcccgtgggcgccactctcgagctgtccttcccaagcgctgcagttggcaggttgcctgagccagcttcactcgggactgttcctgtaccagggcttgctccaggccttggagggaatctcgccggaactcggcccaactctcgatactctccaactggacgtcgccgacttcgccacgacgatctggcagcagatggaagaactcggtatggccccagctctgcagcctacccaaggcgctatgcccgcattcgcttcggccttccagagaagggctggcggagtgctggtggcgtcccacctccagtctttcctcgaagtgagctaccgcgtgctccggcacctggcacagccg

SEQ ID NO: 10042 - DNA, 612 bp, synthetic construct
  misc_feature 1..612: note = source = /note="Description of Artificial Sequence: Synthetic coding sequence"
  source 1..612: mol_type = other DNA
atggccgggccggccacccaatcacctatgaagctgatggctcttcagctccttctgtggcacagcgcgctctggactgtgcaagaggcgacgcctctgggaccggcgtcctctctgccacagtccttcctgctgaaatgcctggaacaggtccgcaaaatccagggcgatggtgctgcgctgcaagagaagttgtgcgccacttacaagctgtgccacccagaggagctggtgcttctggggcattcgctgggaatcccgtgggctccactgtcaagctgtccgtcccaggccctccagctcgccggctgcctttcgcagttgcacagcggtctgttcctctaccaaggattgctgcaggccttggaaggaatctcgcccgaactgggacccactctcgacacgctccagctggatgttgcagacttcgccaccaccatttggcagcagatggaagaactcggaatggcacctgcgctccagccgactcagggtgcgatgccggctttcgcctcggcatttcaacgcagggccggaggagtcctcgtggcatctcatttgcaatcctttctggaagtgagctacagggtgctccgtcacttggcgcaaccg

SEQ ID NO: 10043 - DNA, 570 bp, synthetic construct
  misc_feature 1..570: note = source = /note="Description of Artificial Sequence: Synthetic coding sequence"
  source 1..570: mol_type = other DNA
atggcggccggcgaacttgagggcggaaaacccttgtcaggacttttaaatgctctggctcaggacaccttccacggctacccgggcatcactgaggaactgttgcgaagccagctgtaccctgaagtgccccccgaggagtttagacccttccttgctaaaatgcgtgggatactaaagtccatcgcctccgcagacatggactttaatcaactcgaagcattccttactgcccagacaaagaaacagggaggaatcacttcagaccaggccgccgttatctctaagttctggaaatcgcacaaaacgaaaatcagagagtccttaatgaaccagtcaagatggaattcagggctcagaggtctaagttggcgcgtagatggcaaatctcagagtcggcactctgcgcaaattcatactccagtggcaatcatcgaactagagctggggaaatatggacaggagtccgaattcctttgcctggagtttgacgaggtcaaggtcaatcagatcctcaagacgctgagtgaagtcgaggagagcatctccaccctgatctctcagccaaat

SEQ ID NO: 10044 - DNA, 570 bp, synthetic construct
  misc_feature 1..570: note = source = /note="Description of Artificial Sequence: Synthetic coding sequence"
  source 1..570: mol_type = other DNA
atggcggcgggagaactggaaggaggaaagcctctttcaggactgctgaacgcactggcacaggacacgttccacgggtatcccggtattaccgaggagcttctccggtcccagttgtaccctgaggtccctccagaggaattccgtccatttctggcaaagatgcgcggcattcttaagtcgatagcctccgcagacatggactttaaccaattggaggcctttcttaccgcacaaactaagaaacaaggaggtataacctcagaccaagcagcagtcatctcgaaattctggaaaagccacaagacgaagatcagagaatcgctgatgaatcagtcccggtggaattccggacttagaggtttgagctggagggtggatggtaagagtcagagcagacattcggcccagatccacactcctgtcgccatcattgaactcgaacttggcaagtacggtcaagaatcggaatttctgtgtctcgaatttgatgaggtgaaggtgaatcaaatcctcaaaaccctctccgaggtcgaggaaagtatatcgactcttatcagccaaccaaac

SEQ ID NO: 10045 - DNA, 570 bp, synthetic construct
  misc_feature 1..570: note = source = /note="Description of Artificial Sequence: Synthetic coding sequence"
  source 1..570: mol_type = other DNA
atggctgctggggagctggaaggcggcaagccgctgagcggcctgctgaacgctctggctcaggatacctttcatggatatcctggtatcacggaagagctactgcgtagccagctgtaccctgaggtgccgccggaggaattccgcccattcctggcaaaaatgcgcggcattctgaaaagtatcgcgagcgctgacatggactttaatcagctagaagccttcctgaccgctcagaccaagaagcaaggcggtatcactagtgaccaagcagccgtcatttccaaattttggaaaagccacaagaccaagattcgcgagtcactgatgaatcaatcgcgttggaactcaggtctgcgcggtcttagctggcgcgtggacgggaaatctcaaagccgacactctgctcagattcataccccagtggcgattatcgagcttgaactgggcaaatacggtcaggaaagcgagttcctgtgcttggagtttgacgaggtgaaggtcaaccagattctaaaaactctgagcgaggttgaagagtccatctccactctgatttctcaaccgaac

SEQ ID NO: 10046 - DNA, 570 bp, synthetic construct
  misc_feature 1..570: note = source = /note="Description of Artificial Sequence: Synthetic coding sequence"
  source 1..570: mol_type = other DNA
atggcagccggggagttggaaggcggaaagcctttaagcggactgctcaatgcgctagcccaggatacttttcacggctaccctggtatcacggaggagctgctccgtagccaactgtatccggaggttccgccggaggagttccgccctttcctggccaagatgcgcggcatcttaaaaagcatcgcctcagcagacatggacttcaaccagctggaggccttcttgaccgcgcagactaagaaacagggcgggatcactagcgatcaggccgcggtgatctctaagttttggaagtcgcacaagaccaagatccgtgagagtctgatgaaccagagcaggtggaactccggtcttcgcgggctaagctggagggtggacggcaagtcgcaatcccgtcattccgcccaaatacacacgcccgttgccattatcgagcttgagctgggtaagtatggtcaggagagcgagttcctgtgtttggagttcgacgaggtgaaggtcaatcagatcttgaagaccctttcagaagtcgaggagtctatttctacgctcatcagtcagcccaac

SEQ ID NO: 10047 - DNA, 570 bp, synthetic construct
  misc_feature 1..570: note = source = /note="Description of Artificial Sequence: Synthetic coding sequence"
  source 1..570: mol_type = other DNA
atggcggcgggcgaactggaaggaggcaagcccttgtcgggactgcttaacgcgttggcacaagacactttccatggctatcctgggattaccgaagaactcctgcggtcccaattgtacccggaagtcccgccagaagagtttcgcccttttcttgccaagatgcgggggatactgaagtcaatcgcctctgcggacatggatttcaaccagctggaggcattcctcaccgcccagactaagaagcaaggtggtatcacgagtgatcaggctgctgtcatctcgaaattctggaaatcccacaaaaccaaaatcagagagtctctgatgaatcaaagtagatggaactcaggactcagagggctgtcatggcgggtggacggtaagagccagtctcgccactccgctcagatccatactccggtggctattatcgaactggagctgggaaaatacggccaggagtcagagttcctctgtcttgagttcgatgaggtgaaggtgaaccagatcctcaagactctttcagaagtcgaagagtcgatcagcaccctgatctcacaaccgaat

SEQ ID NO: 10048 - DNA, 570 bp, synthetic construct
  misc_feature 1..570: note = source = /note="Description of Artificial Sequence: Synthetic coding sequence"
  source 1..570: mol_type = other DNA
atggccgccggggaactggaaggaggcaaacccctcagcgggctgctgaatgctctggcccaggataccttccatgggtaccccggtatcactgaagaactgcttcgctcgcagctgtacccagaggtcccccccgaagaatttaggccattcctcgccaaaatgcgagggatcctgaaaagcattgcctctgccgatatggacttcaaccagctggaagcttttctgacggcacaaacgaagaagcaaggcggtattacgtcagatcaggcggcagtcatcagcaagttttggaaaagccacaagacaaaaatccgcgaatcactgatgaaccagtccagatggaattctggcctaaggggacttagttggagagtagatgggaaaagccagtcaagacacagtgcacagattcacacccctgttgctatcatagagctggaacttggtaagtatggtcaggagagcgagttcctttgcctggagttcgatgaagtgaaggtgaaccagatcctgaagacgctgtctgaggtggaagagagcattagtacattgatcagccagccaaac

SEQ ID NO: 10049 - DNA, 570 bp, synthetic construct
  misc_feature 1..570: note = source = /note="Description of Artificial Sequence: Synthetic coding sequence"
  source 1..570: mol_type = other DNA
atggcggcaggtgaactggaaggcgggaagccacttagcggactgcttaacgccctggcgcaggataccttccatggataccccggaataaccgaagaacttctccgcagccaactgtacccggaggtgccccctgaagaattccggccgttccttgcaaagatgcggggaatcttgaagtccatcgcctcggcagatatggatttcaaccagctggaagcattcctgaccgcacagacgaagaagcagggaggaattacttcggatcaagcggcggtgatttcgaagttctggaaatcccacaagaccaagatcagggaaagccttatgaaccaatcgagatggaatagtggactcagaggactttcgtggagagtggacgggaagtcccagtcacgccattcggcacagatacacactcctgtcgctatcatagagcttgaacttggaaaatacggtcaggagagcgaatttctttgcctggagtttgatgaagtgaaggtcaaccagattctcaagaccctgagcgaggtcgaagaaagcatcagcactctgatttcccaacctaat

SEQ ID NO: 10050 - DNA, 570 bp, synthetic construct
  misc_feature 1..570: note = source = /note="Description of Artificial Sequence: Synthetic coding sequence"
  source 1..570: mol_type = other DNA
atggccgcaggtgagctggagggaggaaagcctctgtcaggacttctgaatgcgctggcgcaggatacctttcacggctatccaggaattactgaggagctgcttcggtcgcaactgtaccctgaagtgcccccagaagaatttagaccttttcttgcaaagatgagaggtattctgaaatcaattgcctctgcagatatggactttaatcaactggaagccttcctcaccgctcagacgaagaaacagggaggcattacgagcgatcaggcagcagtgattagtaaattctggaagtcgcataagaccaaaattcgcgagtctctcatgaaccagagcagatggaactccggacttcggggactctcctggcgggtcgacggtaaatcgcagtcgcgccacagcgcacaaatccatactcctgtggcaatcatagaactggaactcggaaagtacgggcaggaatcagaattcttgtgccttgaatttgacgaagtcaaagtgaatcaaatcctcaagaccctctcggaggtggaagaatctatctcaactctgattagccagccgaat

SEQ ID NO: 10051 - DNA, 570 bp, synthetic construct
  misc_feature 1..570: note = source = /note="Description of Artificial Sequence: Synthetic coding sequence"
  source 1..570: mol_type = other DNA
atggccgccggggaactggagggcggcaaaccactgagtggtcttttgaatgccctggcacaggatacgttccatggttaccccggcattacagaggagctgcttcgtagccagctgtaccccgaggtgccaccagaggaattccggccattcctcgctaagatgagagggatccttaaaagcatcgcatccgctgatatggatttcaaccagctggaagcttttctgaccgcacagacaaagaagcagggcggcattacgagtgatcaagccgccgtgatttccaagttttggaagtctcataaaacaaaaatacgagagagtctgatgaaccaaagcagatggaattccggcctccgagggttatcatggcgtgttgatggcaaaagtcagagccgccactccgctcagatccatactccagtcgccattattgagttagaactaggtaaatacggtcaggaatctgaatttctatgcctggaattcgacgaagtgaaggtaaaccaaatactcaaaaccctgagcgaagtcgaagagagcatatctacgcttatctcgcaacccaat

SEQ ID NO: 10052 - DNA, 570 bp, synthetic construct
  misc_feature 1..570: note = source = /note="Description of Artificial Sequence: Synthetic coding sequence"
  source 1..570: mol_type = other DNA
atggcggcgggagagctggaaggaggcaagccgctgagcggactcttgaacgccctggcccaagacaccttccacggatacccggggattactgaggaacttctgagatcgcaactctacccggaggtgcctcctgaagaattccgcccattccttgctaagatgcgcggcatcctgaagtcaatcgcatccgccgatatggactttaaccagctcgaggcatttctcactgcgcaaaccaaaaaacaggggggaatcacgtctgatcaagccgccgtgatctcgaagttctggaagtcccacaagactaaaatcagagagagtttgatgaatcagtcacgatggaactcgggattgcggggcctgtcctggagggttgacggtaagtcccagtcgcggcattcagcacagattcatactcccgtcgctatcatcgaactggagctgggtaagtacggacaggaaagcgagttcctctgcctggaattcgacgaagtgaaagtcaatcagatcctcaagaccctgtcggaagtggaggaatccatcagcaccctgattagccagccaaac

SEQ ID NO: 10053 - DNA, 570 bp, synthetic construct
  misc_feature 1..570: note = source = /note="Description of Artificial Sequence: Synthetic coding sequence"
  source 1..570: mol_type = other DNA
atggcagcaggcgagttagaaggcggtaaacccctgtcaggtctactaaacgcactcgcacaagatacatttcatggctacccaggtattacagaggaattgctcaggtcacagctgtatcccgaagtgccacctgaggaattccgaccattcctggctaaaatgcgcggaattctgaagtctattgcctctgccgacatggactttaatcagctggaggcctttctgaccgctcagactaagaagcaggggggcataacttctgaccaggccgcagttatatcaaaattctggaagtctcacaaaactaagatccgcgaatcactgatgaatcagagccgctggaacagcggtctgagagggctgtcctggcgtgttgatggaaaaagccagagtcgccatagcgcacagattcacacccctgtcgcaatcatcgaactcgagctgggcaaatatggccaagaatctgagttcctgtgtttagagtttgatgaggtgaaggttaaccagattcttaagacactgtccgaggtggaagaatctatttctactcttatttcccagcctaac

SEQ ID NO: 10054 - DNA, 570 bp, synthetic construct
  misc_feature 1..570: note = source = /note="Description of Artificial Sequence: Synthetic coding sequence"
  source 1..570: mol_type = other DNA
atggcggcgggagaactggagggtggaaagccgttgagcggactgctgaacgcactcgcgcaagacactttccatggatacccaggcatcaccgaagagctgcttcgctcccagttgtacccggaggtgccgccggaggagttcaggccgttcctcgctaagatgagaggaattctcaagagcatcgcttcggcagatatggatttcaatcaactggaagcattcctcaccgcgcagaccaagaagcaaggagggatcacgtcggaccaggccgccgtgatctcgaagttttggaagtcccacaagaccaagatccgcgagtcgctgatgaaccagtcccgctggaactcgggcctgagaggactgtcttggcgcgtggatggtaagtcccaatcccggcattcagcccaaatccatacccccgtcgccatcatcgagttggagctgggaaaatacggccaggaaagcgagtttctgtgtctggagttcgatgaagtgaaggtgaaccaaattcttaagaccctgtccgaagtggaggaatcgatctcgaccctgatttcacaaccgaat

SEQ ID NO: 10055 - DNA, 570 bp, synthetic construct
  misc_feature 1..570: note = source = /note="Description of Artificial Sequence: Synthetic coding sequence"
  source 1..570: mol_type = other DNA
atggcagctggggaattggagggaggcaagcccttgagcgggctgctgaatgctttagcgcaggacacgttccatggttatccgggaatcaccgaggaattgctgagatcccaattgtacccagaggttcctcctgaggagttcagacccttcttggcgaagatgcgtggaatcctgaaatcaatcgcctccgcagacatggatttcaatcagctggaagccttcctgactgcccaaaccaaaaaacagggcgggatcacaagtgaccaggccgcggtcatcagcaagttttggaaatctcataagacgaaaatccgcgagagcctgatgaatcagtccagatggaacagcggtctcagaggactgtcatggagggtggatggcaagtcccagtcaagacattccgcacaaatccacaccccggtggctataattgagttggagctcggaaagtacggtcaggaatccgagtttctgtgtctcgaatttgatgaggttaaagtgaaccagatcttgaaaacgctgagtgaagtcgaagagagtatcagcacgttgattagccagccaaac

SEQ ID NO: 10056 - DNA, 570 bp, synthetic construct
  misc_feature 1..570: note = source = /note="Description of Artificial Sequence: Synthetic coding sequence"
  source 1..570: mol_type = other DNA
atggctgctggtgagctcgaggggggtaagcctttgagcggtctactgaacgccttggctcaggacacctttcatgggtaccctggcatcacagaagaactgcttcgatctcagctatacccggaagtacccccagaagagttcaggccatttcttgccaagatgagggggattttgaagtcaatcgcatcagccgacatggactttaatcagttagaagccttcctcacagcccaaactaagaagcagggggggattacaagtgatcaggccgcggtgatcagcaaattctggaagtcacataaaaccaagatcagggagtcactgatgaaccaatcgcgttggaactccggactgaggggactctcctggagggtggatggaaaatcccaatcccgccattccgctcaaatccatactcctgtggcgattatcgagttggagcttgggaaatacggacaggagtccgagttcctttgtctcgagttcgatgaagtgaaggttaatcagatactgaagacgctcagtgaggtggaagagtctataagtaccttaatcagtcagccaaac

SEQ ID NO: 10057 - DNA, 570 bp, synthetic construct
  misc_feature 1..570: note = source = /note="Description of Artificial Sequence: Synthetic coding sequence"
  source 1..570: mol_type = other DNA
atggccgccggggagctggagggggggaaacccttgtctggactgctcaatgctttggctcaggatacattccatggatatcccgggatcacagaggagctcctgaggtcacagctttaccccgaagtgccaccagaggaattcagacctttccttgcgaagatgaggggaatactcaagagtattgcctccgccgatatggatttcaaccagctcgaagcattcttgacagcgcaaacaaagaaacagggaggaatcacatcagatcaagcagccgttatctccaagttctggaaatcacacaaaacaaaaataagagaatcccttatgaatcagagtagatggaattccgggcttcgaggacttagttggcgagtcgacggaaagtcacaaagtaggcattcagcacagatacacactccagtagctatcatagaactggaactcgggaaatatgggcaggaaagtgaatttttatgcttagaattcgatgaagtcaaagtcaatcagatactgaaaacactatctgaagtcgaagagtcaatctccactctgattagtcagcccaac

SEQ ID NO: 10058 - DNA, 570 bp, synthetic construct
  misc_feature 1..570: note = source = /note="Description of Artificial Sequence: Synthetic coding sequence"
  source 1..570: mol_type = other DNA
atggcggccggagagctcgagggtggaaaacccctttccggactcctcaatgcactggcgcaagatacttttcatggatacccaggaattacggaagaactgcttcgatctcagttgtaccctgaagttccaccggaggaatttaggccattcttggcgaagatgcgtgggattttgaaatcgattgcctctgcggacatggacttcaatcaattggaagcatttctcaccgcacaaacgaaaaaacaaggaggaatcacgagcgatcaagcagcagtcattagtaaattttggaaatctcacaaaacaaaaattagggaaagtttgatgaatcaatcacgatggaacagcggattgcgaggtctgagttggagagtcgatggaaaatctcagagccgtcattccgcacaaatacatacaccggtggccatcattgaacttgaactgggtaaatatggacaagagagtgaatttctttgtttggagttcgatgaagttaaggtgaaccagatcttgaagacgcttagtgaggtggaagaatctattagcaccttaatcagtcagccgaat

SEQ ID NO: 10059 - DNA, 570 bp, synthetic construct
  misc_feature 1..570: note = source = /note="Description of Artificial Sequence: Synthetic coding sequence"
  source 1..570: mol_type = other DNA
atggctgctggcgagcttgagggagggaagcctctgtccggacttctaaacgcgctggcgcaagataccttccatggatatcccggtatcacagaggaactgctacgatctcaactttacccggaagtgccgcccgaggagttcaggccctttctggcgaagatgagaggaatactgaaaagtatcgcatcggcggatatggactttaatcagctggaagcgttcttgacggcgcagactaaaaagcagggcggtattacttcggatcaggccgccgtaatctcaaaattctggaaatcacataaaacaaagatcagagaaagtctgatgaaccagtcacggtggaatagtggcctacgaggtctctcatggcgtgttgatgggaagtcacagtcgcgccattccgcccagatccacacacctgtcgcaattatcgagctagaactgggcaagtatggacaggaatcagagttcctctgcctcgaattcgacgaggttaaagtgaatcagatcctcaaaactctgtcagaagtagaggagtcaatcagcaccctgatttcgcagccgaat

SEQ ID NO: 10060 - DNA, 570 bp, synthetic construct
  misc_feature 1..570: note = source = /note="Description of Artificial Sequence: Synthetic coding sequence"
  source 1..570: mol_type = other DNA
atggccgcaggagagctggaggggggaaagccgctctcggggctcctcaatgctctcgcccaggatacctttcatggttacccgggaattactgaggaactgctgagatcccagctctacccggaggtcccaccagaggaatttcggccattcctggccaagatgcgcgggatcctgaagtcaatcgcctcggcagacatggatttcaaccagctggaggcgttcctgactgcccagaccaagaagcagggaggaatcactagcgatcaagcagccgtcatctccaagttttggaaatcacacaagactaagatccgcgagtccctcatgaatcaatccagatggaactcgggtttgcgcggattgtcgtggagggtcgacggaaagtcacaatcgcggcattccgctcagatccacaccccggtggccatcatcgaactggaactgggaaagtatggacaagagtccgagttcctgtgcctggaattcgacgaggtcaaggtgaatcagatccttaagaccctgtccgaagtggaagaatctatctcgaccctgatttcacagcctaac

SEQ ID NO: 10061 - DNA, 570 bp, synthetic construct
  misc_feature 1..570: note = source = /note="Description of Artificial Sequence: Synthetic coding sequence"
  source 1..570: mol_type = other DNA
atggcagcgggggaactcgaaggcgggaagccattgagtggtttactaaatgcactagctcaagacacctttcacggctatcccggtataaccgaggagttgctaaggagccaactatatcccgaggtgccccccgaagaattcaggccattcctcgcgaaaatgcggggtatcctgaaatcgatagcatcggctgatatggactttaatcagttggaagcgttcctaactgcgcagacaaagaagcagggtggcatcacttcggatcaggctgctgtgatttcaaagttttggaaatcacacaagacgaagattagagagtcactgatgaatcagagccgttggaattccggactgcgtgggctgtcctggcgcgtcgacgggaagtctcagagtaggcactccgcacagattcataccccagtggcaatcattgagcttgagctcggcaaatacggccaggagagcgaattcttatgtctcgaatttgatgaagtgaaagtgaaccagatactgaagaccctctcagaggtagaagaaagcatctccacactgatttctcaacccaac

SEQ ID NO: 10062 - DNA, 570 bp, synthetic construct
  misc_feature 1..570: note = source = /note="Description of Artificial Sequence: Synthetic coding sequence"
  source 1..570: mol_type = other DNA
atggctgccggcgagctggaaggtggaaagccgttgagcggccttctcaacgcactggcccaagacaccttccatggataccccggtatcactgaagaactgctgcggagccagctgtaccccgaagtgccacccgaggagttcagaccgttcctcgccaaaatgagaggcatcctcaaatcgatcgctagcgcagatatggatttcaatcaactcgaggcgttcctgactgcacaaactaagaagcaaggaggaatcacctcggaccaagccgctgtcatctccaagttctggaaaagccacaagactaaaatcagagaaagcctcatgaaccagtcacggtggaactcgggactccgcggactgtcatggcgcgtggacgggaagtctcagtcacgccactcggcacaaatccacacccctgtggccatcatcgagctggagctcgggaagtacggacaggagtcggagtttctctgcctggaattcgatgaagtgaaggtgaatcagatcctcaagactctgtccgaggtcgaggaatcgatcagcaccctcatctcgcagcccaac

SEQ ID NO: 10063 - DNA, 570 bp, synthetic construct
  misc_feature 1..570: note = source = /note="Description of Artificial Sequence: Synthetic coding sequence"
  source 1..570: mol_type = other DNA
atggccgcaggagagctggaaggaggtaaacctctgagcggtctgctgaatgctctggcgcaggataccttccatggttaccctggaattactgaagaactgcttcgctcacaactgtacccagaagttccaccagaggagttcagaccatttctcgcaaagatgagagggatcttgaagtcgattgcgtccgcagatatggatttcaatcaacttgaagcgtttctcaccgcacagacgaaaaaacaggggggcattacttcagatcaggcagcagtaatctcgaagttttggaagagccataagactaagattcgcgaaagcctcatgaaccagtcgaggtggaactcaggacttcgaggtctgtcgtggcgcgtcgatggaaaaagccagagccgacattcagcccaaattcacactccggtcgcaatcatcgaactggaattgggtaagtacgggcaagaatccgaatttctctgtcttgaatttgacgaggtgaaggtgaaccagatccttaagacgctctcagaggtggaagaatctatttcgaccctgatttcccagcccaac

SEQ ID NO: 10064 - DNA, 570 bp, synthetic construct
  misc_feature 1..570: note = source = /note="Description of Artificial Sequence: Synthetic coding sequence"
  source 1..570: mol_type = other DNA
atggccgcgggtgaactcgagggcgggaagcctctttcaggactgcttaacgctctggcacaagatactttccacgggtacccgggcattaccgaggaactgcttcgttcgcaactgtaccccgaggtgcctcctgaagagtttcgcccttttctggctaagatgagggggatcctgaagtcgatcgcgagcgccgacatggatttcaatcagctggaggcatttctgaccgcgcaaactaagaagcagggagggattacctccgatcaggctgcggtcatctctaaattctggaagtcccataaaaccaaaattcgggaatcactgatgaatcagtcgagatggaattccggactgcggggactcagctggcgtgtggatggcaagtcccaatcaaggcattcggcacagatccatacccccgtcgccattatagagcttgagttgggaaaatacggtcaggagtcggaatttctgtgcctggaatttgatgaggtgaaggtgaaccagattcttaagacgctgtcagaagtggaagaatcgatatctactttgatttcccaacctaat

SEQ ID NO: 10065 - DNA, 570 bp, synthetic construct
  misc_feature 1..570: note = source = /note="Description of Artificial Sequence: Synthetic coding sequence"
  source 1..570: mol_type = other DNA
atggcagccggtgagctagagggtgggaagcctctgagtgggcttctgaatgcccttgctcaggacactttccacggatatcccgggattaccgaggagctcctccgatcgcagctgtatcccgaggtgccaccagaggagttccgtccttttctggcaaaaatgcgtggcatcctgaagagcattgcctcagcagatatggacttcaaccagctcgaggcttttctgacagcacagacaaaaaaacaggggggcataacgagtgatcaggctgccgtaatttccaaattctggaagagtcacaagaccaaaatccgagagagcctaatgaaccagagtcgatggaactcaggcttaagaggcctgtcatggcgagttgacggtaaaagccagtcaaggcacagcgcacagatccatacccccgtagcgataatcgagctggaactcgggaagtacgggcaggagagtgagttcctgtgtctcgagtttgatgaagtgaaagtgaaccaaatactcaaaactctgagcgaagtggaagaatctatctctacgctgatctctcagcctaac

SEQ ID NO: 10066 - DNA, 570 bp, synthetic construct
  misc_feature 1..570: note = source = /note="Description of Artificial Sequence: Synthetic coding sequence"
  source 1..570: mol_type = other DNA
atggccgccggtgagctcgagggaggcaagcctttgagcggcctgctgaatgctttagcgcaggatacattccacggctacccaggcatcaccgaagagctgctacgttcccagctgtaccccgaggtgccgccggaggagtttcgcccctttttggccaagatgcggggcatcttgaagtccatcgcgagcgccgacatggatttcaaccagctagaggccttcctcactgcccagacgaagaagcagggcggcataacaagcgaccaggctgccgtgatttctaaattctggaagtctcataagacaaaaatccgggagtccctaatgaatcaatccaggtggaactcggggcttcgcggtctctcttggcgagtggatggcaagtcacagagcaggcattcggcccagatacacacgcccgtggctatcatcgagctggagctgggtaagtacggccaggagagcgagttcctttgcctggagtttgacgaggtaaaggtgaatcaaatcttgaaaacgttgtccgaagtggaagagtctatctccacgctgattagccaacctaac

SEQ ID NO: 10067 - DNA, 570 bp, synthetic construct
  misc_feature 1..570: note = source = /note="Description of Artificial Sequence: Synthetic coding sequence"
  source 1..570: mol_type = other DNA
atggccgccggcgaactggaaggggggaagccactgtcgggtctgctgaatgcccttgcgcaggacacctttcacggataccccggaatcaccgaagaattgctgcgttcgcagttgtacccggaagtgccgccagaggagttccgaccgttcctggcaaagatgcgggggatcctcaaatccatcgcctccgcggacatggatttcaaccagctggaggctttcctgaccgctcaaactaagaaacagggaggtattacgtcggatcaagcagctgttatctccaaattctggaaaagccataagaccaagatcagagagtccctcatgaaccaatcgcgctggaacagcggactgcgcggtctgagctggcgggtggatggaaagtctcaatccagacactccgcgcagattcacactcccgtcgcgatcatcgaactcgaactgggaaaatacggacaggaatcggaattcctttgcctggaattcgatgaggtgaaggtcaaccagatcctgaaaaccctgagcgaagtggaagagtctatctcgaccctgatctcccagcctaac

SEQ ID NO: 10068 - DNA, 570 bp, synthetic construct
  misc_feature 1..570: note = source = /note="Description of Artificial Sequence: Synthetic coding sequence"
  source 1..570: mol_type = other DNA
atggctgccggagagctggaaggaggcaaacccttgagcggcctgttaaacgctttagcccaggatacattccacgggtatccaggcatcacggaggagctgctcaggagccagctttatcccgaggtacccccagaggaattccgaccattcctagccaagatgcgggggatcctcaagagcatagcctccgccgacatggattttaatcagctagaggccttcttgacagcccaaaccaagaaacagggtggtatcaccagtgatcaagccgccgtcattagcaagttttggaaatcccacaagacaaagatcagggaatccctgatgaatcagtccaggtggaactctgggcttaggggacttagctggagagttgacggaaaatcccagtctcggcattctgcccagatccacacacccgtggcaatcatcgagctagaattggggaagtacggacaggaatctgaattcctatgcttagaattcgacgaggtgaaagtaaaccagattctgaagaccctatccgaagttgaggagtccatctccaccctgatcagccagccgaac

SEQ ID NO: 10069 - DNA, 570 bp, synthetic construct
  misc_feature 1..570: note = source = /note="Description of Artificial Sequence: Synthetic coding sequence"
  source 1..570: mol_type = other DNA
atggccgcaggagagctggaaggaggaaagcccctttcgggattactcaacgctctggcccaggacaccttccacggttaccctggcattaccgaggaactccttcgtagccagctgtacccagaggtgccgcccgaggagttcagaccctttctggccaaaatgagagggatcctcaaatcaatcgccagcgctgacatggacttcaaccaactggaggcatttctcaccgcccagactaaaaaacagggcgggatcactagtgatcaggctgccgtcatatcgaagttctggaagagccataagactaaaattagagagtctctgatgaatcagagccgttggaattccggactccgcgggctctcctggagggtggatggtaagagtcagtcccgtcactccgctcagatccacactccagtcgccatcattgaattggagcttggcaagtatgggcaggagtctgaattcttatgcctggagttcgatgaggtgaaggtgaaccagattctgaagaccctgagtgaggtcgaggaaagcatatcaaccctcatctcacagccaaat

SEQ ID NO: 10070 - DNA, 570 bp, synthetic construct
  misc_feature 1..570: note = source = /note="Description of Artificial Sequence: Synthetic coding sequence"
  source 1..570: mol_type = other DNA
atggcggcaggcgagctggagggaggaaagccactgtccggtcttttaaatgcacttgctcaggatacctttcacggataccctgggatcaccgaggagttgctccggagccagctttaccccgaggtcccgcccgaagaatttaggcctttcctcgcaaagatgagagggatacttaaatctattgcttcggcagacatggactttaaccaattggaagccttcctcaccgctcaaacaaaaaagcaggggggcatcacaagcgatcaggccgccgtcatttctaagttctggaaaagccataaaactaagatccgtgaatcgctcatgaaccagtcaaggtggaacagcggcctgcgcgggctttcttggcgtgtggacggaaaaagccagtcaagacatagcgctcaaatccatactccagttgctatcatcgaattagaattgggcaaatacggccaagaatcagagttcctgtgcctggaatttgacgaggtgaaagtgaaccaaatcttaaagacactgagtgaggtggaggagtccatcagcactctgatctcgcaaccaaac

SEQ ID NO: 10071 - DNA, 570 bp, synthetic construct
  misc_feature 1..570: note = source = /note="Description of Artificial Sequence: Synthetic coding sequence"
  source 1..570: mol_type = other DNA
atggccgctggagagcttgaaggaggcaagcccttgtctggtctgttgaacgctctggcacaagatacctttcatgggtaccccggaatcaccgaagaactgctaaggagtcagctctaccccgaggtgcctcccgaggagttcaggccttttctggcgaagatgaggggtatactgaaatccattgcctctgcagacatggacttcaaccaactggaggcatttctgaccgcacaaacaaagaaacagggtggaattacatcagatcaagccgctgtcatttccaaattttggaagtcacacaaaactaaaatcagggaaagcctgatgaaccaatccaggtggaactctggtttgcgcggcttgtcatggagggtcgatggtaagagccaaagcaggcacagtgcccaaatccatactcctgtggctatcatcgaactggagctgggaaagtatggacaggaaagcgagttcctttgcctggagtttgacgaggtgaaggtgaaccaaattctgaagaccctgagcgaggtggaagagagtatctccacactgatcagccagcctaac

SEQ ID NO: 10072 - DNA, 570 bp, synthetic construct
  misc_feature 1..570: note = source = /note="Description of Artificial Sequence: Synthetic coding sequence"
  source 1..570: mol_type = other DNA
atggcggcaggtgaacttgagggtggaaagcccctttccggcttgctgaacgcccttgcacaagataccttccacggataccctgggattacggaggaactgctccggagccaactgtatcccgaagtgccacctgaagaatttcgaccttttcttgccaaaatgaggggtattctgaaatcgatcgcatccgccgatatggactttaaccagctggaggcatttctcactgcacagaccaagaaacaggggggaattacgtcggatcaagcagcggtgatctccaagttctggaagagccacaaaaccaagatcagggaaagccttatgaatcaatcccgctggaacagcggattgcgcggcctcagctggcgggtcgacggaaaatcgcaatcgcggcattcggcacagatccacacgccggtggcgatcatcgaacttgaacttggtaaatacggacaagagtcggagtttctgtgcctggaattcgacgaggtcaaggtgaatcaaattctcaagaccctttccgaagtggaggaatccatatccacccttatctcccaaccaaat

SEQ ID NO: 10073 - DNA, 570 bp, synthetic construct
  misc_feature 1..570: note = source = /note="Description of Artificial Sequence: Synthetic coding sequence"
  source 1..570: mol_type = other DNA
atggctgctggagaattggaaggtggtaagccactgtcaggactgctgaacgccttggcccaggacacattccacgggtacccaggcatcaccgaagagctcctgaggagccaactttaccctgaggtgccgcccgaggaatttcgcccattcctagccaagatgagaggaatccttaagtcaatcgcaagcgccgatatggacttcaatcaactggaggcctttctgactgcacaaactaagaagcagggcggtataacatccgaccaggccgccgtgatctccaaattctggaaaagtcataaaaccaagattcgtgaatctcttatgaaccagtctagatggaatagtgggcttaggggactctcttggcgagtagatggcaaatcccagagtagacatagtgcacagatacacacccctgtggctataatcgaactggagctgggaaaatacggacaggagagcgagttcttgtgcctagaatttgatgaagtgaaagtcaaccagattctgaaaacccttagcgaggtggaagaatcaattagcaccttgatcagccagcccaat

SEQ ID NO: 10074 - DNA, 570 bp, synthetic construct
  misc_feature 1..570: note = source = /note="Description of Artificial Sequence: Synthetic coding sequence"
  source 1..570: mol_type = other DNA
atggctgccggcgagctggagggtgggaaacccctaagtgggttgctgaacgcgctggcccaggacacttttcacggctaccccggaatcacagaagagctgcttaggagccagttgtacccagaagtacccccagaggaatttcgacccttcttggctaaaatgcggggcatactgaaaagcatagcttccgctgatatggatttcaaccagctcgaggcctttctaactgcgcagactaagaagcagggcggcattacctctgatcaggcagccgtaatcagtaagttttggaaatctcacaaaaccaaaatccgcgaaagtctgatgaatcagtcacgttggaactcaggactccgcggcctgtcatggagagtggacgggaagagtcagtccagacacagcgcacagatccacaccccagttgctattatagaactggagctgggaaaatacggccaggagtctgaatttctgtgtcttgaattcgacgaggttaaggtgaaccagattctcaaaaccctctccgaagtcgaggaatcaattagcacactgatctcccagcctaac

SEQ ID NO: 10075 - DNA, 570 bp, synthetic construct; identical to SEQ ID NO: 10073
  misc_feature 1..570: note = source = /note="Description of Artificial Sequence: Synthetic coding sequence"
  source 1..570: mol_type = other DNA

SEQ ID NO: 10076 - DNA, 570 bp, synthetic construct
  misc_feature 1..570: note = source = /note="Description of Artificial Sequence: Synthetic coding sequence"
  source 1..570: mol_type = other DNA
atggctgccggtgagttagaaggcggcaaacccctgtcgggattgttgaatgccctcgcccaggatacgtttcacgggtatccagggattacagaggaactcctcaggagccagctatatcctgaagtgccccccgaggagtttcgacctttcctggctaaaatgcggggcatacttaagtctattgcgtcggccgatatggactttaatcagctggaggcatttcttacagcgcagaccaagaagcagggtggtatcacgagtgatcaggctgcggtcatttctaagttctggaaaagtcacaagaccaagatcagggaatctctcatgaaccaaagtaggtggaacagcgggctgcgggggctgtcctggcgggtagacggtaagtcccagtccaggcatagtgcgcagattcatactccagtcgccattattgaactggagctggggaaatatggacaggagagcgaatttctttgcctggaattcgacgaggtgaaagtgaatcagattctaaaaacactctcagaggtggaagaatccatctccaccctcattagccagcccaac

SEQ ID NO: 10077 - DNA, 570 bp, synthetic construct
  misc_feature 1..570: note = source = /note="Description of Artificial Sequence: Synthetic coding sequence"
  source 1..570: mol_type = other DNA
atggcggctggggagttggaggggggaaaacctctgtctggccttttgaatgccttggctcaagatacattccatgggtacccgggaattactgaagaacttctacggagtcaactttaccccgaagtgcctcctgaagaatttagaccttttttggctaaaatgcgaggaattttgaagtctatagcaagtgcagatatggattttaaccagttggaggcatttcttactgcacagacgaagaaacagggtggtattacaagcgatcaggccgccgtcatctcaaaattttggaaatcgcataagactaaaatacgagagtccctaatgaatcaaagtagatggaattctggtctgcgtggattatcttggagggtggatggtaagtctcagagtcgtcatagtgctcaaattcatacccctgttgccattatagaacttgagttgggaaagtacggtcaagagagcgagtttctttgtctcgaattcgatgaggtcaaagtcaatcagatacttaaaacattatctgaggtcgaggagtctatctccactctaatttcacaacccaac

SEQ ID NO: 10078 - DNA, 570 bp, synthetic construct
  misc_feature 1..570: note = source = /note="Description of Artificial Sequence: Synthetic coding sequence"
  source 1..570: mol_type = other DNA
atggccgccggcgagctggagggtggcaagcctctgtcagggctgctcaacgctctggcccaggataccttccacggctaccccggaattactgaggaactgctgcgctctcagctatatccagaggttcccccagaggagtttagacccttcctggccaagatgcgcggaatcctaaagtctattgcgtcagcagacatggacttcaaccagctggaggcttttcttaccgcccagacaaagaagcagggcgggatcacatcggatcaagccgccgttattagtaaattttggaaaagccacaagaccaaaattcgcgagagcctgatgaatcagagcagatggaactcaggcctgcgcggcttatcctggcgcgtggacgggaaaagccagtcgagacactctgcgcagatacacacgcctgtggcaattatcgaattagaactggggaaatacggccaggagtccgaatttttgtgtctagaattcgatgaagtaaaagtcaatcagattctcaaaacactgtctgaagttgaagagagcatatctacactgatctcacagccgaat

SEQ ID NO: 10079 - DNA, 570 bp, synthetic construct
  misc_feature 1..570: note = source = /note="Description of Artificial Sequence: Synthetic coding sequence"
  source 1..570: mol_type = other DNA
atggcagctggagagctagaaggaggcaagccactgtccgggctgttgaatgcactcgcccaagatacctttcacggctaccccggcattaccgaagaactccttaggtctcagctctacccagaagtccctcctgaggaattccgcccttttctggctaagatgaggggtatactcaagagcatagcatctgcagatatggacttcaaccagttagaagccttcctcacggctcaaacaaaaaaacagggtggtatcacgtcagaccaagccgccgttatttccaagttctggaagtctcacaagactaaaatcagagaatctttgatgaatcaatctcgctggaattctgggttgagaggtctgtcatggcgcgtggatggcaagtctcagagtcgtcattctgcccagattcacaccccagtggccataatcgagcttgagcttgggaagtatggtcaagagtctgaattcctgtgcctggagtttgatgaggtgaaagtcaatcagatcctcaagactctttctgaggtggaagagagtataagcaccctgatctcccagcccaac

SEQ ID NO: 10080 - DNA, 570 bp, synthetic construct
  misc_feature 1..570: note = source = /note="Description of Artificial Sequence: Synthetic coding sequence"
  source 1..570: mol_type = other DNA
atggcagcgggagagctagagggcggcaagcctctttcaggcctgctgaatgctctggcccaggacacttttcacgggtaccctgggatcacggaggaattactgaggtctcaactgtacccggaggtaccgcccgaggaattcaggccatttcttgcgaaaatgaggggtatcttaaaatccatcgccagtgcagacatggatttcaatcagctggaagccttcctcactgctcaaactaaaaagcagggtggaatcacaagcgatcaggcagccgtgatctctaagttctggaagtcccataagacgaagatacgcgaatcactgatgaatcagtccagatggaactccggcctgagaggattgtcctggagagtggatggaaagtcccagtcccgccactctgcccagatccacaccccggtggccatcatcgagctggaactggggaagtacggtcaggaatccgagtttctttgtcttgagtttgacgaggttaaagtgaatcagattctcaaaacgctgtctgaagtggaagagtctatctctactctaattagtcaaccaaat

SEQ ID NO: 10081 - DNA, 570 bp, synthetic construct
  misc_feature 1..570: note = source = /note="Description of Artificial Sequence: Synthetic coding sequence"
  source 1..570: mol_type = other DNA
atggccgcgggagaactggaaggcggcaagccgctctccggactcctgaacgccctggcacaagacactttccacgggtaccctgggatcactgaggaactgctgcgctcacagctctacccggaggtccctccagaagagttcagaccgttcctggcgaaaatgcgcggaatcctcaagtcaatcgcgagcgctgatatggattttaaccaactggaagccttcttgaccgcccaaaccaagaagcagggcgggatcacgagcgaccaagcggcggtcatctcgaagttctggaagtcgcacaagaccaagatcagggaaagcctgatgaaccagtcccgctggaactcgggactccgcggcttgtcgtggcgcgtggatggaaagtcgcagtcgcgccacagcgcccagatccacaccccagtggcgatcatcgagctcgaattgggtaagtacggacaagaatccgaattcctgtgcctggagttcgacgaagtgaaagtgaaccagatcctcaagacgctgtcggaggtggaggaatcaatcagcaccctgatctcgcagccgaat

SEQ ID NO: 10082 - DNA, 570 bp, synthetic construct
  misc_feature 1..570: note = source = /note="Description of Artificial Sequence: Synthetic coding sequence"
  source 1..570: mol_type = other DNA
atggctgctggagaactggaaggcggcaagccactgagcggtctcctcaacgccctggcccaggacacctttcacggctatcccggcatcaccgaggaacttctgaggtcccagctgtatccagaagtgccacctgaggaattccgtccttttctggctaagatgagaggaatcttgaagagtatcgcctccgcagatatggacttcaaccagcttgaggccttcttgactgcccagaccaagaagcagggcggtataaccagcgaccaggccgcagtgatctctaagttctggaagagccataagactaagatacgtgagtccttgatgaaccagtctcgctggaatagtggtctgaggggattgtcctggcgtgtggacggaaagagccagtcaagacacagtgctcagatccatacaccagtggccattattgaattggagctgggcaagtacggccaagagtctgaatttctgtgccttgagtttgacgaggtaaaagtgaatcagatcctcaagaccctgagtgaagtcgaagaaagcatcagtaccctgatctcccagccaaac

SEQ ID NO: 10083 - DNA, 570 bp, synthetic construct
  misc_feature 1..570: note = source = /note="Description of Artificial Sequence: Synthetic coding sequence"
  source 1..570: mol_type = other DNA
atggccgcaggtgagctggaaggcggcaagccactctccggtcttctgaacgcgctggcccaagacaccttccacggttaccccggcatcactgaagagcttttgaggtctcaactttacccagaagtgcccccagaggaatttaggccattcctcgccaagatgagaggtattctgaagagcatcgcctctgccgacatggacttcaaccagcttgaggcattccttaccgctcagactaaaaaacaaggaggaatcacatcagaccaggccgctgtcatatctaagttttggaaatcacacaagactaaaatacgcgaatcactgatgaaccagagccgctggaattcaggcctgcgcggactctcatggagagtggacggtaaatcccagagtagacactctgctcaaattcacactcctgtggccatcatcgaactggagcttggtaagtacggtcaagagagcgagttcctgtgcctcgaatttgacgaggtgaaagtcaatcaaattctgaagactctgtccgaagtggaagagagcatttccaccctgatctctcagcctaac

SEQ ID NO: 10084 - DNA, 570 bp, synthetic construct
  misc_feature 1..570: note = source = /note="Description of Artificial Sequence: Synthetic coding sequence"
  source 1..570: mol_type = other DNA
atggctgcaggtgagctggaaggcggtaagcctctgtcgggactcctgaatgccctcgcccaggacaccttccacggctaccccggcatcaccgaggagctgctcagatcccagctttacccggaggtgcctccggaagagttcagaccattcctggccaagatgagagggatcttgaaatccatcgcgagcgcggatatggactttaaccaactcgaagcctttctcactgcacagaccaagaagcagggcggcatcaccagcgatcaagcggccgtgatctcaaaattctggaagtcccataagaccaaaatccgcgagtcgcttatgaatcaatcgcgctggaactccggcctgcgaggactgtcttggcgggtcgacggtaagtcccagtcaagacactcagcgcaaatacataccccagtagcaatcatcgagctcgagttgggaaagtatggtcaggaatcggaattcctgtgcctggaattcgacgaggtcaaggtgaatcagatcctcaaaactctgtccgaagtggaagaatcaatttcgactctgatcagccagccgaac

SEQ ID NO: 10085 - DNA, 570 bp, synthetic construct
  misc_feature 1..570: note = source = /note="Description of Artificial Sequence: Synthetic coding sequence"
  source 1..570: mol_type = other DNA
atggccgcgggtgagttagaaggaggtaagccactgtcagggctactgaatgcgctggcccaggacacctttcacgggtatcccggtatcacagaggaattgcttcggtcccagttgtatcccgaagtgccacccgaagaattcaggccattcctagctaagatgaggggaattctgaaaagtatcgcttctgccgacatggattttaaccagctggaagcattcctcaccgcacagacaaagaagcaaggtggaattacatctgaccaagcagccgtaataagtaagttctggaaatctcacaagacaaaaatcagggagtccctaatgaatcagtcacgatggaatagcggactgcgcggcttatcctggagggttgatggaaaatcccagtctaggcattctgctcagattcacactcctgtggcgattatcgagctggagctgggcaagtacggtcaggaaagtgagttcctctgtttggaattcgatgaggtcaaagtgaatcagatcctgaagaccctcagcgaggtggaggaaagcatatctaccctaatctcccagcctaac

SEQ ID NO: 10086 - DNA, 570 bp, synthetic construct
  misc_feature 1..570: note = source = /note="Description of Artificial Sequence: Synthetic coding sequence"
  source 1..570: mol_type = other DNA
atggcagccggtgaactggaaggcggcaagccgttgtcgggtctgttgaacgcccttgcacaggatacctttcatggttacccaggaataaccgaggaactgctgagatcccaattgtaccccgaggtccctccagaggaattccgcccttttctggcaaagatgcggggcatactgaaatcgatcgcatcggctgatatggatttcaaccaactggaagccttccttaccgcccaaactaagaagcaagggggtatcactagcgaccaggcagcggtgatctctaagttttggaaatcccataaaaccaagattagggaaagcctcatgaaccagtcacgatggaactccggactgcgtggactgagctggcgtgtggacggtaaatcccaatcgagacactctgcacaaatacatactcctgttgctattatcgaattggaactcggaaagtacggccaagagtcagaatttctgtgtctcgaattcgatgaagtgaaggtgaatcaaattctcaaaacgctttccgaggtggaagaatcaattagcacccttatctcccaacctaac

SEQ ID NO: 10087 - DNA, 570 bp, synthetic construct
  misc_feature 1..570: note = source = /note="Description of Artificial Sequence: Synthetic coding sequence"
  source 1..570: mol_type = other DNA
atggctgcaggagaactggaaggtgggaagcctctctcgggacttctcaacgcattggcacaagatacctttcacggatacccaggaattactgaggaacttcttagatcgcaactctatcccgaagtcccacccgaggagttccggccgttccttgccaagatgcgtgggattctgaagtcgattgcatcggcagacatggactttaatcaactggaggcctttctcactgcgcagactaaaaagcagggtgggataaccagcgaccaagccgctgtgatttcaaagttctggaaatcgcataaaactaagatccgagaatcgctcatgaaccaatcgcgatggaactccggccttcgcggtcttagctggagagtggatgggaagtcacagtcgagacattcagcacagatccatacgcctgtggcaattatcgagctggaacttggcaagtacgggcaggagagcgaattcctgtgccttgaatttgatgaggtcaaagtgaaccagatccttaagaccctttccgaggtggaagaatcaatcagcaccctgataagccaaccgaac

SEQ ID NO: 10088 - DNA, 570 bp, synthetic construct
  misc_feature 1..570: note = source = /note="Description of Artificial Sequence: Synthetic coding sequence"
  source 1..570: mol_type = other DNA
atggctgcaggcgagctagaaggagggaaacccctatctgggctgcttaacgcactggcgcaggatacatttcacggctacccgggcatcactgaagaactcctgagaagccagctgtaccccgaggtccctccagaagagttcaggccatttctggctaagatgaggggcattctcaagagtatagcctccgctgacatggactttaatcagttagaagcatttctcacagctcagaccaagaagcagggcggaatcacgtcagatcaggctgctgtgatttctaagttctggaagtcacacaagactaagatacgcgagtccctgatgaaccagtcaagatggaattccggattgcgtggcctttcatggagagtggatggtaagtcccagtcaaggcacagtgcccaaatacacaccccagtggctataattgaactggagctcggtaagtacggccaggaaagtgagttcttatgtctggaattcgacgaggttaaagtgaatcagattctaaagaccctttctgaggtagaagagtccatttctacactaatttctcagccaaac

SEQ ID NO: 10089 - DNA, 570 bp, synthetic construct
  misc_feature 1..570: note = source = /note="Description of Artificial Sequence: Synthetic coding sequence"
  source 1..570: mol_type = other DNA
atggctgctggagagctggagggcggcaagcctcttagcgggctgctcaatgccttggcgcaggatacttttcacggctacccaggaataacagaagagctgctgcgatctcagctctaccctgaggtgccaccggaggagttcagaccgtttctggctaaaatgcgaggaatactgaagtctattgctagtgcagatatggacttcaatcagctggaagcgtttctgactgctcaaactaaaaaacaaggcggaattaccagcgaccaggctgcagtaataagcaaattctggaaatcccacaagaccaagatccgcgaatctctgatgaatcagtcaaggtggaatagtgggttgagaggcctctcctggcgagtggacggaaaatctcagagccgacactcagcgcagattcacacccctgttgcaatcattgagctcgaactgggcaaatacgggcaggagagcgaattcttgtgcctcgaatttgacgaggtgaaggtaaaccagatcctgaagaccctgagtgaagtcgaggaatcaataagtacccttatttcccagccaaac

SEQ ID NO: 10090 - DNA, 570 bp, synthetic construct
  misc_feature 1..570: note = source = /note="Description of Artificial Sequence: Synthetic coding sequence"
  source 1..570: mol_type = other DNA
atggctgccggcgagctggaggggggtaagcctcttagcgggctgctgaacgcgctggcgcaagatacttttcacgggtatcccggcatcaccgaggagctcctgagaagccagctgtatccagaggttccgcctgaagagttccggccctttctggctaaaatgcggggaatcctgaaatcaattgccagtgcggatatggacttcaaccagttggaggctttccttaccgcccagaccaaaaagcagggaggaattactagcgatcaagcagctgtgatatcaaagttttggaagagccacaagaccaagatccgagagtcactgatgaaccagagtaggtggaactccggacttcgcggtctgtcctggcgggttgacggcaaatcacagagtcggcactctgcccagatccataccccagtggcaattattgaactggaattgggcaaatatggacaagaaagcgagtttctgtgcctggagttcgatgaagtaaaggttaaccagatcctcaagacactttccgaagtcgaagaatcaatttccacgctgatctcacagcctaac

SEQ ID NO: 10091 - DNA, 570 bp, synthetic construct
  misc_feature 1..570: note = source = /note="Description of Artificial Sequence: Synthetic coding sequence"
  source 1..570: mol_type = other DNA
atggcggcgggtgaattagaaggtggtaaaccgttatcgggtttattaaatgcgctagcgcaagatacgtttcatggttatccgggtataacggaagaactactacgttcgcaattatatccggaagttccgccggaagaatttcgtccgtttctagcgaaaatgcgaggtatattaaaatcgatagcgtcggcggatatggattttaatcaactagaagcgtttctaacggcgcaaacgaaaaaacaaggtggtataacgtcggatcaagcggcggttatatcgaaattttggaaatcgcataaaacgaaaatacgagaatcgctaatgaatcaatcgcgatggaattcgggtttacgtggtctatcgtggcgagtagatggtaaatcgcaatcgcgtcattcggcgcaaatacatacgccggtagcgataatagaattagaattaggtaaatatggtcaagaatcggaatttttatgtctagaatttgatgaagtaaaagtaaatcaaatactaaaaacgttatcggaagtagaagaatcgatatcgacgttaatatcgcaaccgaat

SEQ ID NO: 10092 - DNA, 570 bp, synthetic construct
  misc_feature 1..570: note = source = /note="Description of Artificial Sequence: Synthetic coding sequence"
  source 1..570: mol_type = other DNA
atggcagctggggagcttgagggagggaaaccactcagtggacttttgaatgccctggcccaggatacttttcatgggtaccctggaattactgaagaactcctgcggtcccagctgtaccccgaagtcccaccagaagaatttcgcccgttcctggcaaaaatgcggggaattcttaagtcaattgcttcggcagatatggactttaaccaacttgaagcattccttactgcacaaaccaaaaagcagggcggaatcacttcagaccaggccgcggtgatatccaagttctggaagtcacacaaaaccaagatcagagagtcccttatgaaccaatcgaggtggaattccggactgcgaggactctcctggcgcgtggacgggaagtcgcagagccgacattccgcacaaattcatactcctgtggccatcatcgaattggaactgggcaagtacggccaggagtccgaatttctctgtctggagtttgatgaagtcaaggtgaatcaaattcttaaaacgctgtcggaagtggaagagagcatttcaaccttgatctcgcagcctaac

SEQ ID NO: 10093 - DNA, 570 bp, synthetic construct
  misc_feature 1..570: note = source = /note="Description of Artificial Sequence: Synthetic coding sequence"
  source 1..570: mol_type = other DNA
atggccgccggggaattggagggaggcaagcctctgtcgggattgcttaatgcactggcacaggatacttttcacggataccccggaatcactgaagagctcctccggtcccagctgtacccagaagtgccaccagaggagttcagaccatttctggccaagatgcgggggattctcaagtcgatagcgtcggcagatatggatttcaatcaactcgaagcctttcttacggctcaaaccaagaaacagggcggaatcacttcagatcaggcagcagtgatatcaaagttctggaaatcgcacaagactaagattcgggaatccctgatgaatcaatcgagatggaactccggacttagaggtctttcgtggagggtggatggtaaatcgcaatccaggcattccgctcagatccacaccccagtggcaataatcgagctggagcttggtaaatacggacaagagtcggagtttctctgcctggaattcgacgaagtgaaggtgaaccagattcttaagaccctttcagaagttgaggagagcattagcactttgatctcacagccgaac

SEQ ID NO: 10094 - DNA, 570 bp, synthetic construct
  misc_feature 1..570: note = source = /note="Description of Artificial Sequence: Synthetic coding sequence"
  source 1..570: mol_type = other DNA
atggccgcaggagaactggagggaggcaagccgttgagcggactcctgaacgcccttgcacaagacactttccacgggtaccctgggatcactgaggaactgctgcggtcacaactgtacccggaagttccgccagaagaatttcggccgtttttggccaagatgcgcggaatccttaagagcatcgcttcagccgacatggactttaaccagctggaggcattcctgactgcccagaccaagaaacaggggggaatcacctccgaccaggccgcagtgatcagcaagttctggaagtcgcataagacgaaaatccgcgagtctttgatgaaccagtcccggtggaattccggcctcagaggtttgtcctggagagtggatggaaagagccaatcccggcatagcgcacagatccacacccccgtcgccatcatcgaactcgagctgggaaaatacggacaagagagcgagttcttgtgtttggaattcgatgaagtgaaggtcaaccaaatcctgaaaaccctctccgaggtggaagaaagcatttccactctgatctcccagccaaac

SEQ ID NO: 10095 - DNA, 570 bp, synthetic construct
  misc_feature 1..570: note = source = /note="Description of Artificial Sequence: Synthetic coding sequence"
  source 1..570: mol_type = other DNA
atggctgctggtgaactcgaagggggaaaacccctaagcggtctcctgaatgcactagcacaggatacatttcatgggtatcctggaataactgaggagcttctgagaagccagctctatcctgaagtgcctcccgaggaatttagacccttcttggccaaaatgcgaggaatcctcaagtcaattgcgagtgcagacatggacttcaaccagctggaagctttccttaccgcgcagacaaagaagcaggggggaataacgagtgatcaggccgcagttatcagcaagttctggaagagccacaagaccaagatacgggaatcccttatgaaccagagtaggtggaacagtggacttcgcggactgtcctggcgagtggatggtaagtcgcagagccgccactcagctcagatccacactcctgtggcaatcatcgagctcgagctcggaaagtatggacaggagtccgagttcctatgcctggagtttgatgaggtgaaggtcaatcaaatcctcaagactctgtccgaagtagaagaatcgatcagcacccttatttcgcagcccaac

SEQ ID NO: 10096 - DNA, 570 bp, synthetic construct
  misc_feature 1..570: note = source = /note="Description of Artificial Sequence: Synthetic coding sequence"
  source 1..570: mol_type = other DNA
atggcagcaggcgaactggaaggcggaaagccccttagcgggcttcttaatgccctggcacaagatacctttcacggatacccagggatcactgaggaattgcttagatcacaactttacccagaagtcccaccagaagaatttcggccttttctcgccaagatgcgtggcattctgaagagcattgcgtctgcggatatggatttcaaccaactcgaagccttcctgacggcccagactaaaaagcaagggggtatcacttcagaccaagcagctgtgatcagtaagttttggaagagccataagactaagattagagaaagcctcatgaaccaatcacgttggaattccggcctccgcggactttcgtggagagtcgatggtaagtcacagtccaggcattcggcgcagattcatacccccgtggcgattatcgaactggagctggggaaatacggtcaggagtcggaatttctctgtctggaattcgatgaagtgaaagtcaaccagattctcaaaactctgtcagaagtggaggaatcaatctcgacgctcatttcacaacctaac

SEQ ID NO: 10097 - DNA, 570 bp, synthetic construct
  misc_feature 1..570: note = source = /note="Description of Artificial Sequence: Synthetic coding sequence"
  source 1..570: mol_type = other DNA
atggccgccggagaactggaaggaggaaagccgctgtccggactgttgaacgcgcttgcacaagataccttccatggatacccgggaattaccgaagaactcctgagatcgcaactgtacccagaggtgccaccggaagagtttaggccattcctggctaagatgcgcggcatcctgaagtcaatcgcttctgccgatatggacttcaatcagctcgaagcgttcctcactgcacagacgaaaaaacagggcggtattacttcagaccaggccgctgtgatctcaaaattctggaaatcccacaagaccaagatccgcgagtccctgatgaatcagtcgcggtggaacagcggtctgcggggactctcctggcgtgtggatggaaaatcgcagtcaaggcattcggcacagatccatactcccgtggccatcatcgagctggagctgggcaagtacggtcaagagtcggaattcctctgtctggaatttgacgaagtgaaagtgaaccagattctcaaaactctgtccgaggtcgaggagtccatctccacgttgatctcacaaccgaac

SEQ ID NO: 10098 - DNA, 570 bp, synthetic construct
  misc_feature 1..570: note = source = /note="Description of Artificial Sequence: Synthetic coding sequence"
  source 1..570: mol_type = other DNA
atggccgcgggagagctggaaggaggcaagccgctgtcggggctcctcaatgctcttgcccaggacaccttccatggctacccgggaatcaccgaggagctcctgaggagccaactgtacccagaggtgcccccagaagagtttcgcccgttcctggctaagatgcgcggcattcttaagtcaatcgcttccgctgacatggacttcaatcagctcgaagcgttcctgactgcccagactaagaagcaaggaggaatcacttccgatcaggccgccgtgatctccaagttctggaagtcgcacaagaccaagatccgggagtccctgatgaaccagtcacgctggaacagcggactcagagggctctcctggcgggtggatgggaagtcgcagagcaggcattcggcgcagatccataccccggtggcgatcattgaattggagctcggtaagtacggacaggaatcggagtttctctgcctggaattcgacgaggtgaaggtcaatcagattttgaaaactctgtctgaagtggaagaatccatctcaaccctcatttcccagccgaat

SEQ ID NO: 10099 - DNA, 570 bp, synthetic construct
  misc_feature 1..570: note = source = /note="Description of Artificial Sequence: Synthetic coding sequence"
  source 1..570: mol_type = other DNA
atggctgccggagaactggaaggggggaaaccgctgtctgggttactcaacgccctagctcaagatacattccatggatatccaggaattactgaagaactcttgaggtcccagctgtatcccgaagtcccccctgaagaattcaggccctttctagcgaaaatgcggggaatcctgaaatctatcgcttctgccgatatggattttaaccagctagaggctttccttacagcacagactaaaaaacagggaggaataactagtgatcaggcagctgtgatatctaaattctggaaaagtcacaaaactaaaatacgcgagtctctgatgaatcagtcccggtggaactctggactaagaggactttcatggcgggtggatggaaagtcccagagtcgacattcagcacagattcatacacccgtggccattatagaattggaactggggaaatatgggcaggagtcggaatttctgtgtctcgaatttgatgaagtaaaagttaaccagattttgaaaacactgtctgaagtcgaggagtcaatctcaacactcatctcgcagcctaac

SEQ ID NO: 10100 - DNA, 570 bp, synthetic construct
  misc_feature 1..570: note = source = /note="Description of Artificial Sequence: Synthetic coding sequence"
  source 1..570: mol_type = other DNA
atggctgccggcgagctcgaggggggcaagcctctgagtgggctgctgaatgccttggctcaagacacattccatggctacccaggaatcacagaagagctgcttagaagccagttataccctgaagtgcctcctgaagagtttcggccttttctggccaagatgagaggaatcctgaaaagtatcgcatcggccgatatggatttcaaccagctggaggcctttctaactgcccagaccaagaaacagggtggtatcacttcagaccaagctgctgtgatcagcaagttctggaaatcccacaagactaaaatcagggagagcctcatgaatcagtctaggtggaactctggcctccgggggctctcctggcgcgttgacggaaagagtcagagccgacattctgctcaaattcacacgcccgtggcgatcattgagctcgaactcggcaaatatggccaagagtcagaatttttgtgcctcgagttcgacgaggtgaaagttaaccagatcctgaagaccctttctgaggtcgaggagtccatctccactctgatatctcagcctaat

SEQ ID NO: 10101 - DNA, 570 bp, synthetic construct
  misc_feature 1..570: note = source = /note="Description of Artificial Sequence: Synthetic coding sequence"
  source 1..570: mol_type = other DNA
atggcagccggagaactcgaagggggaaagcctttgtcggggctgctcaatgccctggcgcaggacactttccacggttacccgggcatcactgaagaactgctgcggtcacagctgtaccctgaggtcccaccggaagaattccgcccatttctggccaagatgagaggaatattgaaatcaattgcgtcagctgatatggatttcaaccagttggaggcattcctcaccgctcaaaccaagaagcaagggggtatcacctcagatcaggcggccgtgatttcgaagttctggaagtcacacaagaccaaaatcagagagtcgctgatgaaccaatcgagatggaattcgggactccggggactctcgtggcgggtggacggaaaatcacagtcccgccatagcgcgcagatccacactcccgtcgcgatcatcgagctggaactgggaaagtacggacaggaatcagaattcctctgcctggagtttgatgaggtgaaagtgaatcagatccttaagactctgagcgaggtggaagagtcgatctccacccttatctcccagcctaac

SEQ ID NO: 10102 - DNA, 570 bp, synthetic construct
  misc_feature 1..570: note = source = /note="Description of Artificial Sequence: Synthetic coding sequence"
  source 1..570: mol_type = other DNA
atggctgcaggggagctcgaggggggcaagcccctgtccggcctgctgaacgcgctggcccaggatacatttcacgggtacccaggaatcactgaggagttgcttaggtcccaattatacccagaggttcctccagaggaattcaggccttttctggccaaaatgcgaggcatcttgaagtccatcgccagtgccgatatggacttcaatcagttagaagcattcctcacagctcagacaaagaagcagggcgggatcaccagcgaccaggcggccgtgatcagcaagttttggaagagtcataagactaagattcgcgagagtctcatgaatcagagcagatggaattctgggctgcgcggtctctcttggcgggtggacggaaaatcacagagccggcatagtgcacagatccacaccccggtggctatcattgaactagagctcgggaagtacggccaggaaagcgagttcctgtgtcttgagtttgatgaagttaaggtgaatcaaattctcaagactctgtccgaagtggaagagtccatttctactctaatttcacagccaaat

SEQ ID NO: 10103 - DNA, 570 bp, synthetic construct
  misc_feature 1..570: note = source = /note="Description of Artificial Sequence: Synthetic coding sequence"
  source 1..570: mol_type = other DNA
atggctgcaggagaattagaaggtggaaagccattaagtggacttttaaatgcacttgctcaagacacattccatggatatccaggaattacagaagaattattacgttcacaactttatccagaagttccaccagaagaatttagaccattccttgctaaaatgagaggaattttgaaaagtattgcctcagctgatatggattttaaccaattagaagcatttcttactgctcaaactaagaagcaaggaggaattacttcagatcaagcagccgtaattagtaaattttggaaatcacataaaacaaaaattagagagtcattgatgaaccaaagtaggtggaattcaggtttgcgaggattatcatggagagttgatggtaaatcacaatcaagacattctgcacaaattcatacaccagttgctattatagaacttgagcttggtaaatatggacaagaatcagaatttttatgtcttgaattcgatgaagttaaggttaatcaaattcttaagacattaagtgaggtagaagaatcaatatcaactttaatctcacaaccaaat

SEQ ID NO: 10104 - DNA, 570 bp, synthetic construct
  misc_feature 1..570: note = source = /note="Description of Artificial Sequence: Synthetic coding sequence"
  source 1..570: mol_type = other DNA
atggcagcgggagaacttgaggggggtaaacctctttccggacttctcaatgcactcgcacaggacactttccacgggtaccctgggattacggaagaacttctcaggtcacaactttaccctgaagtgcccccagaagaatttcggccttttctggctaagatgagaggaattcttaagagcattgcatcggcagatatggatttcaatcagttggaagcgtttctgaccgcgcagactaagaagcaaggaggaattacttccgaccaggcagcagttatttcaaagttctggaagtcgcataagaccaagatcagggagtcactcatgaaccagtcgcgctggaactccggattgagaggactgtcgtggcgagtggatggaaaaagccagtccagacattcggcgcaaattcacactcccgtcgccattatagaactggagctgggcaagtatggacaggaaagcgaatttctgtgtctggaattcgatgaagttaaggtgaatcaaatcctgaaaaccctttcagaagtggaggagtcgatttccactctcatctcgcagccgaac

SEQ ID NO: 10105 - DNA, 570 bp, synthetic construct
  misc_feature 1..570: note = source = /note="Description of Artificial Sequence: Synthetic coding sequence"
  source 1..570: mol_type = other DNA
atggccgccggggaactcgaggggggaaaacctcttagtgggctgctgaatgctctggcccaagataccttccatggctaccctgggataaccgaagagctactcaggagccagctgtaccccgaggtgcctccggaggaatttaggccattcctggctaaaatgcgcggcattctcaagagcatcgccagcgctgacatggatttcaaccagctcgaagcctttttaaccgcacagacaaagaaacagggaggtatcaccagcgaccaggctgccgtcatttctaagttttggaagtcgcataagacaaaaataagggaatccctgatgaaccaatctcgatggaatagcgggctccgggggctttcatggcgggtcgacggcaagagccaaagtcggcactcagcccagatacacacaccggtggcaatcatcgagctggaactggggaaatacgggcaagaatctgaattcttgtgtctcgaatttgacgaagtaaaggtcaaccagattctcaagactctatccgaagtggaggagagtatttctacactaatttcccagccaaac

SEQ ID NO: 10106 - DNA, 570 bp, synthetic construct
  misc_feature 1..570: note = source = /note="Description of Artificial Sequence: Synthetic coding sequence"
  source 1..570: mol_type = other DNA
atggcggcgggggagctcgaaggtgggaagccactgtccggccttttgaacgcccttgcccaggacactttccacggataccccggtatcaccgaggaacttctgcggtcccaactctaccctgaggttccgccagaagaattccgcccctttctggccaagatgaggggaatcctcaagtcaatagcatcagcagatatggatttcaaccagctggaggcgtttctcaccgcccaaaccaagaaacaaggaggaatcacttcagaccaggcggctgtgatctcgaaattctggaagtcccacaagactaagatccgggaatcactcatgaatcagtcacggtggaattccggattgagaggactctcgtggcgcgtggatgggaagtctcaatctaggcatagcgcgcaaattcatactccggtggcaatcattgagttggaactgggcaagtacggccaggaaagcgaatttctttgcctggaattcgacgaggtcaaagtcaaccagattttgaaaaccctgtcagaagtggaggagagcatctcgaccctcatctcgcagcccaac

SEQ ID NO: 10107 - DNA, 570 bp, synthetic construct
  misc_feature 1..570: note = source = /note="Description of Artificial Sequence: Synthetic coding sequence"
  source 1..570: mol_type = other DNA
atggccgcaggggaattggaaggaggaaagccactgagcggactgcttaacgcactggcccaagacacttttcatgggtaccctggcatcaccgaagaattgcttcgcagccagctgtacccagaggtgccgccggaggaattcaggccgttcctggcgaagatgcgcgggatcctgaaatccatcgccagcgctgacatggactttaatcagctggaagcgttcctcaccgcccagaccaaaaaacaaggaggaattacctccgaccaagcggccgtgatctctaagttctggaagagtcacaagacgaagatccgcgagtcgctcatgaatcagtcgcgatggaactcggggctgcggggcctctcgtggcgggtggatggcaagtcgcagagccggcattcggctcagattcacactcccgtggcaatcattgaactggaattgggaaaatacggacaggagagtgagttcctctgcctggaattcgatgaggttaaggtcaaccaaatccttaagaccctgtcagaagtcgaggaatccatctcgaccttgatatcacaacccaac

SEQ ID NO: 10108 - DNA, 570 bp, synthetic construct
  misc_feature 1..570: note = source = /note="Description of Artificial Sequence: Synthetic coding sequence"
  source 1..570: mol_type = other DNA
atggctgctggcgagcttgagggcggtaaacctctcagcggcttgttaaacgctcttgctcaagacaccttccatggttaccctggcataacggaggagctgttgcgaagccagctctatccagaggtgcctcctgaggaattccgcccttttctggccaagatgagaggtatactaaaatccattgcttcagccgatatggactttaaccaacttgaggctttcttgactgcgcaaaccaaaaaacaggggggcataacatccgatcaggctgcggttatcagtaagttttggaaatctcacaagaccaaaattcgggagagcctgatgaaccaatcccgctggaacagtggcttgagaggactctcatggcgcgtggatgggaaaagccagtctcgacattctgcccagatccacacaccagtggcaatcattgaactagagcttgggaaatatggccaggagagcgaatttctctgtctcgaatttgacgaagtaaaggtcaaccagattctgaagacattgtccgaagttgaagaatcgatttccaccttgatctctcagcctaac

SEQ ID NO: 10109 - DNA, 570 bp, synthetic construct
  misc_feature 1..570: note = source = /note="Description of Artificial Sequence: Synthetic coding sequence"
  source 1..570: mol_type = other DNA
atggctgccggggagttagaaggcggaaaacctctgtccggcctgttgaacgcgctggcgcaggatacgttccacggataccctggtataacagaggaattactgagatcacagctctacccagaagtcccccccgaggaatttcggcccttcttagctaagatgcgggggatcttgaaatccatagcaagcgctgatatggacttcaatcagctcgaggcatttctgaccgctcagacgaaaaaacagggcgggatcaccagcgaccaggccgccgttataagcaagttctggaaaagtcacaaaaccaagattagggagtcactgatgaaccagtcaaggtggaatagcggtctacgtggattgtcttggcgtgtagatggcaagtcccagagtagacactcagctcagatccacactcccgtagcgataatcgagctggagttgggcaagtatggccaagagtccgaattcttgtgccttgagttcgatgaagtgaaagtcaaccaaatcttgaagacactgagcgaggtcgaggagtctatctcgactctgatttcccaacctaac

SEQ ID NO: 10110 - DNA, 570 bp, synthetic construct
  misc_feature 1..570: note = source = /note="Description of Artificial Sequence: Synthetic coding sequence"
  source 1..570: mol_type = other DNA
atggcggctggggagttggagggcggtaagccactctccggcctgctgaacgctctggcccaggataccttccacggatacccgggcatcaccgaagagctgctgcgcagccagctgtaccccgaagtgcctcctgaggaattccggccgtttctggcgaagatgcgcggcattctgaagagcatcgcgagcgccgacatggacttcaaccaactggaagcgtttcttactgcgcagaccaaaaagcagggtggaattactagcgaccaggccgcagtgatcagcaagttctggaagtcccataaaaccaagatcagggagagccttatgaatcagagccgatggaacagcggactgcggggactgtcatggagggtcgatggaaagtcgcagagcagacactctgcccagatccatacccctgtggccatcattgaactcgagctcggtaaatacggacaagaatcggagttcctgtgcctggagtttgacgaggtgaaggtgaaccaaatactcaagacgctgtccgaggtggaagaatccatttccacgctgatctcacagcctaat

SEQ ID NO: 10111 - DNA, 570 bp, synthetic construct
  misc_feature 1..570: note = source = /note="Description of Artificial Sequence: Synthetic coding sequence"
  source 1..570: mol_type = other DNA
atggccgcaggggagttggaaggagggaaacccctcagcgggctgctgaatgctttggcccaggatacctttcacgggtatccaggcatcactgaagagcttcttagaagccaactgtatccagaggtgcctcctgaagagtttaggccctttctggcgaaaatgcgcgggatcctgaaaagtattgcatctgctgatatggacttcaaccagctcgaggcattccttaccgcccagacgaagaagcagggcggcatcactagtgatcaggctgctgtcatcagcaagttttggaagagccataagacgaagattagagagtccctgatgaatcaatcaagatggaacagcggcctgaggggcctgtcctggagagtcgacggaaagagccaaagtcggcattctgcccagatccacacaccagttgctatcattgagctcgagttgggcaagtatggtcaggagagcgagtttctctgtcttgagtttgacgaggtgaaggtgaaccagattttgaagactttgtctgaagtggaagagtccatttctacactgatttcacagccgaac

SEQ ID NO: 10112 - DNA, 570 bp, synthetic construct
  misc_feature 1..570: note = source = /note="Description of Artificial Sequence: Synthetic coding sequence"
  source 1..570: mol_type = other DNA
atggctgccggagagctagaaggagggaaacccctgagtggcctgttgaacgctctcgcccaggacactttccacggttatccgggaataacagaagagctgttgagaagccagttgtacccggaggtgcctcctgaagaatttcgacctttcctcgccaaaatgcggggcatacttaagtcaatcgcgtctgcggatatggacttcaaccagttagaagctttcctgaccgcgcaaacaaaaaagcagggcggtatcacatccgatcaagccgctgtaatctcgaagttttggaagagccataaaaccaagattcgcgagtccttaatgaatcagtcccggtggaactcaggcctccgcggtctttcctggagagttgacggcaagtcacagtcaagacactcagcacagatccacacccccgtggccatcattgagcttgagctgggcaagtacggccaggagagcgagttcctatgtctcgaattcgacgaagtgaaggtgaatcaaatcctgaagacactgagcgaagtggaggagagcatttctactctcatttcccaaccaaat

SEQ ID NO: 10113 - DNA, 570 bp, synthetic construct
  misc_feature 1..570: note = source = /note="Description of Artificial Sequence: Synthetic coding sequence"
  source 1..570: mol_type = other DNA
atggcagctggtgagcttgaggggggaaagcccctgtccgggcttcttaacgctttggcccaagatacttttcatggatacccaggaataactgaagagctccttaggtcgcaactttacccggaagtccccccagaggaatttaggccatttcttgcaaagatgagaggtattcttaaatcaattgccagcgccgacatggatttcaaccagcttgaagcattccttactgcacaaaccaagaaacagggaggtataacttcggatcaagcagccgtgattagcaagttttggaagtcacataaaaccaagatccgtgaatcactgatgaatcaatccagatggaatagcggtctgagaggactgtcctggcgcgtggatgggaagtctcaatcgcgtcactcagctcagatccatactccagtcgcaatcattgaacttgagctgggaaagtacggtcaggaatcggagttcctgtgccttgaatttgacgaggtgaaggtgaaccaaattctgaaaactctgtcggaggtggaagaatccatttcaaccctgatttcccagccaaac

SEQ ID NO: 10114 - DNA, 570 bp, synthetic construct
  misc_feature 1..570: note = source = /note="Description of Artificial Sequence: Synthetic coding sequence"
  source 1..570: mol_type = other DNA
atggcggccggggagctggaaggggggaagccactgtcgggactactgaacgctttggcccaagatacctttcatggatatccagggattacagaggaactgctcagatcgcagctctacccggaggtccctcctgaagaatttcgcccatttttagcgaagatgaggggcattttaaaaagtattgcgagtgcagatatggattttaaccagctggaagcattccttacagcgcagacaaagaaacaaggaggaatcacttcagaccaagctgctgtcatctcaaaattttggaaatctcataagacgaaaatccgtgagtcattaatgaaccagtcccgatggaatagcggacttagaggcttgtcatggagagttgacggtaaatcccagagtaggcacagcgcacaaatccatacgccagtcgccatcatcgaactggaactgggaaaatacggacaagagtcggagttcctgtgcctggagtttgacgaggtcaaggtgaaccaaatcctcaagacccttagtgaagtcgaagaaagcatatctacgctgatttcgcagcccaac

SEQ ID NO: 10115 - DNA, 570 bp, synthetic construct
  misc_feature 1..570: note = source = /note="Description of Artificial Sequence: Synthetic coding sequence"
  source 1..570: mol_type = other DNA
atggcagcaggcgagcttgaaggcggaaaaccactgtccggcctcttgaacgcactggcacaagatacgtttcatggttaccccggtatcactgaagaacttctgagaagccaattgtacccggaggtgccccccgaggagtttcggccatttcttgccaagatgcgaggaattttgaagagtatcgcctccgcggacatggatttcaaccaactggaggcgttccttaccgcacagaccaagaagcaagggggtatcacgagcgaccaagcggcagtcatttccaagttctggaaaagccacaaaaccaagattagggaaagccttatgaatcagtcccgttggaactcaggacttagaggactgtcgtggagagtggatggcaagagccagtcccgccacagcgcacagattcatactccggtggctattatcgagcttgaactcggcaaatacggccaagaatcggagttcctctgtcttgagtttgacgaagttaaagtcaatcaaatcctcaagaccctcagcgaggtggaagaatcaatatctactctcatttcacagcctaac

SEQ ID NO: 10116 - DNA, 570 bp, synthetic construct
  misc_feature 1..570: note = source = /note="Description of Artificial Sequence: Synthetic coding sequence"
  source 1..570: mol_type = other DNA
atggccgcgggcgagttggagggtggtaagcctctcagtgggctcctgaacgcgctcgcgcaggacactttccacggatacccgggaatcactgaggaattgctccgtagtcagctttaccccgaagtcccacctgaggagttccgtccattcctggctaagatgagaggaatcctgaagtcgatcgcttccgccgacatggatttcaatcaacttgaggcatttctgacggcacagactaagaagcagggaggaatcaccagcgaccaagccgcagtgatctcgaagttctggaagtcgcataaaaccaagatccgcgaatcgctgatgaaccagtcacgctggaatagcggactgcggggattgtcctggcgcgtggacgggaaatcacaatcgcgacattctgcccagattcacacgccggtggccatcattgaactggaactgggcaaatacggacaagaatcagagttcttgtgcctggagtttgatgaagttaaggtcaaccaaatcctcaagaccctcagcgaagtggaagaaagcatcagcaccctcatctctcagccgaac

SEQ ID NO: 10117 - DNA, 570 bp, synthetic construct
  misc_feature 1..570: note = source = /note="Description of Artificial Sequence: Synthetic coding sequence"
  source 1..570: mol_type = other DNA
atggcagcgggggagttggagggtgggaaaccccttagcggtctgttaaatgccctggcccaggatacgtttcatggatacccgggcattaccgaggagttattgcgcagccagttgtatcctgaagtaccacctgaggagttcaggcccttccttgccaagatgagaggcatcctgaagtccatcgctagcgccgacatggacttcaaccagttggaagctttcttgactgcccagacaaaaaaacagggtggtattacttctgatcaggcagcagttatcagtaagttctggaaatcacataaaacaaagatacgcgagagtctgatgaaccaaagtagatggaatagcgggctgcgcggattgtcatggagggtcgacggcaagtcgcagtcacgccatagcgctcagatccacacacctgtggccataattgaacttgagttggggaagtacggccaggagtctgaattcctctgcctggaattcgacgaagtaaaagtgaatcagattctcaaaactttgtctgaggttgaggaatccatttctacgctcatttcacagcccaac

SEQ ID NO: 10118 - DNA, 570 bp, synthetic construct
  misc_feature 1..570: note = source = /note="Description of Artificial Sequence: Synthetic coding sequence"
  source 1..570: mol_type = other DNA
atggcggcgggggagctggagggaggcaagccgcttagcgggctcttgaacgccctggcgcaggataccttccatggatacccgggaatcactgaggagctgctgagatcacagctctacccagaggtgccacccgaggaatttcgcccgttcctcgcgaagatgcggggaatccttaaatccatcgctagcgccgatatggatttcaaccaactcgaggcattccttaccgcgcaaactaagaagcaaggcggaatcacttcagaccaggccgccgtgatctcgaaattctggaagtcgcacaagaccaagatccgggagtcgctgatgaaccaatcccgctggaatagcggactccgcggactgtcttggcgcgtcgacgggaaatcccagtctcggcacagcgcacaaatccatactcccgtcgcgatcatcgaactcgaactcggcaagtacggacaagagtcggagtttctctgtttggagttcgatgaagtgaaggtgaaccaaatcctgaaaacccttagcgaagtggaggagtcgatctccaccctgatctcccagcctaat

SEQ ID NO: 10119 - DNA, 570 bp, synthetic construct
  misc_feature 1..570: note = source = /note="Description of Artificial Sequence: Synthetic coding sequence"
  source 1..570: mol_type = other DNA
atggcagcaggcgaacttgagggaggcaaaccgctttcaggactgttgaatgcactggcacaggacaccttccacggataccccggtattaccgaagaactgttgcgaagccaactgtacccggaagtgcctccagaagaatttcgcccttttcttgctaaaatgaggggaatactgaagtcaatagcaagcgcagacatggactttaaccagctcgaagcatttctcactgctcagactaaaaagcaaggcggcattacttcggatcaggcagcagtcatttccaaattctggaaatcacataagaccaagatacgggagagcctcatgaatcagtcccgctggaattcggggctccgcggtctgtcatggagggtggacgggaagtcgcagtcgcgccatagcgcgcaaattcatacgccagtggcgattattgaacttgaactcggtaaatacggacaagagtcggaatttctctgcctggagtttgatgaggtcaaggtcaatcagatccttaagacgctgagcgaagtggaggagagcatctccactttgatttcgcaacctaac

SEQ ID NO: 10120 - DNA, 570 bp, synthetic construct
  misc_feature 1..570: note = source = /note="Description of Artificial Sequence: Synthetic coding sequence"
  source 1..570: mol_type = other DNA
atggcagcaggcgagctcgaggggggtaaacctctgtccgggcttctgaacgcactggcacaagatacctttcacggataccctggaatcaccgaagaactgcttcgatcgcagctttaccccgaggtgccccccgaagaattccggcctttccttgcaaagatgcgaggtatcctcaagtccatcgcaagcgcagacatggatttcaatcagctggaggcttttcttaccgcccagaccaagaagcagggaggaattacctcagatcaagcagcagtcatttcgaagttttggaagagccataagaccaaaatccgcgaatctctgatgaaccagagtaggtggaattcaggcctgagaggcctttcgtggagggtcgatggaaagtcccaaagtagacattcagcacaaattcacacgccagtggcgataatagaactcgagcttggcaagtacggacaggagtcggagttcctgtgcctcgaattcgacgaagtgaaagtgaaccaaattctcaagactctgtcagaagtcgaggagtccatctccactttgatttcccaacctaac

SEQ ID NO: 10121 - DNA, 570 bp, synthetic construct
  misc_feature 1..570: note = source = /note="Description of Artificial Sequence: Synthetic coding sequence"
  source 1..570: mol_type = other DNA
atggcagcaggcgagcttgagggaggcaagccactcagtggcctcctaaacgctctggctcaagatacctttcacggctaccctggcataacagaagagctcctgcgatcccagctgtacccagaggtgccccccgaagagttcagaccattccttgcgaaaatgcgggggatcctgaaaagcattgcatccgctgacatggatttcaaccaactggaggcgttcctgaccgcacaaacaaagaaacagggaggtatcaccagcgaccaagctgcagtcatttcgaaattttggaaatcccataagacgaaaataagagaaagtctcatgaatcagagtagatggaatagcggtctgcggggcctaagttggcgagtggatggaaagtctcaaagccgccacagtgctcagatccacacaccagttgccatcatagagttggagctaggcaagtacggccaggaaagcgagtttctttgccttgaattcgacgaagtcaaggtaaaccagattctaaaaaccctgagcgaagtggaagagagcatttccacgcttatttcccaacctaac

SEQ ID NO: 10122 - DNA, 570 bp, synthetic construct
  misc_feature 1..570: note = source = /note="Description of Artificial Sequence: Synthetic coding sequence"
  source 1..570: mol_type = other DNA
atggctgctggggagcttgagggcggcaaaccactgagcggtctgctcaatgctttggctcaggatacctttcatggataccctggaatcacagaggagctattacgctcccagttgtatcccgaagtgccccctgaggagttccggccttttctggctaagatgcgcgggatcttaaaatccatcgccagcgcagatatggattttaaccaactcgaggccttcctgaccgcccagactaagaaacagggcgggattacctctgaccaggccgcggtcatctcaaaattctggaagtcgcataaaactaaaattagggaaagtctaatgaatcagtcccggtggaattctggactgaggggactgtcctggagggttgacggaaagtcccaaagtagacactctgcccagattcatacccctgtcgccattatcgagctcgaactgggcaagtatggccaggagagtgagttcctgtgtctggaattcgacgaggtaaaggtcaaccagattctgaagactttgtctgaagttgaagaaagtattagtacattaatctcgcagcccaat

SEQ ID NO: 10123 - DNA, 570 bp, synthetic construct
  misc_feature 1..570: note = source = /note="Description of Artificial Sequence: Synthetic coding sequence"
  source 1..570: mol_type = other DNA
atggctgctggggagctggagggaggcaagccactatctggcctccttaacgcacttgcacaggacacgttccacggttatccaggtatcactgaggagctactccgaagccagttgtatcctgaggttcctccagaagagtttcgtccatttctagctaagatgcgggggatcctaaagagcattgccagtgccgatatggacttcaaccagctcgaggcattcttgaccgcccagacaaagaagcaaggcggtatcacttccgaccaagccgccgtgattagtaagttttggaagagtcataaaactaagatccgtgagtcactcatgaatcaatcgcgttggaacagcggactgcgtggattgagttggcgggtcgatggcaagtcacaatcacggcatagcgcacagattcatacccctgtcgcgataattgagctcgaactgggcaagtatggccaggagtctgagttcctctgccttgaattcgatgaagtcaaagtaaatcaaattctgaaaacgcttagcgaagttgaggagtcgatcagcacgctcatctcccaaccgaac

SEQ ID NO: 10124 - DNA, 570 bp, synthetic construct
  misc_feature 1..570: note = source = /note="Description of Artificial Sequence: Synthetic coding sequence"
  source 1..570: mol_type = other DNA
atggccgcgggagaactggaaggcggaaaaccactgtcaggactcttgaacgccctggcccaagacacttttcatggctacccaggtataaccgaggagctgctccgctcccaactgtaccctgaagtcccgcctgaagagttcagacccttcctcgccaagatgcgcggaatcctgaagtcaatcgcatctgcggacatggacttcaaccagctggaagcgttcctgacggcccagaccaagaaacaggggggtatcacctcggaccaggctgccgtcatttcgaagttttggaagagccacaagacgaagattcgtgaaagcctgatgaatcaatcccggtggaactcgggccttcggggcctgtcctggagggtggatggaaagagtcagtcgcgccattcggctcagatccacactccggtggcaataatcgaactcgaattgggaaagtacgggcaggagtccgaattcctttgccttgagttcgatgaggtgaaggtgaatcagattctgaaaaccctttccgaggtggaggaatcgatctcgactcttatcagtcaaccgaac

SEQ ID NO: 10125 - DNA, 570 bp, synthetic construct
  misc_feature 1..570: note = source = /note="Description of Artificial Sequence: Synthetic coding sequence"
  source 1..570: mol_type = other DNA
atggcagcaggtgaattggagggcgggaagccactttcgggactgcttaacgcgctggctcaggatactttccatgggtaccccggaattacggaagagttgctgagatctcaactgtaccctgaggtcccacctgaagaatttcgacccttcttggccaaaatgcggggtattctcaagtcaatcgcgagcgcagatatggactttaatcaactggaagcatttcttactgcacagacgaagaaacaaggtggaattacttcagaccaagcagccgtgattagcaaattctggaaaagccacaaaaccaagattagagagtcactgatgaaccagtcacggtggaactcgggacttcgagggttgtcttggcgggtggatgggaaatcgcagtcgagacactcggctcagatccatacgcctgtggccattatcgaacttgaacttggaaagtacggacaagaaagcgaatttctgtgtctggaatttgatgaagtcaaggttaaccaaatactcaagaccctctccgaggtggaagagtcaataagcactctgatcagccagccgaat

SEQ ID NO: 10126 - DNA, 570 bp, synthetic construct
  misc_feature 1..570: note = source = /note="Description of Artificial Sequence: Synthetic coding sequence"
  source 1..570: mol_type = other DNA
atggccgctggggagcttgagggtggaaagccactgtccggtcttctgaacgcgctggcccaagacacgtttcatggctaccctggcattacggaggagctgctgagaagccagctctaccccgaagtgccccctgaggaattccgtcccttcctcgcgaagatgagggggatcctgaaaagcatagcttcagctgacatggattttaaccagttagaggccttcttaacagcccagaccaaaaagcagggcggaatcacaagtgaccaggccgccgttatctcgaaattctggaaatcacacaaaacgaaaatccgagagtctctaatgaatcagtcacggtggaactcgggacttagaggattgagctggcgtgtggatgggaagagtcaatctaggcactccgcacagatccataccccagtggctatcattgagttggaactaggcaagtacgggcaggagtctgaattcctgtgtcttgaattcgatgaggtaaaggtaaaccagatcctcaagaccctgtctgaggtcgaggaaagcatctccacactgatctcacagcctaac

SEQ ID NO: 10127 - DNA, 570 bp, synthetic construct
  misc_feature 1..570: note = source = /note="Description of Artificial Sequence: Synthetic coding sequence"
  source 1..570: mol_type = other DNA
atggcggctggtgagctagagggtggcaagccacttagcggcctactgaacgcactggcacaggacaccttccacgggtaccccggcatcaccgaagaactcttgcggtcacaactgtaccccgaggtgcctcctgaggaattccgtccattcttagcaaagatgcgcggaatcctaaagagcattgctagcgctgatatggacttcaaccagttggaggctttcctgaccgcacagactaagaagcaaggcgggatcacttcagatcaggccgccgtaattagcaagttctggaagtcacacaagactaagatacgtgagtccctgatgaaccagagtcggtggaattctggccttcgtggtctttcctggagggtggacggaaaaagtcaaagtcgtcattcagctcagattcacactcctgtggcaatcattgaactcgaactgggaaagtacgggcaggaatcggaatttctgtgcttggaatttgatgaggtgaaggtgaatcagattctgaagaccctgtctgaggtggaggagagtatcagcactctgatatctcagcccaat

SEQ ID NO: 10128 - DNA, 570 bp, synthetic construct
  misc_feature 1..570: note = source = /note="Description of Artificial Sequence: Synthetic coding sequence"
  source 1..570: mol_type = other DNA
atggccgccggggagctggagggcggaaaacccctgtcgggtttattgaatgcactggcacaggacacttttcatggctacccaggcatcacagaggagcttctgagatcacaactgtaccccgaagtgccccccgaagagttccgcccatttctggctaaaatgaggggaatccttaagagtatcgccagcgcggatatggatttcaatcaactggaggccttccttaccgcccaaaccaaaaaacaggggggaatcacctcagaccaggccgccgtgatttctaagttttggaaaagccacaagaccaaaatcagagaatcactgatgaaccaatcccgctggaattcagggttgcgagggctgtcttggcgggtggatggtaaatcgcagagcaggcactcagctcagatccacactcctgtggctattatagaacttgaactgggtaagtatggccaggaaagcgaatttctatgcctagaatttgacgaggtcaaggtgaaccagattctaaagactctttctgaggtggaagaatccatcagtactctgattagccaacccaat

SEQ ID NO: 10129 - DNA, 570 bp, synthetic construct
  misc_feature 1..570: note = source = /note="Description of Artificial Sequence: Synthetic coding sequence"
  source 1..570: mol_type = other DNA
atggcggcgggagagctcgaagggggtaagcctctgtctggattgctgaacgcgctggcccaggacaccttccatggatacccggggatcaccgaagagctcctcagatcgcaactgtaccccgaggttccaccagaagagttccgcccgtttctcgcaaagatgcgcggaatcctcaaatccatcgcttcggccgacatggatttcaaccagctcgaagccttcctgaccgcgcaaaccaaaaaacagggcgggattacgtccgaccaagccgccgtgatttccaagttctggaagtcccacaagaccaagatcagagaatcactcatgaaccaatcacgatggaactcgggtctgcggggcctgtcctggcgggttgacggaaagtcccagtcgcgccattcagcgcagatccacacccctgtcgcaattatcgaactcgaactgggcaagtacggacaggaaagcgagttcctctgtcttgagttcgacgaggtgaaggtcaatcaaattctgaaaaccctctccgaggtcgaagagtccatttcgactctgatctcgcaaccaaat

SEQ ID NO: 10130 - DNA, 4440 bp, synthetic construct
  misc_feature 1..4440: note = source = /note="Description of Artificial Sequence: Synthetic coding sequence"
  source 1..4440: mol_type = other DNA
atgcaaagatcccctttggagaaagcatcagtcgtaagcaagctcttcttttcctggactcggcccatcctgagaaagggctaccggcaacgtctagagctgagcgacatatatcagatcccttccgtggattctgcagacaacctctcggagaagcttgaaagagaatgggaccgggagttagcgtccaaaaaaaaccctaaattgattaacgccctccgcaggtgtttcttttggaggttcatgttttacggaatcttcctgtacctgggtgaggtgactaaagcagttcagcctttgctgctcggacgaattatcgctagttacgacccggataataaggaagagcggtctatcgctatttatttaggcatcgggctgtgcttgctgttcatagtgcggacattgctcctgcacccagccatcttcgggttgcaccacatcggaatgcagatgcgcatcgccatgttctcactaatctacaagaaaacactaaaactctcttctcgagtcctcgacaagataagcatagggcagctggttagcttactgagtaacaatctcaataagttcgatgagggattggccttggcccacttcgtttggatcgcccccctgcaagtggccctgctgatgggtctgatttgggagctcctccaggccagcgccttctgcgggctcgggtttctaatcgtgctggcactgtttcaggccggtttgggccgtatgatgatgaaatatcgagaccagcgagctgggaagatctcggagcgattggtcattactagcgaaatgatcgagaacattcagtcagtcaaagcctattgctgggaagaagccatggagaagatgatcgaaaacctacgacagacggagcttaagctcacacgaaaagctgcctacgtgcgttatttcaactcttccgctttctttttctccgggttcttcgtagtcttcctgtccgtgctaccttatgctttaataaagggaataatcctacgaaagatttttactacgataagcttctgtatcgtgctccggatggccgtcaccaggcagttcccctgggccgtgcaaacctggtatgactctctgggtgctataaacaagattcaggacttcctgcaaaagcaggagtataaaaccctcgaatataatttgaccaccaccgaagtggtgatggaaaacgtcacggccttctgggaagagggcttcggagagctgtttgaaaaggctaagcaaaataacaataatcggaaaaccagcaacggcgatgattctctatttttctccaatttctctctgctggggactccggtccttaaagacatcaatttcaagatagagaggggccagctgctggccgtggccggaagcaccggggcaggaaagacaagcttgctcatggtcatcatgggggaattagagccgtctgagggcaagatcaaacatagtggacggatctctttctgttcacagttctcttggatcatgcctggcaccataaaggaaaatattatctttggagtttcatatgacgagtatagatacaggagcgttatcaaagcatgtcagctggaggaggatatctccaagttcgcggagaaggacaatatcgtgttgggcgagggggggataacattgtcaggtggccagcgggctcggatcagcctggctcgggctgtgtataaagatgccgacttgtatctactagactccccctttggctatcttgacgtgctgactgagaaggaaatatttgaaagttgcgtttgtaagctgatggcaaataagacaagaatcctggtcacaagtaagatggaacatctgaagaaagccgacaagatcttgatacttcacgagggaagttcatacttttacggaacattttctgagctccagaacttgcaaccggacttctcctctaaattaatgggctgtgactcttttgaccagttttcagcggaacgacggaatagcattctgactgaaactctccacaggttcagtcttgaaggagacgctcccgtttcctggacagagacgaaaaaacagtcattcaagcaaactggagagttcggcgagaaaagaaagaactccattctgaatccaatcaatagcataagaaaattcagcatcgtgcagaaaaccccgctgcagatgaatggaattgaggaagactccgatgagccactcgagcgccgtctgtcactggtgcctgatagtgaacaaggcgaggccattcttccgagaatctccgttatttcaactggaccgaccctgcaggcacgcaggcggcagtccgtgttgaacctaatgacacactctgtaaatcagggccagaatatccaccgaaaaactacagcatcgacacgaaaggtgtccctagctccccaggcaaatctcacagagcttgatatctatagcaggcggctgagccaggagacaggcttggagatcagtgaggagatcaacgaggaagatttaaaagaatgttttttcgatgatatggaaagcataccagccgttaccacatggaatacatacctgagatacataaccgtacataaatcattaattttcgtgctaatatggtgtctggtgatattccttgctgaagtcgctgcctctttggtggtcctatggctcctgggcaacacccccctgcaagataaggggaatagcacccacagccgcaacaactcctatgcagtgatcatcacttccacctcatcctactatgtgttttatatctacgtgggtgtcgcagacactttgctcgcaatggggttctttcgggggctcccactagtgcataccctgattaccgtcagtaaaattctgcaccacaagatgctccactcagtactgcaggctccaatgagcactctgaatacactcaaagccggcggcatcctgaatcggttctcgaaggacatcgctatcctggatgacctcctgcccctgactatcttcgacttcatacaactgttgctcattgtcattggcgccatagccgtggtggccgtcctacaaccctacatatttgttgccactgtacctgtgattgtcgcttttatcatgctaagagcatattttctccaaacatcacagcagctgaagcagctcgagagtgaagggagatcgcctatttttacccaccttgtgacttctctgaaagggttgtggaccctacgcgctttcggccgtcagccctactttgagacactgttccataaagcccttaatttgcacacagcaaattggtttttgtatctgtcaacattgagatggttccaaatgcgcatagagatgatttttgtcatcttctttattgctgttacttttatctcgatcctgacaaccggagagggtgaagggcgtgttggcatcattctgaccctggctatgaatattatgtcaacacttcagtgggccgtgaactccagcatcgacgtagatagtctaatgcgatccgtgagcagagtatttaagttcatcgatatgccaactgagggtaaacccaccaaatccacaaaaccctataaaaacggacagctcagcaaggtgatgatcattgagaattcccatgtgaaaaaggacgacatctggccgtcaggtggtcagatgacagtcaaggaccttacagccaaatacaccgagggcggcaacgctattctggagaacatttcgttttccatctcacccggccagagggtggggctacttggtcgcaccgggtctggaaagagcacgctgctctccgccttcttacgcctattaaatacggagggtgaaatacagatagatggggtaagctgggacagcattactctgcagcaatggaggaaggcgttcggggtgatcccacagaaagtttttatattcagtggtacctttaggaagaacttggatccctatgagcagtggtcagaccaggagatctggaaggtggccgacgaggttggactgagaagcgtcattgagcagttccctggcaagctagattttgtgctggtggacggaggctgcgtgctcagtcacggccacaaacaactcatgtgtctggcaaggtccgtgctttctaaagccaaaatactcctattggacgagcctagcgcacacctagaccccgtaacttaccagattataagacggactctcaagcaggcttttgcagactgcacagtgattctctgcgagcaccggattgaggcaatgctggaatgtcagcagtttttggttattgaggaaaacaaggtgcgtcaatacgatagcattcagaagctgttgaatgaacgaagcctcttccggcaagcgatctcaccctctgatcgcgttaagttgttcccacaccgcaattcctctaagtgcaagtccaagccccagatagctgccttgaaagaagaaactgaggaagaggttcaggacactaggctt

SEQ ID NO: 10131 - DNA, 4440 bp, synthetic construct
  misc_feature 1..4440: note = source = /note="Description of Artificial Sequence: Synthetic coding sequence"
  source 1..4440: mol_type = other DNA
atgcagcgctcgccgctggagaaggcttcggtcgtgtcgaagctgtttttctcctggacccggcctatccttcgcaaggggtaccggcaaagactggagctcagcgacatctaccagatccctagcgtggattcagctgataacctgtcggagaaattggaacgcgagtgggatcgcgagctggcatccaagaaaaacccaaagctcatcaatgcgctccggcgctgctttttctggcgcttcatgttctacggaatcttcttgtacttgggagaggtcaccaaggccgtccaaccgctgctgctcggaagaatcattgcaagttatgacccagacaacaaggaagagcgtagcatcgccatttacctcggtataggactctgcctcctcttcatcgtgaggactctcctgctgcaccccgcaatctttggtttgcaccatatcggtatgcagatgagaatcgccatgttttcgttgatctacaaaaagactctgaaactctcaagccgtgtgctcgataagatctccatcggacagctggtgtccctgctgagcaacaatttgaacaagttcgacgagggcctggccctggcccacttcgtctggattgcccccctccaagtcgctctgctgatggggctcatctgggaattgttgcaggctagcgctttctgcggtcttggcttcctgatcgtcttggcgctgtttcaggcaggactcggccgcatgatgatgaagtaccgggatcaacgtgctggaaagatctcggaacggcttgtgataactagcgaaatgattgagaatattcaatcggtgaaggcctactgctgggaagaagccatggaaaagatgattgaaaacctgagacagacggagctgaagctgacgcgcaaagccgcatacgttcgctacttcaacagctcggcatttttcttctccggattctttgtggtgttcctgtccgtcctgccatacgcgctcatcaaagggatcatcctgagaaagattttcaccactatcagcttctgcatcgtcctgcgcatggctgtcactagacagttcccgtgggcggtgcagacctggtacgactcgctcggcgcgattaacaaaattcaagactttcttcagaagcaggaatacaagaccctggaatacaatctcaccactaccgaggtggtgatggagaatgtgactgcgttctgggaggaaggattcggcgaattgtttgagaaggccaagcagaataacaacaataggaaaacgagcaacggtgatgatagcctgttcttctctaacttttcgctgttgggcactccggtgcttaaggatatcaatttcaagatcgaacggggacagctcctcgcagtggctggcagcaccggagcgggaaagacctcccttctcatggtgatcatgggagaattggaaccgtcagagggcaagataaagcacagcggaagaatctcgttctgttctcaattcagctggatcatgccagggactatcaaggaaaacatcatctttggagtgtcctacgacgagtacaggtaccggtctgtcatcaaagcctgtcagctggaagaggacatctccaagtttgcggagaaagacaacatcgtgctgggagaaggcggcattaccttgagcggtggacagcgagcaaggatctccctcgccagagccgtgtacaaagatgcagatctgtatctgttggactccccgttcggatatctcgatgtcctgaccgaaaaagaaatctttgagtcgtgtgtctgcaagctgatggcgaacaagacccgtatccttgtcacgtccaaaatggaacacctcaaaaaggcggacaagatcttgatcctgcacgaaggctcctcctacttctacgggaccttctcggaactgcagaatctccagcctgatttctcctcaaagctgatgggatgcgattctttcgaccagttcagcgccgagcgcagaaactccatcctcactgaaaccttgcatcgcttttcactggaaggagacgcgccggtgtcatggactgaaactaagaaacaatcctttaagcagactggagagttcggcgagaagcggaagaacagcattctgaatccgataaactccattaggaagttctcaatcgtccaaaaaacgccactgcagatgaacggaatcgaagaggattcggacgagcctttggaacggcggctgagccttgttccagattcggaacagggcgaggccattctcccaagaataagcgtcatcagcaccggtcctactctgcaagccagaagaaggcaatcggtcctcaatttgatgacccattccgtcaatcagggacaaaacatccaccggaaaaccaccgccagcacccgcaaggtttcgctggcgccgcaggccaatcttaccgagcttgacatctactcgcgccggctgagccaggagacggggctggagattagcgaggaaatcaacgaggaggacctgaaggagtgcttctttgatgacatggaaagcatcccagcggtcaccacttggaacacgtaccttcggtatatcaccgtgcataagtctttgatcttcgttctgatctggtgtctcgtcatcttcctggccgaagtggccgccagcctcgtggtgctgtggctgctgggtaacactcccctccaagacaagggcaactccactcactcgcgcaacaactcgtacgcggtgattatcacctccacttcttcatactatgttttctacatctacgtaggagtggccgacactctgttggcgatgggatttttccgcgggctcccgctcgttcataccctgatcaccgtctccaagatactgcatcataagatgctgcactccgtgctgcaggccccaatgtccacgctgaatacgttgaaagccggaggaatcctgaatagattctcgaaggacatcgcgatcctggacgacctgttgccactcacgatctttgacttcatccagctcctgctgatcgtgatcggagcaatcgcggtcgtcgcggtgctgcagccgtacatcttcgtcgcaactgtccccgtgattgttgccttcatcatgctgcgggcgtacttccttcaaacgtctcagcagctgaagcagctggagtcagaaggccgttcgcctatctttacccacctggtgacttcactgaagggactgtggactctgcgcgccttcggccgccaaccatactttgaaactctgttccataaggcgctgaatctgcatacggcaaactggttcctgtacctgagcaccctgaggtggtttcaaatgagaattgaaatgatcttcgtgatcttcttcatcgctgtgacctttatctcgatcctcactacgggagaaggggaagggagagtgggaatcatccttacccttgccatgaacatcatgtccaccctgcaatgggccgtcaactcctccatcgacgtggactcactgatgcggagtgtgtcacgcgtgttcaagttcattgacatgccgactgagggcaaaccgaccaagtccactaagccttacaagaatggacaactcagcaaagtgatgatcatcgaaaatagccacgtgaagaaagatgacatctggccaagcgggggacagatgactgtgaaagacttgacggcaaaatacaccgaagggggcaacgcaatcctggaaaacattagcttctcaatttcaccgggacagagagttgggttgctcgggcggaccggttcgggcaagtcaaccctcctttcagcattccttcgcctgcttaacactgaaggtgaaatccaaatcgatggtgtgagctgggatagcattactctgcagcagtggcgtaaggcgtttggcgtgatccctcagaaggtgttcattttcagcggaacttttaggaagaatctggatccgtacgagcagtggtcggatcaggaaatctggaaggtggcggacgaagtgggattgcggtcggtgatcgaacagtttccggggaagttggattttgtgctggtcgacggcggctgcgtgttgtcgcacggacacaaacaactcatgtgcttggcgcggagtgtcctgtcgaaggctaaaatccttctgctggatgagccctccgcacacctcgacccggtgacctaccagatcatcaggcgcaccctgaagcaggctttcgctgattgtacggtgatcctctgcgaacatcggattgaggccatgctggaatgccaacaattccttgtcatcgaagagaataaggtgcggcagtacgattcaatccaaaaactccttaacgagcggtccctctttcgccaggctatcagtccgtccgaccgggtgaaacttttcccgcaccgcaactcgtcgaaatgcaaatcgaaaccccagattgccgcactgaaagaggaaaccgaggaagaggtgcaagacacgcgcctg

SEQ ID NO: 10132 - DNA, 4440 bp, synthetic construct
  misc_feature 1..4440: note = source = /note="Description of Artificial Sequence: Synthetic coding sequence"
  source 1..4440: mol_type = other DNA
atgcaaaggtctcctctggagaaggccagcgtcgtctcaaaattgttcttctcatggacccgccccatcctgcggaagggatatcgacagaggctggagctcagcgacatctaccaaataccgtcggtggatagcgcggataacttgagtgaaaaactggagcgcgagtgggacagagagctggcgtctaagaagaaccctaagctgatcaacgccctccgccgatgcttcttctggcgattcatgttttacggcattttcctgtacctgggggaagtgactaaagcagtgcagcccctcttgctgggacgcattatcgcctcgtatgaccccgacaacaaagaggagaggagtatcgctatatacctcggcatcggactttgtctgctctttatcgtgcggactctcctcttacaccccgcaatttttggactgcaccatatcggaatgcagatgagaattgccatgttcagcttaatttataagaagactctaaagctatcttctcgcgtgctggataaaattagcatcgggcagctggtgtccttgctgagcaataatctgaacaagttcgacgagggtctggctctggctcattttgtttggattgcccccttgcaggtcgctctactcatgggccttatttgggagctgctgcaggcctcagccttttgtggcctgggatttttgatcgtgcttgcgctgttccaggccggactggggcggatgatgatgaagtacagggatcagcgcgctgggaaaatctccgaaagactggtgatcactagtgagatgattgaaaacatccaatcagtgaaggcttactgttgggaagaggccatggaaaagatgatcgagaatctacggcagactgaactgaagctgacgcgcaaggccgcgtacgtgcggtattttaactcctccgcattcttcttctccgggttcttcgtcgtgtttctttccgtgctgccgtacgccctcatcaaaggaataattctgcgaaagatcttcaccacaatcagcttctgcatagtgcttcggatggctgtaactcgtcagttcccctgggctgtgcaaacctggtatgactccttaggtgcaatcaataaaatccaggatttcctgcagaaacaggagtacaagaccctggagtataaccttactacgactgaggtggtgatggaaaacgtgaccgcgttttgggaggagggatttggggagttgttcgaaaaggcaaaacagaacaacaataaccgaaaaacatctaacggagatgattccttgtttttctctaactttagtctgctggggactcctgtgctgaaggacattaacttcaagatagaacgcggacaattactggccgtggcgggttccaccggtgcaggaaagacctctctcctcatggttattatgggggagctggagcctagtgagggcaagatcaaacatagcggccggatctccttctgcagtcagtttagctggataatgcccgggaccattaaggagaatatcatattcggtgtgtcttacgacgaataccgctacagatctgtgattaaagcgtgccagctggaagaagacatttcaaagttcgcggagaaagacaacatcgtactgggagaagggggtatcactttgtcaggcggtcaaagggcgcgcatcagtctggccagggcagtttacaaagatgccgatctgtacctcctggatagtccattcggatacctcgacgtcctcacagaaaaggaaatctttgagagctgtgtctgtaagttgatggcgaataagacccgtatcctcgtgacctctaaaatggagcatctgaagaaggcagacaaaatcctgatcctgcacgaggggtccagctatttctacggaacttttagcgagcttcaaaacctccagcctgacttttcctccaaactgatgggatgcgactcttttgatcaattctcagcagagcggagaaactccattctgacagaaacccttcaccgcttctccttggaaggcgatgcgcccgttagctggacagaaacaaagaagcagagcttcaagcagactggagaatttggcgagaagcggaaaaactcgattctgaatcccatcaacagcatacggaagttctcaattgtccaaaagacaccgctccaaatgaatggtatcgaggaggatagtgacgaacctctggaacgacgactctctttggtgcctgattcagagcagggcgaggcaatcctgccaagaatttcggtgataagcaccggtcccacactgcaggctagaagaagacagtccgtcctgaatctcatgacccactcagtgaaccaggggcagaatatccaccgcaagactacggcatccacccggaaggtgagcttggcgccgcaggccaacctgacagagttggacatttacagtaggcggctctctcaggagacagggctagagatttcagaggagataaacgaagaagacctaaaggagtgcttcttcgacgatatggaaagtatccccgcagtcactacatggaatacttacctccggtatattactgtacataagagcctcatctttgtgttgatctggtgcctggtgatctttctggctgaggtggccgcctccctggtggtgctgtggcttctgggcaatacgccactgcaagataagggcaactctactcatagtcgcaataatagctatgccgtgatcattacaagcacatcttcctattacgttttctacatatatgtgggagtggccgatactctcctcgccatgggcttctttcgagggctccctttggtgcacacactgattacggtcagcaagatcttgcaccacaaaatgttacactcagttctgcaggcccctatgagtactttgaatacactcaaagctggcggtatactcaaccggttctccaaggacatagcaatcctggatgatttgctccccctaaccatctttgactttatccagctgctgctgatcgtgattggtgcgattgccgtagttgcggtcctccaaccctatattttcgttgctacagtccccgtgattgtggcatttatcatgctgcgagcctacttccttcagacctcccagcagctgaaacaattagaaagtgagggcagatcccccatctttactcacctggtgaccagcctgaaggggctctggactttgagagcctttggccgccagccttacttcgaaactttgttccataaggccctcaaccttcatactgcaaactggtttctctacctaagcaccttacgctggtttcaaatgcgcatcgaaatgatttttgtgatatttttcattgctgtaaccttcatctccatactgaccacaggcgagggtgaagggcgggttggtatcatactgacccttgccatgaacatcatgtcgacgctgcagtgggcagttaattcatctatcgatgtcgactctctcatgcgctcagtatcccgggtgtttaagttcatcgatatgcctacagagggaaagcccaccaagagtactaagccctacaagaatgggcaactatccaaggtgatgatcatagagaatagtcacgtgaaaaaggatgatatctggccctccgggggacagatgactgtgaaagacctcacagccaaatataccgagggtggaaacgctatcctggagaatatctctttctccatttctcctggccagcgggtgggtttgctgggacgtaccgggagcggaaaatccaccttgctctctgccttcctgcgcttgctaaatacagaaggggagatccagatcgatggggtgagctgggacagcatcacactgcagcaatggcggaaggctttcggcgttatcccccaaaaagtgtttatcttttccggaacttttagaaaaaacctggatccttacgagcagtggagcgaccaggagatttggaaagtggccgacgaagtggggctccgtagcgtgattgaacagttccctggtaaactggatttcgtgctggtggacggggggtgcgtgttgtcccacgggcataagcagctgatgtgtcttgcccgtagcgtcctgagtaaggcaaagatcctactccttgatgaaccttcagcacatctggacccagtgacataccagatcatccgccgcacactaaaacaggccttcgccgattgtaccgtgatactttgtgaacataggatcgaggctatgctcgaatgccagcagtttctggtgatcgaagagaacaaagtccggcaatacgactccatccagaaactgcttaatgagaggtcacttttccgccaggccatctctccaagcgatagggtcaagctttttccccatcgcaatagctccaagtgtaagagcaagccccagatcgccgcccttaaggaggagactgaggaagaagtccaggacacccggttg

SEQ ID NO: 10133 - DNA, 4440 bp, synthetic construct
  misc_feature 1..4440: note = source = /note="Description of Artificial Sequence: Synthetic coding sequence"
  source 1..4440: mol_type = other DNA
atgcagcgcagcccactggaaaaagccagcgtggtatccaagctcttctttagctggacacggcctattcttcgcaagggatacagacaacgacttgagctctcagatatctaccagattccatccgttgactccgccgacaacctctcagaaaaactggaaagagagtgggatagggagttggctagcaagaagaaccccaagctcatcaacgccttgcgacgatgttttttctggcggttcatgttttacgggatctttctgtatttgggcgaggtcacgaaggcagtccagccgcttctcctcgggcggatcatcgcatcttacgaccccgataataaagaggaacgctccatcgctatttatctgggaatcggcctgtgtctgttgtttatcgttcggacgttgctgctgcaccctgcaattttcggtctgcatcacataggtatgcaaatgcgcattgctatgttctccctcatctacaaaaaaacactgaaactgtccagcagagttctggataaaatctctatcgggcagctggtgtcactgctgagcaacaacctcaacaaattcgatgagggactggcactggcacacttcgtgtggatcgctccactgcaggtcgctctcctgatggggctcatctgggaactgctccaagcttcagccttctgcgggcttggatttctgatcgtgctcgctctgttccaggccggactcggtagaatgatgatgaaataccgagatcagagggctggtaagattagcgagcgcctggtaattacaagcgagatgatcgagaacatccagtctgtgaaagcatactgttgggaagaagctatggagaagatgatagagaatctgcgccagaccgagctgaagctgacaaggaaagcagcctacgtgcgatatttcaacagttctgcattcttcttcagcggcttctttgttgtgttcttgagtgtgctgccctatgctttgattaaggggattatcctgcggaaaatttttacaacaatcagtttctgcattgtccttagaatggctgtgactaggcagtttccctgggccgtgcagacttggtatgactccctgggagccataaacaagatccaggatttcctgcagaagcaggagtacaagaccctggaatataatcttacaacgacagaagtggttatggagaacgttacagccttttgggaggagggcttcggtgaattgtttgagaaggccaagcagaataataacaatagaaaaacaagcaacggagatgacagtctttttttctctaacttctctctgctggggactcctgtgcttaaagatatcaatttcaagatcgaaagaggtcagctgcttgcggtcgctggctcaacaggggcaggcaagactagcctgctgatggtcataatgggagagctggagccatcagaagggaaaattaagcactcaggaagaatttctttctgttctcagttcagttggatcatgcctggcactattaaggaaaatataatcttcggggtgagctacgatgagtaccggtaccgatcagttatcaaagcttgtcagctcgaagaggatatttccaagttcgctgaaaaagataatatagtactgggggagggcggtatcacacttagcggcggccagagagcccggatatcactggccagggccgtatataaggacgctgatctctacctgctggattccccctttggatatcttgatgtactgacagaaaaggagattttcgagagttgcgtctgtaagctcatggccaacaagacccggattctcgtgacaagcaagatggagcatctgaaaaaggcagataaaatcctgattctgcacgaggggtcatcatatttttatggcaccttctccgaactccaaaatctccagcctgatttttcttccaaattgatgggatgtgacagcttcgaccagttcagcgcggagaggaggaacagcatcctgacggaaaccctccatcgattctccctcgagggcgatgcccctgtcagctggaccgagactaaaaagcagtccttcaaacagacaggtgaatttggagagaaacggaagaactccatcttgaaccccatcaactcaattcgaaaattttctatagtgcagaaaacacctcttcagatgaatgggatcgaagaggattctgatgagcctctcgagaggagacttagcctggtgcccgattctgagcagggggaggccatcctgcccagaatctctgtgatctctaccggccctaccctgcaagcccgacggcgccaatccgttctcaacctgatgacacacagcgtgaatcagggacagaacattcatcggaagactaccgcatctaccaggaaggtgagcctcgctccacaggccaatctgacagaattggacatctattcccgacggttgtctcaagaaaccggcttggagattagcgaagaaattaacgaggaagaccttaaagagtgttttttcgacgatatggagagcatccccgctgtaaccacctggaacacttatctgcgatatatcaccgtgcacaaaagcctgatttttgtacttatctggtgtcttgtcatattcctcgctgaggtggcggcgtccctcgtcgtgctgtggttgttgggtaacactcccctgcaggacaagggaaatagcacacactcacgcaacaatagttacgccgttataataacctccacatcaagctattacgtgttctatatctatgtgggagtggctgataccctcctcgctatggggttcttccggggcttgcccctggtgcatacgctgatcaccgtgagcaagatcttgcatcacaagatgctgcactccgtattgcaagctcccatgtctactctgaataccctgaaagcaggtggcatactgaataggttctccaaggatatcgccatactcgacgatctgcttcccctgaccatttttgacttcatccaactcctgcttatcgtaatcggcgctatcgccgttgtggccgtactgcagccatacatatttgtcgcaaccgtgcccgtgatcgttgcttttatcatgctccgcgcttactttctccagacatctcaacagctcaagcagctggagagcgagggacggtctcccatcttcacacatcttgtgacatctctgaagggtctttggaccctcagagccttcggtagacagccctacttcgaaactctgttccacaaggctctcaatctccatacagcaaactggtttctgtacctctctacgttgcgatggttccagatgaggatcgagatgatctttgttatcttttttatcgcagttacttttatttctattctgacaactggtgagggggaaggcagggttgggattattctgacgctcgcaatgaacatcatgtctacactgcagtgggcagtcaattcttcaatcgatgtagacagccttatgaggtccgtgagtcgggtgttcaaattcattgacatgcctactgagggaaagcccacaaaatctaccaagccttataagaatgggcagctgtccaaagtgatgataatagaaaactctcatgtgaaaaaagacgatatatggccctctggggggcaaatgacagtaaaagatcttactgccaaatacacagagggaggaaatgctatcctggagaatatctccttctctatttctcctggccagagagtgggcttgcttggacggactggaagcgggaaatccaccctgctgagcgcgtttctgagactgctgaacacagaaggagagatccagatcgatggcgtgtcttgggatagcataacactgcagcagtggcgaaaggcctttggtgtcatcccccagaaggtctttattttctcagggacattcaggaagaatctcgacccttatgagcagtggagtgaccaagaaatctggaaggtggctgacgaggtagggctgcgaagtgtgatagagcagtttcctggaaagctcgattttgtgctggtagacggcgggtgcgttctttcacacggacacaaacaactcatgtgcctggcacgcagtgtgctgagtaaggccaaaattctcctgctggatgagccttcagctcaccttgatcctgtcacttatcagattattcgccggacccttaaacaggcattcgccgactgtactgtgatcctgtgcgagcatcgaattgaggccatgctggaatgccagcaattcttggtcattgaagaaaacaaagtgcggcagtatgatagtatccagaagcttcttaacgagcggtcactgtttcgccaggccatcagtccctccgatcgcgtaaagctgtttccacacagaaattccagcaaatgcaaatcaaagccgcaaatcgcggctctgaaggaagagactgaagaggaggttcaggacactcgcctt

SEQ ID NO: 10134 - DNA, 4440 bp, synthetic construct
  misc_feature 1..4440: note = source = /note="Description of Artificial Sequence: Synthetic coding sequence"
  source 1..4440: mol_type = other DNA
atgcagagatctcctctcgagaaggcttccgtggtcagtaagctctttttcagctggacaaggcctatcctcaggaagggataccgacaaaggttggagctctctgacatttatcagattcctagcgttgactccgccgacaatttgtccgagaaactcgaacgcgagtgggatcgggagctcgccagtaaaaaaaatccaaaactgatcaatgcgctgcggaggtgctttttctggagatttatgttctacggcatatttctttacctcggggaagtgactaaggccgtacagccactgcttttaggccgtattattgcttcctacgatcccgataataaagaagagaggtccatcgcaatttacttgggcatcggtctgtgtctgctcttcatcgttcggacgctccttcttcaccccgctatttttggcctgcaccacatcggcatgcagatgaggattgccatgttctcccttatttacaagaaaacattgaagctgagtagtcgcgtcctagacaaaattagtatcggccaactcgtcagtcttctctccaacaatctgaataagttcgacgaggggttggcacttgcccactttgtatggattgccccacttcaggtggcactgttgatgggcctgatctgggagctcctgcaggcaagcgcgttctgtggtctgggttttctcatcgtgctcgctttatttcaggcaggactaggccggatgatgatgaaatatcgggatcagagggccggcaaaatctccgagcggcttgtcattacatctgagatgattgaaaacatccaatccgtgaaggcttattgctgggaggaggccatggagaagatgattgagaacttgagacagacggagctcaagctgactcggaaggcagcatacgtccgttatttcaacagtagtgcttttttcttttcagggttcttcgtggtgttcctgagtgtgctgccgtacgccctgataaagggcattattctcagaaaaatctttaccacaattagcttttgtatcgtcctgaggatggctgtgacgcggcagttcccctgggcggttcagacttggtatgatagcctaggcgccattaataagatccaggattttctccaaaagcaagagtacaaaactctcgagtataaccttacaactaccgaggttgtcatggaaaacgtcacagcgttctgggaggagggctttggagaactctttgagaaggccaaacagaataacaacaacaggaaaacaagcaacggtgacgactctctgttcttctctaacttcagtttgctgggcactcccgtcctaaaggacataaatttcaagatcgagagggggcaacttctcgcagtggctggttcaacaggtgccgggaaaacctcgttgctcatggttatcatgggcgagttggaaccttccgagggcaagatcaagcacagcggccgcataagcttttgttcgcagttctcctggataatgccaggcactataaaggaaaatattattttcggagtctcttatgacgaatacaggtacaggtccgtcataaaggcatgtcagctggaggaagacattagcaaatttgcagagaaggataacatcgtgctgggtgagggggggatcacgctctcaggcggacagcgcgcgcgtattagcctcgcaagggctgtttataaagatgctgatctctacctgctggactctcctttcggatatctggacgtgctgaccgaaaaagaaattttcgagtcttgcgtgtgtaagttaatggctaacaaaacgcggattctagtcacttccaagatggagcatttaaaaaaggcggacaaaatcctgatcctgcacgaggggtctagctatttctacggcacattctcagagcttcaaaacctgcagcccgatttctcctctaagcttatgggttgtgacagctttgaccaattttccgctgagagacgtaactcgatcctcactgagaccctgcaccgtttcagcctggagggggacgcccccgtgtcttggacggagacgaaaaaacagagctttaaacagactggagagttcggcgagaagcgcaagaatagtatccttaatcccatcaactccattcggaaattcagcattgtccagaaaacccctcttcaaatgaacgggatcgaagaagattctgatgagccactggaaaggaggctctccctggtgccagacagtgagcagggagaagccattttgcctaggatcagtgtaatatccacgggccccacactgcaggctcgaaggcggcagtccgttctgaacctgatgacccacagcgttaaccagggtcaaaacatccaccggaaaacgacagctagtacgagaaaggtgtctctcgccccccaggctaatttgaccgaactggatatttattcaaggcgactctctcaggagacgggattagagatcagcgaggagattaacgaagaagatctgaaggagtgtttctttgacgatatggagtcaatacctgccgtgacaacctggaatacttatttgcggtacatcacggtgcataagtcacttatttttgttctgatctggtgtctggtgatttttttggctgaagttgcggccagcctagtcgtgctgtggctactcggcaacaccccactgcaagacaaaggcaacagcactcatagtcggaacaacagctacgccgtcattatcacaagcacttcatcctactacgtgttttatatctatgtgggagtggcggatactctcttagctatggggttcttccgcggcttgccgctggtacatactctcattaccgtgtctaagatcctgcaccataagatgctacacagtgtcctacaggccccaatgagcactctcaacaccctaaaggcaggcggaattctaaataggttcagcaaggatatagccattctggacgaccttcttcctctaacaatatttgactttatccagctccttctgatagtgattggagcgatcgcagtggtggctgtactccagccttacatctttgtggcaactgtccccgtgattgtagcattcataatgctccgggcctattttctccagacttctcagcagctaaagcagctagagagcgaaggtagatcccctatcttcacccatcttgtaactagtctgaaaggtctgtggaccctgcgtgccttcggacgccaaccctactttgagactctgtttcataaggcactgaacctccacactgccaattggttcctttacctttcaactctgagatggttccagatgcgaattgaaatgatcttcgtgattttcttcattgccgttacctttatatccatccttacgactggcgaaggggaggggagggtaggaatcattctgactctggcgatgaatatcatgtctacccttcagtgggcggttaatagttcaatcgacgttgattccttaatgcgatccgtgagccgcgtctttaaattcatagacatgcccacagagggcaagcccacaaagagcactaaaccgtacaaaaatggccaactcagtaaggtaatgataatcgagaacagtcacgtgaagaaagacgacatctggccgtccggtgggcagatgactgtgaaggacctgaccgccaaatacaccgaagggggtaatgcaatcctggagaatatcagcttcagtatatcacccggccaacgcgtaggactgctcggccgcactggaagcggaaagtcaacacttctatcagcattcctgcgcctgttgaacactgaaggcgagattcagattgacggcgtaagttgggattccattacattgcaacagtggcgcaaagcattcggagtgatcccacagaaggtctttattttcagcggcacttttcggaaaaatctggatccgtacgagcagtggagtgatcaggaaatatggaaagtcgctgacgaggtggggctgaggtctgttatcgagcagtttcccggaaagctggacttcgtgctagtagatggaggttgcgtgctatctcacggacacaagcagctgatgtgtctggccaggtcagtgctatccaaagctaaaatcctgctgctggacgagccgagtgctcacctcgacccagtgacttaccagattatccggaggacattaaagcaggccttcgctgactgcaccgtcattctgtgtgaacatagaattgaagcgatgctggagtgccagcagtttctggttatcgaagaaaataaggtccgccaatacgatagcatccagaagttactcaacgaacgcagtctctttagacaggctatttcgccaagcgatagggtgaaactgtttccgcacagaaattcctccaaatgtaagtccaagccccagattgcagcactcaaggaagaaaccgaagaagaggtgcaggacacccggctt

SEQ ID NO: 10135 - DNA, 4440 bp, synthetic construct
  misc_feature 1..4440: note = source = /note="Description of Artificial Sequence: Synthetic coding sequence"
  source 1..4440: mol_type = other DNA
atgcagcggtcgcctctcgaaaaggcatcggtggtcagcaagctgttcttttcctggactcgcccaattctcagaaagggatacagacagagactcgagctgagcgacatctaccagatcccgtccgtggattcggccgacaacctctcggaaaaactcgagcgggaatgggatcgggagctcgccagcaagaaaaacccgaaacttatcaacgcgctccgccggtgctttttctggcgcttcatgttctacggcatcttcctgtacctgggagaagtcaccaaggccgtgcaacctctgctcctcggacgcatcattgcgtcatacgacccagataacaaggaagagagatccattgctatctacctcggaatcggcctctgcctcctgtttatagtgagaactctcctcttgcacccggcgatctttggactgcaccacatcggaatgcaaatgcggatcgccatgttttcgctgatctacaagaaaaccctgaagttgagctcaagagtgctggataagatcagcattggacaattggtgtcgctcctgtccaataatctgaataagttcgacgaagggttggctctggcccacttcgtgtggatcgcgccactgcaggtggctctgctgatgggactcatctgggaactcctgcaagcgtcggctttctgcggactgggattcctgattgtgctggccctctttcaagcaggactgggaagaatgatgatgaaatacagggaccaacgtgcggggaagatttccgagagactcgtcatcacgagtgagatgattgagaatatccaatcggttaaagcgtactgttgggaagaagcgatggagaaaatgatcgaaaacctgcgccaaacggaactgaaactcactcgcaaggctgcgtacgtgcgctactttaacagctccgcatttttcttctccggctttttcgtcgtgtttctgtcagtgctcccttacgccctcattaaggggatcattctgaggaagatctttactaccatctccttctgcatcgtgttgcggatggcagtcaccagacagttcccatgggcagtgcagacctggtatgactcgcttggagcaatcaacaaaattcaagacttcctccagaagcaggaatacaagaccctggaatacaaccttacgacgaccgaagtcgtcatggaaaatgtgacggccttctgggaagagggcttcggcgaactgttcgagaaggcaaaacagaacaataacaacagaaagacctcgaacggtgatgactccctgttcttctccaacttcagccttctcggtacgccggtgttgaaggatatcaacttcaagatcgaacgcggccagctgttggctgtggccgggtcgaccggagctggaaaaacttcccttctgatggtcatcatgggggagctggagccgtcggaagggaagatcaagcactccggacgaatcagcttctgtagccaattcagttggatcatgcctggaaccatcaaggagaatatcatttttggagtgtcatatgatgagtatcgctaccgctccgtcattaaagcctgtcaactggaggaggatatcagcaaattcgccgaaaaggataacatagtccttggagaaggcggaatcaccctctcaggaggacaaagggctcggattagcctggcacgcgctgtgtataaggatgcggacctctacctgctcgactccccgttcggttacctggacgtgctcactgaaaaggagatcttcgagtcgtgcgtgtgtaagctcatggcaaacaagacccgcattctggtgacctcgaagatggaacacctgaagaaggcagataagatcctcatcctgcatgaaggtagctcttacttttacggaaccttctccgagctgcagaatctgcagccggacttcagctcgaaactgatgggatgcgactcattcgaccagttttccgcagagcggcggaattcaatcctgactgaaacgctccacagattctcactggaaggcgacgcgcccgtgtcatggaccgaaaccaaaaaacagagttttaagcagaccggagagttcggcgaaaaacgtaagaactccatcctcaacccgatcaactcaatccgcaagttctcgatcgtgcaaaagacgccgctgcaaatgaatggaattgaggaggattcggatgagccgctggagcgaaggctttccctcgtccccgatagcgaacaaggtgaagctattctgccgcgcatctccgtgatctcaaccgggcccaccctccaggcccggaggcgccaatcagtcctcaaccttatgacccacagcgtcaaccagggccagaacattcacaggaaaaccactgcttcaactcgcaaagtgtccctggcgccccaagcaaatttgactgagctcgacatatactcgcggcggctgtcacaggaaactggacttgagatctcggaagagattaatgaggaggacctcaaggagtgttttttcgacgatatggaatccataccggccgtgaccacctggaatacctaccttcgctacatcaccgtgcacaagtccctcatcttcgtgttgatctggtgcttggtgatctttctcgcagaagtggcggcctccctcgtggtcctgtggctgctgggcaacacgcccctgcaggataaaggaaactccacccactctcgaaacaacagctacgccgtcatcatcacctctaccagctcgtattatgtgttctatatctacgtgggagtcgcagacactctcctcgcaatgggattcttccgcgggctgccgttggtccatacgctgatcactgtgtcgaagatactccaccacaaaatgctgcactccgttctgcaagccccaatgtctactctgaacaccctgaaagccgggggaatccttaatagattttctaaggacatcgcaattctggacgatctgctgccacttactatctttgacttcatccaacttctgctgatcgtgatcggagcaatcgcggtcgtggccgtgctccaaccctacattttcgtcgccactgttcctgtgatcgtggcgttcatcatgctgcgggcctactttctgcagacctcacagcaactcaagcaactggagtcggagggcaggtcaccgatcttcactcacctcgtgacttcgctcaagggcctgtggaccctgagagcattcggacgccagccttacttcgagactctgttccacaaggcgctgaatctgcacacggcaaattggttcctctacttgagcacgctgcgctggttccagatgcggatcgaaatgatcttcgtgattttcttcattgcggtgactttcatctcgatcctgaccaccggcgaaggtgaaggcagagtgggaatcatcctgaccttggccatgaatatcatgtcgaccttgcaatgggccgtgaattcgtccatcgatgtcgactcactcatgcgctcggtgtcccgcgtctttaagttcattgacatgcccaccgaaggaaagccgactaagtcgactaaaccatacaaaaacggtcaactgtccaaggtgatgatcatcgaaaactcgcatgtgaagaaggacgacatctggccaagcggcggtcaaatgactgtgaaagatctgactgcgaagtacaccgagggaggtaacgctatcctggagaacattagcttctccatttcccctggtcaaagggtgggactgctgggtcgcaccggatcaggaaagtccaccctgctgtccgctttcttgagattgctgaacaccgaaggcgagattcaaatcgacggagtgagttgggatagcatcacccttcaacagtggcggaaggcatttggcgtgatcccgcagaaagtgttcatcttctccgggactttccgtaaaaacctggacccgtacgaacagtggtcagaccaagagatttggaaggtggcggacgaggtcggcttgcggagcgtgattgagcagttcccgggaaagctggacttcgtcctcgtggacggtggctgcgtcctgtcacatggccataagcagttgatgtgtctcgcgcggagcgtgctgagcaaggctaagatccttctgctggacgaaccgtccgcacatcttgacccagtgacctaccaaatcatccgccggacgctgaaacaagcattcgccgactgcactgtgatcctctgcgaacacaggatcgaagcgatgctcgaatgtcagcaatttctggtgatcgaggaaaacaaggttcgccaatatgatagcatccagaagttgctgaacgaacggtcgctctttcgccaagcaatctcgccatcggatcgcgtgaaactgtttccacacagaaactcgtcaaagtgcaaatccaagccacagattgccgcgctgaaggaggaaactgaggaggaagtccaggacactcgtctg

SEQ ID NO: 10136 - DNA, 4440 bp, synthetic construct
  misc_feature 1..4440: note = source = /note="Description of Artificial Sequence: Synthetic coding sequence"
  source 1..4440: mol_type = other DNA
atgcagcggagtcccctggagaaagccagtgtagtctccaaactgttcttttcctggactcggccaatcctccgcaagggctatcgccaaagactcgaacttagcgacatctaccagattcccagcgtggatagcgccgataacctctccgagaagctggagagggagtgggatcgagaactggccagcaaaaagaatcctaagctcatcaacgcactgagaagatgctttttctggcgattcatgttctacggtatcttcctgtacctcggtgaagtcacaaaggccgtgcagccactcctgctggggcggatcatcgctagctacgatcccgacaacaaggaggagaggagtatagccatttatctgggaatcggcctgtgtctgctgttcatcgtgcgcacactgctgctgcacccggctattttcggcctgcaccatataggaatgcagatgagaattgccatgttttctctgatctataagaaaacgctgaaacttagcagcagagttcttgacaaaattagcattggccagcttgtctccctcttgagcaacaatcttaacaaattcgacgaagggctggctcttgcccacttcgtatggattgcgccgctccaggtagcactgcttatgggcttgatctgggagctgctccaggcgtccgcgttctgtggacttgggttcttgattgttctggcccttttccaggcagggcttggcagaatgatgatgaagtatcgagatcaaagggccgggaagatttccgaaaggcttgttataacctccgagatgatcgagaacatccagtccgtgaaggcatactgttgggaagaagccatggagaagatgatcgaaaatttgaggcagaccgagctgaaattgacaagaaaggcagcctacgtgagatatttcaacagttccgccttcttcttttcaggcttttttgtggtgtttctcagcgtgcttccctacgctctgatcaaaggcatcattctgcgaaagatctttacgaccatcagcttctgcatcgtgttgcgaatggccgtgacccggcaatttccttgggcagtccagacgtggtatgattcacttggtgcaatcaacaagatccaggatttcttgcagaagcaggagtacaagaccctggaatacaacctcaccaccaccgaagttgtgatggaaaacgtaaccgccttctgggaggagggtttcggagagctgttcgagaaggccaagcaaaataataacaacaggaaaacctcaaacggagacgattcactgtttttttctaacttctccctgctcgggactcctgttctgaaagatatcaactttaaaatagaacggggacagctgctggccgttgccggttccactggggctggcaagacctctctgctgatggtcattatgggcgagctggagccaagcgagggcaagatcaagcactccggacgaatctccttctgctcacagttctcatggataatgcctggcaccattaaagagaacatcatcttcggagtatcatacgacgaataccggtaccgcagcgtgattaaggcctgccagctggaggaggacatctccaaattcgccgagaaggacaatattgtgctgggagagggggggataaccttgtctggtggtcagagggcgcggatctctctggccagagcagtgtataaagacgctgatctctatctgttggactctccatttggttacttggatgtattgacagaaaaggagattttcgagtcttgtgtgtgtaaacttatggctaataagacacggatcctggtgacatcaaaaatggagcatttgaagaaggcggataaaatcctgatcctgcacgaaggaagctcttatttctatgggacattttctgagctgcaaaatcttcagcctgacttttcctctaagctcatgggatgtgatagtttcgaccagttcagcgctgaacgccgcaactctatccttaccgaaacacttcaccggtttagcctggagggcgacgcgcctgtctcatggactgagaccaagaagcagagcttcaagcagactggcgagtttggagaaaagaggaagaacagtattttgaatccaatcaactccataagaaagttcagcatagtccagaaaactcctctccagatgaacggtatagaggaggattccgacgagccactggaaagacgattgagcctcgtgccggatagcgagcaaggagaagctattcttcccaggatcagtgtcatctccactggtcctaccctgcaggcccgccggaggcagtctgtgctcaacttgatgactcattccgtgaatcaggggcagaatattcaccgaaagactacggcctccacacggaaggtcagtctcgctccccaggctaacctcacagagcttgacatatactctagacggctcagtcaggaaacggggctggaaatctcagaggagattaacgaagaagacctgaaggaatgcttcttcgacgacatggagtctatccccgcggtgacaacttggaacacctatcttcgctacattactgtccataaaagtctgatttttgtactgatctggtgcttggtcatctttctcgcggaggtcgcagccagcttggtggtcctgtggctgctcggaaatacaccactgcaggataaaggcaatagcacacattctcggaacaacagttacgcagttataattacatccacctccagttactacgtcttctacatctacgttggcgtggccgatacgcttctggcaatgggattttttagaggcctgcccctggttcacacgttgatcacagtctctaaaattctgcaccacaaaatgcttcattccgtgttgcaagcaccgatgagcaccctcaatacgttgaaagccggcgggatcttgaacagattcagcaaggacatagcaattttggatgacctcctgccactgactatctttgactttatccagctgctgctcatcgtgatcggggcgatcgcagtggtggccgtcctccagccatacatctttgtggcgacagtgcctgtgatcgtagcttttatcatgctgcgagcttatttccttcaaaccagccaacagctcaaacagctcgaaagcgaggggcgctcacctatcttcacgcacctggtgacatccctgaaagggctttggaccctcagggcatttggcagacagccatactttgaaacgctgtttcacaaagcgctgaacctgcatacagctaactggttcctctatcttagtacccttcgatggttccagatgcggatagaaatgatctttgttattttctttattgccgtgacatttatcagcatactgaccacaggggaaggggagggcagggtcggaatcattttgacactggccatgaatattatgtcaaccctgcagtgggctgtcaattcctctatcgacgtggactctttgatgcgatctgttagtagggtattcaagttcattgacatgcctacagagggcaaaccaactaaatccacaaagccctataagaacgggcagctgtctaaggtgatgattatcgaaaattcacacgtgaagaaggatgacatctggccaagcggaggccagatgactgtgaaggacctcactgccaagtacacagaggggggcaacgcaatcctggaaaatatctccttctccatcagcccagggcagagggtgggcttgctgggcagaaccggctcaggaaagtccaccctcctgagcgctttcctgaggttgttgaatacggagggggagatacagatcgatggcgtctcttgggactcaattactctccagcagtggagaaaggccttcggtgtgattcctcagaaggtattcatcttctcagggacctttcgcaaaaacctggatccatatgagcagtggtcagaccaggagatctggaaggtggccgacgaggtgggtctcagaagtgttatcgaacagttcccaggcaagttggatttcgtgttggttgacggcgggtgcgtgctcagtcatggacacaagcaactgatgtgcctggctagatcagtactgtctaaagccaagatccttcttctcgacgaaccctctgcgcacctcgatcctgttacataccagataattcgcaggactctgaaacaggcattcgccgactgcacagtgatcctctgtgagcatcgcatcgaagctatgctggaatgtcaacagttcctggtgattgaagagaataaggttaggcagtatgattcaatccaaaaactgctgaatgaacggagcctgtttaggcaggctatctcccccagtgaccgggtgaaacttttcccccatcggaattcaagtaagtgtaaatctaagccccagatcgctgccctgaaagaagagactgaggaagaggtccaggatacccggttg

SEQ ID NO: 10137 - DNA, 4440 bp, synthetic construct
  misc_feature 1..4440: note = source = /note="Description of Artificial Sequence: Synthetic coding sequence"
  source 1..4440: mol_type = other DNA
atgcagagatccccgttggaaaaggcgtctgtcgtctctaagctgttcttcagttggactaggcccatattgagaaaaggttataggcaaaggctcgagttaagcgacatatatcagatcccctctgtcgatagtgccgacaatctgtctgagaagctagagcgcgaatgggacagggaactggcaagcaagaagaatccaaagctgatcaacgctctgcgaaggtgtttcttctggcgctttatgttttacggtatatttctgtaccttggcgaagtcaccaaggccgtgcaacccctgctcttagggcggataatagcttcttatgaccccgataacaaggaggagcgcagtatcgccatctacctgggtatcgggctatgcttactgttcatcgttcggactctgctgcttcatcccgccatattcggactccaccatatcggtatgcagatgaggatagccatgttcagcttgatatataagaaaacactgaagctgagctcacgagtcctcgataagatctctataggccagctagtaagtttgctgagtaataatctaaataaattcgacgagggattggcattagcacactttgtgtggattgcccctcttcaggtcgcactgttgatgggtttgatttgggagttgttgcaggctagcgccttctgcggcttaggcttcctcatcgttctcgccctatttcaggccggactcggacggatgatgatgaaatatcgtgaccagcgcgctggcaagatctccgaacgcttggttataacgtcggagatgatcgagaacatccaatcagtaaaggcttactgctgggaagaagccatggaaaagatgattgagaatctccgccagaccgagctgaagctgacaagaaaagctgcctatgttaggtacttcaatagttctgcatttttcttttccggattttttgtggtattcttgagcgtgctgccgtacgctctgatcaaaggaataatcctgcggaagatttttaccactattagcttttgtatagtgttgaggatggccgtgacccgacaatttccatgggcggtgcaaacctggtacgactcattaggcgccatcaacaaaatccaggactttctgcagaagcaggaatataagaccctggaatacaatctaactaccaccgaggtcgtgatggagaatgttaccgcattctgggaggagggtttcggcgagctgttcgagaaagcaaagcagaataataacaacagaaagacttccaacggtgacgattcacttttcttttctaacttttcactcctgggcacaccagttctgaaggatataaattttaagatagagagaggtcagttgttggccgtggccggcagcacaggggccggtaagaccagcctacttatggtgattatgggtgagttggagccttccgaggggaagatcaaacacagcggtcgcattagcttctgctcacaattttcatggatcatgcctggcacaatcaaagagaatatcatcttcggcgtgagctacgacgaataccggtatcgcagcgtgatcaaagcatgtcaactggaggaggacatttctaagttcgctgaaaaagataacatcgtgctgggagagggcggaattacattaagtggaggccagcgcgctaggatctcattggcgagggctgtttataaggatgcagacttgtacctgttagactcccccttcggctacctggacgttctgacagaaaaggagatattcgagtcctgtgtctgcaagttgatggcaaataagaccaggatcctagtgacctcgaagatggagcaccttaagaaagccgacaaaatcctcattctccacgaggggtcctcatatttctatggcactttctcagagctgcagaatctccaacctgacttctctagcaagcttatgggttgtgattctttcgaccagttctccgcagagcggagaaactcgatccttaccgagactcttcaccggttcagcttagagggagatgctcctgttagttggacagaaactaaaaagcaatccttcaaacagaccggcgagttcggggagaagagaaagaactcaatactgaaccctatcaattctatccgcaaatttagcattgttcagaagactccactccaaatgaacggtattgaagaagattcggatgaaccattggaaagacgcttaagtctggttccagatagtgagcagggtgaggcgattttgcccagaatcagtgttatctccacaggccccacattacaggctcgcaggcggcaatcagttttgaatctcatgacccatagcgtgaaccagggacagaatattcaccggaagacaacggcttctacaagaaaggttagtctcgcgccccaggccaacctgacggagcttgatatttatagtcgtagactcagtcaggagacaggcttagaaatctctgaagaaatcaacgaagaagatctgaaagaatgcttttttgatgacatggaaagtatccccgctgtgacaacgtggaacacctacctgcgttatattactgtacataaatcattgatctttgtgctgatctggtgcctcgtaatattcttagcggaggtggccgcttcattggttgtcctgtggctgctgggaaacacccctctacaagacaaggggaattcaacacacagcaggaacaattcttacgcagtcattatcacttcaacgtcttcctactacgtcttttacatatatgttggggttgcagatacccttctggccatgggctttttcagagggttaccactggtccatacattgattacagtgtcaaaaatccttcatcacaaaatgctccactccgtgttacaagcccctatgtcgacactcaacactctcaaagcgggcgggatactgaatagattctcaaaagatattgcaatccttgacgatctgcttcccctcacaatctttgactttatccagcttctgttgatcgtgattggggctatagccgtggtcgcagtcctccagccatacattttcgttgctaccgtgcctgtcatcgtcgctttcattatgctgagagcgtacttcttgcaaacgagtcagcagctaaagcagctggaatcagagggccgttctcctatttttactcatttggtcacctcacttaagggactttggactctgagggcgttcggacgtcagccatattttgagactctattccataaagccctgaacctacatacagcaaattggttcctttacctgtcgacactgcgttggttccaaatgaggatcgagatgatattcgtgatatttttcatagctgttacatttattagtatactgaccactggcgagggcgaggggcgcgtggggataattcttaccctggccatgaacattatgagtaccttacagtgggccgttaactctagcattgatgtcgatagcctgatgcgatcagtaagccgggtttttaagttcattgatatgccaactgagggaaagcccactaagtccactaaaccctacaaaaacggacagcttagtaaggtcatgattatagaaaattctcacgtgaagaaggacgatatatggccgtctggagggcagatgaccgtcaaggaccttactgcaaaatacaccgagggcgggaacgctatccttgagaatatttcattttctatttctccagggcagagggtggggctgctggggagaacaggctctggcaaatcgacactgctctccgccttcctcaggttactaaacactgagggagagatccagatcgacggagtgtcctgggacagcatcacactgcagcaatggcgcaaggcttttggggtgataccccagaaagtctttatcttttctgggactttcagaaagaatctagatccttatgaacagtggtctgaccaggagatatggaaggtggcagacgaggttggcttgcggtccgtcatagagcaatttccaggtaagctcgatttcgttctggtggacggcggttgcgtgttaagccacggccataagcagctgatgtgcctggctagatcagtgctctctaaggcaaagatactgctgctggatgagccatccgcacacctggacccagtgacttaccagataatccgaagaaccctcaagcaagcctttgctgactgtaccgtgattctgtgcgaacaccgtatcgaggcgatgctggaatgccaacagttcctggtcattgaagaaaacaaggtgaggcagtacgattctatccaaaaactactgaatgagcgaagtcttttccgccaggcgatcagtcctagcgatcgggtgaaactgtttccgcaccgaaattcgagtaagtgtaagtctaagccgcagattgctgccctgaaggaggaaactgaggaagaggtgcaggacacccgcctg

SEQ ID NO: 10138 - DNA, 4440 bp, synthetic construct
  misc_feature 1..4440: note = source = /note="Description of Artificial Sequence: Synthetic coding sequence"
  source 1..4440: mol_type = other DNA
atgcagagatccccactggaaaaggcaagtgtggtgtctaagctgttcttttcttggacgagaccaatcctccgaaaagggtaccgccagaggttggagctttcagacatatatcagatacctagcgtagatagcgccgacaatctcagcgaaaaattggagcgcgagtgggacagagaactggcctctaagaagaatccaaaattgattaatgctctgagaaggtgttttttttggcgctttatgttctacgggatctttctgtacctcggcgaggtgactaaagcagtacagcctctccttcttggtcgcattatagcatcttatgatcccgataacaaggaggagcggagtattgccatctatctcgggattggactgtgtctgctgttcattgtgagaacactgctgcttcatcctgctatcttcgggctgcaccatattgggatgcaaatgagaatcgcgatgttctccctgatttacaagaagacactcaagctgtcttctcgcgtgctggataaaatctctattggccagctcgtgagcctcctcagcaacaacctcaacaaattcgatgagggcctggcactcgcacattttgtgtggattgcacctctgcaggtggctttgctcatgggcctgatttgggagctgttgcaagcgtccgccttctgcgggttgggttttctgattgtcctcgcactcttccaagccggtctcggtcgcatgatgatgaagtatagggatcagcgcgccggaaaaatctcagagagactggtcatcactagtgagatgattgaaaacatccagtcagtgaaggcctactgctgggaggaagccatggagaagatgatcgagaacctcaggcagacagaactgaaactgactcggaaggccgcttacgtgaggtacttcaacagttccgctttctttttttccggcttcttcgtcgtgttcttgtccgtgctcccatacgcacttatcaagggcatcattctccggaagatcttcaccaccatctccttttgtattgtactccgcatggctgttacaaggcagtttccttgggctgtgcagacttggtatgatagtctgggcgcaataaataaaattcaggacttccttcaaaagcaggaatataagaccttggaatacaacctgaccactactgaggtggtgatggaaaatgtgactgccttttgggaagagggattcggagagctgttcgagaaagctaaacagaataataataaccgaaaaacctctaacggggacgattctttgttttttagtaatttcagcctgttgggcaccccagtgctgaaggatattaacttcaaaattgaaagagggcaactgctggcggtggctggatctaccggcgcgggaaaaactagcctgctgatggtgatcatgggcgagcttgaacctagtgaaggtaagataaagcacagtggcagaatctcattctgttctcagttcagctggattatgccagggactatcaaggagaacataattttcggcgtgtcttatgatgaataccgatatcggagcgtgataaaggcctgtcagcttgaggaggatatcagcaaatttgcagaaaaggacaacattgtcttgggcgaggggggcattacactcagcgggggacagcgagcccggatttccctggcgagggctgtctacaaagacgcagatctgtacctcttggacagcccattcggatacctggatgtcctcactgaaaaggagatatttgagtcctgtgtgtgcaaactgatggcgaacaaaacccggattcttgtcaccagtaagatggagcacttgaagaaagcggataagatcctcatcctccatgaagggtctagctacttttatggcacgttttctgagctgcagaatctccagcctgatttttcaagcaaactcatggggtgcgactcttttgaccagttttctgctgagagacgcaattcaatattgactgagacactgcaccgcttctccctggaaggtgacgcccccgtctcatggaccgaaaccaaaaagcaatctttcaagcagactggcgaattcggcgagaagcgcaagaatagcatcttgaaccctattaacagcattcgcaagttcagcatagtgcaaaagacacctctgcagatgaatggtatagaagaggactccgatgagcccctggagagaagacttagccttgtgcccgattccgagcagggggaagcgattctgcctcggatttccgtgatctctacgggcccaacactccaggccagaaggagacaatctgtgctgaacctgatgacacattccgtgaaccaggggcagaatatccaccgcaagaccaccgcctccacccgcaaagtttctctggcaccccaggcgaatctgaccgagctggatatctactctcgcagactctcacaggagaccggcctggagatttctgaagaaatcaatgaggaagatctgaaagaatgtttcttcgacgatatggaaagcatacccgccgtcacgacctggaacacatatctccgatacatcacggtgcacaagtctctcatcttcgtactgatatggtgcctggtcatttttctggcagaagttgcagccagccttgtcgtcctttggcttctgggaaacaccccactccaggataagggaaattccacacattccagaaacaactcttacgctgtgatcatcacctccacctcttcttactacgtgttttatatatacgttggggtggccgataccctgctggccatgggattcttcaggggtctgcccctcgtccatacgcttatcactgtgagtaagatcctgcaccataaaatgctgcacagcgtgcttcaagcacccatgagcactctcaatacactgaaagcgggcggcatcctgaaccgattctccaaagatattgcaatactggacgacctgcttccccttacaattttcgattttattcagctcctgcttatcgtgatcggagccatagctgtggtggccgttctgcagccgtatatctttgtggctacggtccccgttattgtcgctttcattatgttgcgggcgtatttccttcaaacatctcaacagctcaaacagttggagtcagagggtagatcaccaattttcacccatctggttacctcactcaaggggctgtggacacttcgcgcctttggtagacagccatactttgaaacgcttttccataaagctctgaatttgcacacggcaaattggtttctgtacctgtcaaccctgaggtggtttcagatgcggatcgagatgatctttgtaatcttctttattgccgtaacctttattagcatcctgacaactggcgagggcgagggcagggtcggaataatcctgactctcgccatgaatatcatgtcaacactgcagtgggctgtcaatagcagcattgacgtggatagcctgatgcggagcgtgagcagggtcttcaagtttattgatatgccgacggagggtaagccgactaaatccaccaaaccatataagaatggccagctgtctaaggttatgattattgagaacagtcatgtcaagaaggacgacatttggcctagcgggggacagatgaccgttaaggacctgacagctaagtacaccgaaggagggaacgcaatcctcgagaacattagtttcagcattagtccaggccagcgggtgggcctgctgggcaggaccgggagtggaaaatcaactctcctctcagcattcctgcgcctgctcaacaccgaaggagagatccagatcgatggagtttcttgggattctatcacacttcagcagtggcgcaaggccttcggagtcattccccagaaagtgtttatcttctccggtacattccgaaagaacctggatccctacgaacagtggtctgaccaggaaatctggaaagtggcagacgaggtgggcctccgaagtgtcatagagcagtttccaggtaagctcgattttgtacttgtagatggtgggtgtgtgctgtctcacggtcataagcagcttatgtgcttggctcgctcagtgttgtcaaaagccaaaatcctgctgctggatgaaccctctgcgcatttggatcctgtgacctaccagatcatcaggcggacattgaaacaggcgttcgccgattgtaccgtgatactttgcgagcatcggatcgaggctatgctggagtgccagcaattcctggtgatcgaagaaaataaagtgcggcagtatgactctatccagaagctgctgaatgaaagaagtcttttcaggcaagccatcagtccaagcgaccgggtgaaactctttcctcatcggaacagcagtaagtgtaaatcaaaacctcagattgctgctttgaaagaggagacagaagaagaggtgcaggatacacgcctc

SEQ ID NO: 10139 - DNA, 4440 bp, synthetic construct
  misc_feature 1..4440: note = source = /note="Description of Artificial Sequence: Synthetic coding sequence"
  source 1..4440: mol_type = other DNA
atgcaaaggtcccccctggagaaggcaagcgtggtcagtaagctatttttctcttggactagacccatccttaggaagggatatcgccaacggttggagttgagcgacatataccagataccgagcgtggattccgctgataatctgtccgagaagctagaacgggagtgggacagggagcttgcttcaaagaagaaccctaagctgatcaacgctctacggcgttgcttcttctggagatttatgttctatggaatatttctctatctgggcgaagtgaccaaagccgtccagcctctacttctcggccggataatagcatcctatgacccggacaataaggaagagagaagcattgcaatttatttaggtatcggactgtgtctcctgttcatcgtgcggaccttactcctgcatcctgcaatctttggcctgcatcacattgggatgcagatgaggatagccatgttctctctgatctataagaagacactcaagctcagctccagagtgctcgacaagatctcaataggtcagctggtgtccctcctgtcgaacaacctgaacaaattcgatgaggggctggctctcgctcattttgtatggatagctccactgcaagtggctctactcatgggattgatctgggaactgctacaggcaagcgccttttgtgggcttgggttcttaatagtcttggccctgttccaggcaggcttgggacgaatgatgatgaaataccgggaccaaagggcgggaaagatctcagagcggctggtcatcacaagcgagatgatcgagaatattcagtctgtgaaggcatactgttgggaagaggctatggaaaaaatgattgaaaatctcaggcagacagagctgaagctcaccagaaaagcagcatacgtgagatacttcaatagcagcgctttcttctttagtggatttttcgttgtgtttttgtcagtgctaccatatgctctcataaaaggaatcatcctgcgaaagattttcacgacgatatctttttgcattgtgctccgcatggcagtgacccgtcagtttccctgggccgtccagacctggtacgacagcctcggggctattaacaaaatacaagattttctgcaaaaacaagagtacaaaacactggagtacaatttaacaaccactgaggtggtgatggaaaacgtgacagccttttgggaggagggctttggtgaattgttcgagaaggcaaagcagaacaataataatagaaagacatcaaacggagatgattctctgtttttctctaacttcagtctactcggcacaccagtcctgaaagatatcaactttaagattgagcgcgggcagctgctagccgtcgctggtagtacaggcgcagggaaaaccagtctgctgatggtgattatgggagagctagaacctagcgagggcaaaatcaagcatagcgggcggatctcattctgctcccagttctcttggattatgccaggtaccattaaagagaatatcatattcggggttagttacgacgaatacagataccgttcggtcattaaggcctgccaattggaggaagacatttccaagttcgcagagaaagacaacatagtcttaggagaaggggggattacactgtccggaggacaacgtgctcgtatatctctggctagagccgtctacaaagacgccgatctgtatcttcttgacagtccctttggctacctcgatgttttgaccgagaaggagattttcgagtcttgtgtgtgtaaattgatggcgaacaagaccaggattctcgttacttctaagatggaacacctgaagaaagccgataagattctgattttgcacgaaggctcatcttacttctacggaacctttagcgaactgcagaacctccagccggacttcagtagcaagctaatggggtgtgacagcttcgatcagttctcagctgagcgccgcaacagcatactgactgagacattacatagatttagcctggaaggcgatgctcccgtctcctggaccgagactaaaaagcagtcctttaaacagacaggtgagttcggcgagaagcggaagaactccatcctaaaccctattaacagtatacgcaaatttagcatcgtgcaaaagactccacttcaaatgaatggcattgaggaagattccgacgagcccctggaacgtagactgagtctggtgccagatagcgagcagggcgaggcaattctcccaagaatatctgtcataagcaccggacctacattgcaagccagacgtcgccagagcgtgctcaacctgatgacccactccgtcaatcagggccagaacatccaccggaagaccacagcatccacccgaaaagtttccctggcaccccaggccaatctcaccgagctcgacatatacagcagacggctctcccaggagaccggacttgagatatcagaagagataaacgaagaagacctcaaagagtgtttcttcgacgatatggaaagcatacccgcagttaccacgtggaacacgtacctacggtacatcacggtacacaagagccttatctttgtactgatctggtgtctggtgattttcctggctgaggtcgctgcttccctcgtggtcctgtggctacttggcaatactcctctacaagataaaggtaattccacccactctcgaaataactcctatgcagttatcataacctcaaccagcagttactatgtgttttacatatatgtgggtgttgccgatacgctgctggctatgggcttttttagaggactccctctggtgcatacactcatcacagtttccaagatactgcatcacaaaatgttgcattccgtcctgcaggcccctatgtccaccctgaatacacttaaggccgggggtatccttaatagattctcgaaagacatcgccatattggacgatctgttacctctgacgattttcgacttcatccagctgctgctaatcgtgattggtgcaatcgctgtggtggccgtcctccagccatacatctttgtggccactgtgccggtcatcgtagcgtttattatgctcagggcctatttcttgcaaacctcccagcagctgaagcagttggaatcagaagggaggtcccccatattcacgcatctggtaacaagtctcaaagggctttggacccttcgagcattcggccgacagccctacttcgagacgttattccacaaggcactgaacctgcatacagccaattggtttctgtatctgagtaccttgagatggtttcagatgcgaatcgagatgatattcgtcatcttctttatagccgtcaccttcatctccatactcaccaccggagagggtgaaggccgcgtaggaatcattctgacgctggccatgaacattatgagcactctgcagtgggctgtaaacagttcaatcgacgtggattccctgatgcggtctgtgtcgcgggtgtttaaattcattgacatgcccactgaggggaagcctacaaaaagcacaaagccctacaagaacggacagctgtccaaagtcatgataatcgagaatagtcacgtgaagaaggacgatatttggccatcaggaggacaaatgacagtgaaagatctcactgcgaagtatactgaaggaggtaatgcgatcttagagaacatatcattctcaatttcaccagggcaacgcgtgggactgctggggcggactggctctgggaaatcaacgcttctatccgcttttctgaggcttctgaacactgagggggaaatacaaatagatggagtgtcttgggactctattacactccagcagtggcgtaaggcatttggagttattcctcaaaaagtcttcatcttttccgggacattcagaaagaaccttgatccatacgaacagtggagcgaccaggaaatttggaaagtcgctgacgaagtcggactgcgctccgtgatcgaacaatttcccggcaagttagattttgtcctggtcgacggcggttgcgttctgtcccacgggcacaagcagctgatgtgcctggctcgctctgtgctatccaaagctaagatcttgttgcttgatgagccctccgcccaccttgatccagtgacttaccagattatcagacgcacgctgaaacaggcgttcgctgattgcacagtaattttgtgcgagcatcggatagaggccatgctggagtgccagcagttcttagtgatcgaggaaaataaggtgaggcagtatgactctatacagaagttactgaacgagcgctctctatttcgacaggctatcagtccttccgaccgcgttaagctttttccccatcgcaactcttctaaatgcaaatccaagccacaaattgcggccctcaaggaggagacagaggaggaggtgcaagacacacggctc

SEQ ID NO: 10140 - DNA, 4440 bp, synthetic construct
  misc_feature 1..4440: note = source = /note="Description of Artificial Sequence: Synthetic coding sequence"
  source 1..4440: mol_type = other DNA
atgcagagatcaccactggaaaaagcatccgtggtatcaaaactcttcttcagttggacgaggcccatccttagaaaaggttacagacagcggttggagctctccgacatatatcagattcccagcgtagattccgcggacaacctctccgaaaagttggagagagaatgggaccgcgagctcgcatctaagaagaatccaaagctgattaacgccttgaggcgctgcttcttctggcgatttatgttttatggcattttcctgtacctgggagaggtgaccaaggccgtgcagccattactacttggtcggattattgcaagctatgacccggacaataaggaagagcgatcgatcgccatttacctgggcatcggactatgcctgctttttatcgtgcgaactctacttctgcacccagccattttcggactacatcatatcggaatgcagatgaggatagctatgttctcgttaatctacaaaaagacactcaagctcagctcccgggtcctggataagattagcataggccaattggtaagtctgttaagtaataacctcaacaaatttgatgagggtcttgctctcgcccacttcgtttggatcgctcctctccaggtggctctgttaatggggctgatctgggagcttttacaggcttctgccttttgcggattgggtttcctgatcgtgctggctttgttccaggccggcctgggtcggatgatgatgaagtatcgcgaccaaagagcaggcaagatctcggaacgtcttgtcataacgagtgagatgatcgaaaacatccagtcggtgaaagcctattgctgggaagaggctatggagaagatgatcgaaaacctacggcagaccgagctgaaactcactcggaaggctgcgtacgtgagatattttaactcatccgcattctttttcagcggattcttcgtggtatttctgagcgtcctgccctatgcattgattaagggaatcatcctgcggaaaatcttcaccaccatatcgttttgtattgtgttgcgtatggcagtgacccgtcaattcccctgggcagtccagacatggtatgattcacttggggcaatcaataagatccaagattttctgcaaaagcaagagtataagactctcgaatacaatttgactaccaccgaagtggtcatggaaaacgtgaccgctttctgggaagagggattcggtgaacttttcgagaaagccaaacagaacaataataatagaaagacatctaacggtgacgactctctcttcttttcaaatttctccctgttgggcacacccgtgctgaaagacataaactttaaaatcgaaaggggccagctgctggcggtagccgggtccacgggggctggtaaaacgagcctgctgatggtgatcatgggagaactggaacctagcgaaggaaaaattaaacattcagggcgcatatcattttgtagtcaattttcctggatcatgcccggaactattaaggagaatataatatttggggtctcttacgatgaatatcgctacaggagtgtcattaaggcctgtcaacttgaggaagacatttccaagttcgccgagaaggataacatcgtcctcggagaaggtggcataaccctgtctggcggtcaaagagccagaatctcactcgccagggccgtgtataaagacgccgacctttatcttttagatagccccttcgggtatctggacgtactaacagagaaggaaatttttgagtcctgcgtttgcaaactgatggcgaacaaaactcgaattctggtgaccagcaagatggagcacctgaaaaaggctgataagatcttgatcctccatgaaggttccagctacttctatggaacattctccgaactccagaacctccagcccgacttcagttcaaaactgatgggatgtgattcttttgatcagttttccgcagaacgcaggaattcaatcttaactgagacactgcacagattttcactggaaggcgatgcaccagttagctggaccgaaaccaagaaacagtctttcaaacagaccggggagtttggtgaaaagcgcaaaaattctatacttaatcccattaattctattcggaagtttagcatcgtgcagaagacgccactgcagatgaacgggatagaagaggatagcgatgagcctttggagcggaggctaagcctcgtccctgattctgagcagggagaagccatccttcctagaatctcagtgatatccacaggaccgaccctgcaggctcgtcgcaggcagagtgttctgaaccttatgactcattctgtgaatcaaggtcaaaatatacaccggaagaccactgcaagtactagaaaggtatccctagctcctcaggccaacctgacagaactagatatttattctcgtcgcctcagccaagaaaccggcctggaaattagtgaagaaataaacgaggaggatctcaaagagtgttttttcgatgatatggaatccatccccgcagttaccacctggaacacttacctgaggtacataaccgtccataagagtctgatcttcgtgttgatttggtgcctcgtgattttcctggctgaggtggccgcttccctagtcgttttgtggctcctgggcaacacgcccctgcaagataaaggcaactcgacgcactccaggaataactcctacgccgttattattacctcgacaagttcctattatgttttttatatttacgtgggggtcgccgacaccctgcttgccatgggattttttaggggtctgcccctcgtccatactctgataacggtgtcaaagatcctccaccacaaaatgctacactctgttcttcaggctccaatgtccacactcaacactctcaaagccggagggatactcaatcggttctcaaaggatattgcaattctggatgatctcctccctttgacaatctttgacttcatccagctcctactgatcgtgatcggagcgattgcagtagtcgccgtacttcagccatacatctttgtggctaccgtgcctgtgatagttgcatttatcatgctgagagcttactttctgcagactagccagcagttgaagcagctcgaatcagagggacgcagccccattttcacacacctcgtaacgtcactgaaaggcctgtggacccttcgggccttcggaaggcagccctacttcgagactctcttccataaagccctcaatctacataccgcaaattggttcctgtatttgagcactctccggtggtttcagatgaggatcgaaatgatcttcgtgatcttcttcatcgctgtgaccttcatttccatcctcaccaccggtgagggcgagggtagggtggggattatattgacgttggccatgaatataatgtctaccctccagtgggccgttaactcatccattgacgtggacagtctgatgcgttctgtgtcacgggttttcaagtttattgatatgcctacagaaggcaaacctaccaagtccacaaagccctataagaacgggcagctaagcaaagtgatgataattgagaacagtcacgtgaagaaggacgatatatggccctcaggcgggcagatgacagtaaaagatttgaccgccaaatacactgagggcggcaacgccatcctggaaaacatcagcttttctatatcgcctgggcagcgcgtggggttgctgggccgcactggctcaggcaaatctaccctgctatcagctttcctaaggcttctgaacaccgaaggggagattcagatcgacggagtgtcctgggactctattaccctgcaacagtggcggaaggctttcggcgtgatcccccagaaggtcttcatcttttccgggacattcagaaagaacttagacccttatgagcagtggtcggaccaggagatttggaaagtagctgatgaagttggactgagatcggtgatcgaacagtttccagggaagctggactttgttctggtagatggaggctgtgtgttgtcacacgggcacaaacagttaatgtgcttagccaggtccgtgctgtcaaaggccaagatactgttattggacgagccgagcgcacatctggatcctgttacataccagatcataaggagaacactgaaacaggcattcgccgattgcacagtgatcctgtgtgaacatcgaatcgaagccatgttggagtgtcagcagtttttggtgattgaagaaaacaaggtgcgtcagtatgacagtatccagaaactgctgaacgagcggtcacttttccggcaagccatatcgccttcagacagggtgaaattattcccacataggaacagctcgaagtgtaaatctaagccacagattgctgctctgaaagaagaaacagaggaagaagtgcaggacaccagactg

SEQ ID NO: 10141 - DNA, 4440 bp, synthetic construct
  misc_feature 1..4440: note = source = /note="Description of Artificial Sequence: Synthetic coding sequence"
  source 1..4440: mol_type = other DNA
atgcagaggagccctctcgagaaggcgagtgtcgtgtctaaactcttcttcagctggacaagacctatattgcgaaagggctaccgtcaacggctggagctctccgatatataccagattcctagcgtggactctgccgacaacctcagcgaaaaactggagcgggagtgggatcgcgaactggccagtaagaaaaacccgaaactaattaacgctctgagaaggtgcttcttttggcgcttcatgttttatgggattttcttgtacttgggagaggttaccaaagctgttcaacccctgttactgggccggatcattgcatcctacgaccccgacaataaagaggagagatccattgccatctacctggggatcgggctctgtctgctgtttatcgtcaggacgttgcttctgcatcccgccattttcggcctgcaccatattgggatgcagatgcgaatcgcaatgttctctcttatctacaaaaaaacattaaagttgagctcccgcgtcttagacaagatctcgatagggcagctggtgtcattgctgagtaacaatttaaacaaattcgatgaaggcttggccctggcacattttgtgtggatcgctcctctgcaggtggcactgctcatgggcctgatctgggaactgctgcaggcgtctgcattttgtggtttgggtttcctgattgttctggctcttttccaggcaggattggggaggatgatgatgaaatacagggatcaacgcgctggcaagatttctgagcgtttggttattaccagtgagatgatcgagaacattcaaagtgtgaaggcctattgttgggaagaggctatggagaagatgatcgagaaccttaggcagactgagttaaaattgacgcggaaagctgcctacgttagatacttcaattcgtctgcattcttcttcagtggattttttgttgtcttcctctcagtgcttccatacgcactgattaaagggatcattctcaggaagattttcacaaccataagtttttgtatagtgctccgaatggccgtgactaggcaatttccatgggccgtgcaaacatggtacgattcccttggcgctatcaacaaaatccaggacttcctgcagaaacaggaatataagacattggaatacaacctgacgacgactgaggtggtcatggaaaacgtgaccgctttctgggaggaagggttcggcgagctgtttgagaaagccaagcagaataataacaatcggaaaacgtctaacggagacgattcacttttcttttccaattttagcttgttgggtacacccgtcctgaaggacattaacttcaaaatagagcggggacaactgctggccgtggcgggtagcacgggggccgggaagacaagtcttttgatggtgattatgggtgaactcgagccttccgaagggaagatcaagcattccgggcgaatttcattttgctctcagttcagctggatcatgcccgggacgatcaaggagaatatcatctttggcgtgtcatacgacgaatatagatacagatcggtaattaaggcctgtcagctggaggaagatatatctaagttcgccgagaaggataacattgttctgggcgagggcggaatcaccctgagcggggggcagagagcgcgaatttctttagccagagcagtttataaagatgcagacctgtacctcttagactctccatttggctatctggatgttcttacggagaaggagatcttcgaaagttgcgtttgtaagctgatggccaacaagacaaggatcctcgttactagtaaaatggaacatctgaaaaaggccgacaagatcctcatcctgcatgaaggatcctcgtacttttacggcaccttcagcgaacttcagaatctgcagcccgactttagcagcaagctgatgggctgcgattctttcgaccagttcagcgccgagcgtcggaactcaatcctcaccgagacacttcacagattttcactggagggcgacgcccctgtctcgtggaccgagacaaagaaacagtcctttaaacaaactggcgaattcggagagaagcgaaagaactcaatcttgaatccaattaacagtatccgaaagttcagcatagtccagaaaacccctctgcagatgaatggcatcgaagaggattccgatgaacctctggagcggaggctgtcactggtgcccgactccgaacagggcgaggccatcctgcccaggatcagtgtgatcagtacagggccaacccttcaggcgaggcggagacagtcagtgctcaatttgatgacccatagcgtgaatcaaggtcagaacatccacaggaaaaccaccgcaagtactaggaaggtgtccctcgcgccacaagctaatctgacagaattagatatttacagtaggcggttgtctcaggaaactgggcttgagatttctgaggagataaacgaggaagatcttaaagaatgcttttttgacgacatggagtccatcccggcagtgaccacttggaatacttatctgcgctacattaccgtccataagtccctgattttcgtacttatatggtgtttggtgatattcctggctgaggtagccgccagcctggtggttctttggctgctgggaaataccccactgcaggataaaggaaacagtacacactccaggaacaatagttacgcagttatcattacttccacgtcctcatactatgtgttttacatctatgtgggagtggcagacaccctgctggccatgggtttctttcgtggcctccccttggtacataccctgatcacggtgagtaaaatcctgcaccataagatgctccattccgtacttcaggcccccatgagtacacttaacaccctgaaggctgggggcatccttaaccgttttagcaaagacattgcgatcttggacgatttgttgcccttgacgattttcgacttcattcagttgctgctgatagtcataggggccatcgctgtggtcgcagtgctgcagccctacatctttgtggccactgtgcccgtgatcgtggcgttcattatgctgcgggcctacttcctgcaaaccagtcagcagctcaagcagctcgagtccgaaggcaggtcacccatctttactcatctggtgacttccctgaaaggactgtggacacttcgagcgtttggcaggcaaccctattttgagaccctgttccacaaagctcttaacctgcacaccgccaattggttcctgtacctgtcaacccttaggtggtttcaaatgcgcatcgaaatgatcttcgtcatattcttcatcgccgtgacattcataagcatcttgacaacgggagaaggggagggcagagttggcattatcctgactctggctatgaatattatgtctactttgcagtgggctgtgaacagttccattgatgtagattccttgatgaggtccgtctctcgggttttcaagtttattgatatgccaactgaagggaaaccgacaaaaagtacgaagccttataagaatggccaactgtccaaagtcatgatcatcgagaactcccatgtgaagaaagacgatatatggccatctgggggacagatgactgtgaaggatctgacagcaaagtatactgaaggcggaaatgcgatcctggagaatattagcttctctatatcccctggccagcgggtgggactgctcggccgcacaggcagtggcaagagcaccctcttatcagcgtttctgcgccttctgaacactgagggggagatccagattgacggcgtcagctgggatagtatcacactgcagcagtggcggaaggccttcggcgtgattccacagaaggtctttatcttctcgggtaccttccgcaaaaaccttgatccttatgagcagtggtctgaccaagagatatggaaagttgccgacgaggtgggcctcagaagcgtgatcgaacagttcccaggtaagctggattttgtgctggtcgatggtggatgtgtgctttcacatggccataaacaacttatgtgtttagctcgctccgtcctgtcaaaggctaagatcctgctgcttgatgagccttccgcccacttggatcccgtaacgtaccagattattcgccgcaccctaaagcaggcatttgccgactgcactgtgattctgtgtgagcataggattgaagccatgctcgaatgccagcagtttcttgttatcgaggagaataaggtccgccagtatgattccatccaaaaactccttaatgaaagatccctattcagacaagcgatttctccatctgatagagttaagttgtttccacatcggaactccagtaaatgcaaaagcaagccgcagattgccgctttgaaggaagagacagaggaggaagtacaagacaccagactt

SEQ ID NO: 10142 - DNA, 4440 bp, synthetic construct
  misc_feature 1..4440: note = source = /note="Description of Artificial Sequence: Synthetic coding sequence"
  source 1..4440: mol_type = other DNA
atgcagcgttctccactggagaaggcctcggtagtgagtaagcttttcttttcttggaccagaccgatcctaagaaagggttatcgccagcgcctggagctgtcggatatctaccaaataccatcagtggatagcgctgataatttgagcgaaaaacttgagcgtgagtgggacagggagttggcgtctaagaagaacccgaaattgatcaacgccctccgtcggtgtttcttttggcgtttcatgttctatggcatttttctatacctgggagaagttacaaaggcagttcaaccgttgttgctcggccgaattatcgcttcgtacgatccggataataaggaggaacgatcgattgctatttacctggggataggcctttgtttgctgttcattgtgagaacccttctgctccacccagctatttttggcctgcatcatattggcatgcaaatgagaatcgccatgttctctctgatttacaagaaaacgcttaagttgagctctagagttttggataagatctccatcggccagctcgttagtcttttgtctaacaacttgaacaaattcgacgaaggcttggctctagcccactttgtctggattgctccgttgcaggttgctctgttgatgggccttatttgggaattgttgcaggcgagcgcgttctgtggactcggcttcctgattgttttagctctattccaggccggtttgggacgcatgatgatgaagtatcgggaccagagagcaggcaagattagcgagcgcctcgtgatcacgagtgaaatgatcgaaaatatccagtctgtaaaggcctattgttgggaggaggccatggaaaaaatgattgaaaatcttaggcagacggagttgaagctgactcgaaaggcggcgtacgtaagatacttcaatagttcagcgttctttttctcaggtttcttcgttgtgtttcttagcgtacttccctatgctcttataaagggaatcatcctacgcaaaattttcaccaccatatcgttctgtattgtgctacgtatggcagtgacgcgccagtttccttgggcggttcagacgtggtatgactctcttggtgcaattaataaaatccaggacttccttcagaaacaggaatataaaaccttggaatataatctgaccaccactgaggtagtgatggagaatgtaactgcattctgggaggagggattcggagagctcttcgagaaggcgaagcagaacaataataacagaaagacatcaaatggcgatgattctctgttcttcagcaatttttcgctcttgggtacgccggtactcaaagacatcaactttaagatcgaacgagggcaacttctcgcagtagccggatcaaccggtgccggcaaaacgtcgctgttaatggttatcatgggcgagctagagccctcggaggggaagatcaagcattctggtcggatcagcttctgctcccagttcagctggataatgcctgggacgataaaagaaaatattattttcggggtctcgtatgatgagtaccgataccgctcggttatcaaagcctgtcaactcgaagaagatatctcaaagttcgccgagaaagacaatattgtattgggggagggtggaattactctgagtggagggcaacgtgcacggatatctctcgctcgggcagtgtacaaagatgcggacctctatcttttggatagccccttcggctatctggatgttctaacggaaaaggagatattcgaatcttgcgtctgtaaactgatggctaacaagactcgtatcctggtcacaagcaagatggaacatctcaaaaaggcggataagattctcattttacatgagggctcttcatacttctatggtacgttctctgaactgcaaaatctgcagcccgacttctcaagcaaactgatgggctgcgactccttcgaccaattctccgcagagcggaggaattccatcctaaccgagacacttcatcggttttctctggaaggggatgccccggtctcctggacggagacaaaaaaacagagtttcaaacagacaggcgagttcggtgagaaaaggaagaatagcatcctcaatccaattaattcaatccgcaaattctcgatcgtccagaagacaccactccagatgaacggtatcgaagaggattccgacgaacccctcgaacgcaggctgtccctagtgccagacagcgaacaaggtgaagccatattgccccgaatttcggttatcagtacgggtccaaccttgcaagctcgacggagacagtcggtcctaaatttgatgacccactcagtcaatcagggacaaaacattcatcgcaagactacagctagtactcggaaggtttccctcgctccccaggccaatctaaccgagcttgatatctacagtaggcggttgtcccaagaaaccggcctggagatttctgaagagattaacgaagaggatctgaaagagtgcttctttgacgacatggagagtatccctgcagttaccacttggaacacataccttagatatatcacggtccataagagcttgatcttcgtcttgatttggtgcctagtgatcttcctggcggaagtggccgcctccctcgtggtcctgtggctcctcgggaatacacctctccaagacaaggggaattctacacactcacggaacaattcctacgccgtgatcatcacatccacgtcgtcctactatgtgttctacatctacgtaggagtcgcagatactctactggcaatgggtttctttcgcggtcttcctctggtccacacactgataacggtgtctaagattctccatcacaaaatgctgcactcagtcctccaagcgcccatgagcaccttgaacactcttaaggccggtggtatcctgaatcggttctcgaaagacattgccattttggatgacctactaccgcttactatcttcgattttattcagctcctgctgatcgtaatcggcgcaatcgccgtagttgctgtccttcaaccatatatcttcgtggcaacggtccctgttatcgtggcgttcatcatgctccgcgcctatttcctccagacaagtcaacagctgaaacagcttgaatccgaggggcgatctcccatcttcactcacctggtgacgtccttaaagggactgtggacattacgtgcgttcggccgacagccgtatttcgagaccctgttccataaggcacttaatctgcatacagcaaattggtttctctatctttccacgctgcgttggttccaaatgcggatcgaaatgatttttgtcatctttttcattgccgtgacattcatatctatacttaccacaggagagggggaggggcgtgtcggcattatcttgactttggcgatgaatataatgtcaacgctccagtgggctgtcaatagttcaatcgatgtcgactccctaatgcgctcagtgtctcgggtatttaagtttattgacatgcctactgaaggaaagcctactaaaagcacaaagccctacaaaaacggacaactgagcaaggtcatgatcattgagaactctcatgtgaagaaagatgatatttggcctagtggtggtcaaatgaccgttaaggacttaaccgctaagtatactgaaggcggaaacgccatcctagagaacatttcattctcaatcagcccaggtcagcgcgtcggcctcctagggcgcactggtagtggcaaatcgacacttttatccgcttttctcagactacttaacactgagggcgaaatccagatagacggcgtctcctgggatagcatcacgttgcaacagtggaggaaggccttcggtgtcatcccacaaaaggtcttcatattcagtggtacttttcgcaagaacctggatccatacgagcagtggtcggaccaggagatatggaaagttgccgatgaggtgggtctccgtagtgtaattgaacagtttcccggaaagcttgacttcgtgctcgtcgatggaggatgtgtgctgtcccacggccataaacaactcatgtgcctggctcgtagcgtcctgtcgaaagcaaaaatcctactgttggacgaacccagcgctcatttggatcccgtgacttaccaaattatcagacgaacccttaagcaagcttttgctgattgtaccgtcatactgtgcgaacaccgcatagaggccatgttagagtgccaacaatttctggtgatcgaggaaaataaggtgcgccagtacgattccattcagaaacttctgaacgaacggtccctcttccgacaagctatctctccatcagacagagtcaaactctttccgcaccgaaacagttctaagtgcaagtctaagccgcagatagcggccctgaaagaggagacagaggaggaagttcaagacacgagactc

SEQ ID NO: 10143 - DNA, 4440 bp, synthetic construct
  misc_feature 1..4440: note = source = /note="Description of Artificial Sequence: Synthetic coding sequence"
  source 1..4440: mol_type = other DNA
atgcagcggtcaccgctggaaaaggctagcgtcgtgtccaaattgttcttttcgtggactcgtccgatactgcggaaggggtatcggcaacgcctcgagttgagtgacatctaccagatcccaagcgtcgattccgcagacaacctgtcagagaaactggaacgggaatgggatcgcgagctggcgtccaagaagaatcccaagctcatcaacgcattgcggcgctgctttttctggcggttcatgttctacggcatctttctctacctgggagaggtcaccaaagcagtccagccccttctgcttgggagaatcatcgcgtcgtacgacccggacaataaggaggaacggtcgattgcgatctacctggggatcggattgtgccttctcttcattgtgcgcaccctgttgctgcatccagccatctttggactgcatcatatcgggatgcagatgcggatcgcgatgttctccctgatctacaagaaaacgctcaaactgtcaagccgcgtcctggacaaaatctccatcggccaattggtgtcgttgctgtctaataacttgaataagtttgatgaaggactcgcactcgcccactttgtttggatcgccccacttcaggtggcgctgctgatgggattgatctgggagttgctccaagcctccgccttttgtggtctgggctttctgatcgtgctggcactgttccaagcgggacttggcagaatgatgatgaagtaccgggaccaaagggccgggaagatttcggagcggctcgtcatcacctcggagatgatcgaaaacatccagtcggtgaaggcctactgctgggaggaggccatggagaagatgatcgagaatctgaggcagaccgagctgaagctgaccaggaaggccgcatacgttagatacttcaactcatcagccttcttctttagcggttttttcgtggtgttcctgtcggtgctgccgtacgccctgattaagggtatcatactccgcaagatcttcaccaccatctcgttttgcatcgtgctgagaatggccgtgacccggcagttcccgtgggcggtccagacctggtacgacagcctcggagccattaacaaaatccaagatttcctgcagaagcaagaatacaagaccctggaatacaatctgaccaccactgaagtggtgatggagaatgttactgcgttttgggaagagggattcggcgagctgtttgagaaggcgaaacagaacaacaataatcgaaagacttctaacggcgacgattccctgttcttctccaactttagcctgctcggcaccccggtcctgaaggacatcaacttcaagattgaaaggggacaattgctcgctgtggctggcagcaccggcgccggaaagacttctctcctgatggtgattatgggagagctcgaaccgtccgaaggcaagatcaagcactcaggtcggatctccttctgttcccagttcagctggattatgccaggaactatcaaggaaaacatcatcttcggagtgtcctacgacgaatatagataccggtcagtgattaaggcctgccagcttgaggaggacatcagcaagttcgcggaaaaagacaacatagtgctgggggaagggggcatcaccctgtcgggaggacagcgcgcccgaattagcctggctcgcgcggtttacaaagatgccgatctgtacctgctggactcgcctttcggctaccttgacgtgctcaccgaaaaggagatatttgaatcctgcgtctgtaagctcatggccaacaaaactagaatccttgtcactagcaaaatggaacacctgaaaaaagcggacaagatcctgatcctgcatgagggtagctcctacttctacggaaccttctcggagttgcagaacctgcagccggacttctcgtcaaaacttatgggatgcgactcatttgaccagttctcggcagaacggagaaactcaattcttaccgaaactctgcaccggttcagcttggagggagacgcgccagtctcctggactgaaaccaagaagcaatccttcaaacagactggagaatttggggagaagagaaagaactccatcctgaatccgatcaactccattcggaagttcagcattgtgcaaaagactcccttgcagatgaatggaatagaagaggactcagacgaacccctggaaaggagactctcactcgtgcctgactcggaacaaggcgaggcgatcctgccacgcatttcagtcatctcaactggaccaaccctgcaggcacgccgccgtcagagcgtcctgaatctgatgacccactcagtgaatcaaggacaaaacatccatagaaagaccactgcctcgacgcgtaaagtctcgctggccccccaagccaatctgaccgagctggacatctactcgcgacggctttcccaggaaaccggattggagatcagcgaagaaatcaacgaagaggacctcaaggaatgttttttcgatgatatggagtccattcctgcagtgactacgtggaacacgtatctccgctacatcaccgtccacaagtctctcatcttcgtacttatctggtgccttgtgatcttcctggcagaagtggcggcgtccctcgttgtcctgtggctcctcggaaacactccgctccaagataagggcaactcgacccactcgcggaataacagctatgctgtgatcattacctcaacttcgtcatactacgtcttttacatatacgtcggcgtggctgataccctgctggcgatgggattcttccgcggcctgccattggtgcacacgctcattactgtgagtaagattttgcatcacaagatgttgcactcagtgctccaggcaccgatgtcaacgctgaatacgttgaaagccggcggaatcctgaacagattctcgaaggatatcgccattcttgacgatctcctgcctctcactatcttcgacttcatccagctgctcttgatcgtgatcggcgccatcgccgtggtggcggtgctccaaccatacatctttgtggcgactgtgcccgtgatcgtcgcgttcattatgctcagagcgtacttcctccaaacttcacagcagcttaagcaactggaatccgagggacggagcccgatcttcacccatctcgtaacgtccctcaaggggctgtggaccctgcgcgctttcggacggcaaccgtacttcgagactctcttccacaaagcactgaacttgcacaccgcaaattggttcctctatctctcgactctgcgctggttccagatgaggatcgaaatgatcttcgttatcttcttcatcgctgtgactttcatcagtatcctgactactggagaaggagagggacgggtgggaatcatcctcactctggcaatgaacattatgtcgactctccagtgggcagtaaacagcagcatagatgtggactcgcttatgcgctccgtgagccgtgtgttcaaattcattgacatgccgactgagggaaagccgaccaagtccaccaagccttacaagaatggacagttgagcaaagtgatgatcatcgagaactctcacgtgaagaaagatgatatctggccttccggcggtcagatgaccgtgaaagacctgaccgcgaagtacactgaagggggtaacgccatcctggagaacatttcattttccatctccccaggacaacgtgtcggcctgctcggtcggaccggctccggtaaatcgactctgctctcggcctttctgcgcctgctcaataccgaaggtgagatccagatcgacggtgtctcatgggattcgatcaccctgcaacagtggcggaaagccttcggggtgatcccgcagaaggtgttcatcttctcggggacgttcagaaagaacctggatccttacgaacaatggagcgaccaagaaatctggaaagtcgctgacgaagtggggctgcgctcggtcatcgagcaatttcctggaaagctggatttcgttctggtggacgggggatgcgtgctttctcatgggcataagcagctgatgtgccttgctcgctccgtgctttcgaaggctaaaatccttctcctcgacgaaccaagcgcccaccttgatccagtcacctaccagatcatccgcagaacgctgaaacaggctttcgcagattgcactgtgattctttgcgaacaccgaattgaggcgatgcttgaatgtcagcagttcctggtcatcgaagaaaacaaagttcgccaatacgattccatccagaagctcctgaatgaaaggtcgctgttccgccaggccataagtccgtccgatcgcgtgaaactctttccgcataggaactcgagtaagtgcaagtctaaacctcagatcgcagcccttaaggaggagactgaggaagaggtccaagacaccagactc

SEQ ID NO: 10144 - DNA, 4440 bp, synthetic construct
  misc_feature 1..4440: note = source = /note="Description of Artificial Sequence: Synthetic coding sequence"
  source 1..4440: mol_type = other DNA
atgcagcgtagccccttggagaaggctagtgtggtcagcaagctctttttctcctggactaggccaattctacgtaagggttaccgccagcgcctcgaacttagtgatatttaccaaatccccagcgttgactccgccgacaacctctctgaaaaactagagagggagtgggatcgcgagttggcgtccaagaagaacccgaaactcataaacgcgctccgtcgttgcttcttttggcgtttcatgttctacggaatctttttgtacctgggggaagtgacgaaggcagttcagcctctgctgctcggccggatcatcgctagctacgatccagacaataaggaagaaaggtccatcgctatttacctaggtatcggtctgtgcttgctgttcattgttcgcaccctcttgctgcacccggcgattttcggcttgcaccatatcggaatgcagatgcggatcgctatgttctcccttatctacaaaaagaccttgaagctgtcctcccgtgtgttggacaagattagcatcggacagctcgtctctctgctcagtaataacttgaacaaatttgatgagggactagcactcgcccatttcgtctggatcgctccgctacaggttgccctgttaatgggtctaatctgggagttgttgcaggcttcggcattctgcggtctgggctttctgatcgtcctcgccctcttccaagctggcttgggacggatgatgatgaagtatcgcgaccagcgtgctggaaagatctctgaacgcctggtgattaccagcgagatgatcgagaacatccaatctgtaaaggcatactgctgggaagaggccatggagaagatgatcgagaacctccgtcagacggagctcaagctgaccaggaaggcggcttacgttcggtactttaactcgagcgcattcttcttcagcggcttcttcgtcgtcttcctgtcggtcctgccttatgcgttgatcaagggcattatcctcaggaagatctttactactatctccttctgcatcgtgctgcggatggctgtgactaggcaattcccctgggcggtccaaacctggtatgactcgctgggtgccatcaacaagatccaggatttcttgcagaagcaggagtacaagactttggagtacaacctgaccaccaccgaggtagtgatggagaacgttacagccttctgggaagagggcttcggggagctgttcgaaaaagctaagcaaaacaataacaaccgcaagacctccaacggcgacgatagcctgtttttttccaacttttcattattgggaacgccagtcctaaaggacatcaacttcaagatcgagcggggacaattgctggctgtagctggttctacgggtgccggcaagacatccctgctgatggtcatcatgggcgaacttgagccctctgaaggtaagatcaaacatagtggtcgcatctcgttttgctcccagttctcatggatcatgccgggtacaatcaaggaaaacatcatctttggagtctcctacgatgagtaccggtaccgtagtgttatcaaggcgtgtcagttggaggaagatatcagcaaatttgcggagaaggataacatcgttttgggagaaggtggcattaccctcagcggcggtcagcgtgctcgcatctcgctagcacgggcggtttataaagatgctgatctgtacctcctggactctcccttcggctacctcgacgtcctgaccgagaaggagatcttcgagagctgtgtttgtaaactcatggccaacaagacccggatcctagttacaagcaagatggagcatctcaaaaaagcagacaagatcctcatcttgcacgaaggttcctcttacttttacggcacattcagtgagctacaaaatctccagcctgacttcagttccaaactcatgggctgcgatagcttcgaccagttctcggctgagcgcaggaactcgatcctaactgagacgctccacagatttagccttgagggcgacgctccggtttcctggactgaaacaaaaaagcagagcttcaagcagaccggagagtttggcgagaagcgtaagaactccatactgaatcccatcaactccatccgcaagttctccatcgtgcagaagacccccttgcagatgaacggcatcgaggaggattcggacgaacctcttgaacgtcgcctttcgctcgttcctgacagcgagcaaggtgaggctattctcccccggatctccgtgatttccaccggccctaccctgcaggctcgtcgccgtcagtccgtcctgaacctgatgacccacagcgtcaaccagggacagaacatccatcggaagactactgcttccacccgtaaggtttccctggcaccccaggcaaacctcaccgaactcgacatctactcgcgccgcctttcccaagagaccggactcgaaatcagtgaggagataaacgaggaagacctgaaggaatgcttcttcgacgacatggaaagtatcccagcggtcactacctggaatacctatctccgctacatcaccgtccataagtctcttatctttgtcctgatttggtgccttgtaatcttcctggccgaggtcgctgcctcgttggtggttttgtggctgctgggaaatacaccattacaggacaagggcaactcgacccattctcgaaataactcttacgcagtcattatcaccagtaccagcagctactacgttttctacatatacgtcggtgtcgctgacactcttctggctatgggcttcttccggggtttgcccctcgttcacacgctcatcaccgtcagcaagatcctgcaccacaagatgttgcactccgtgcttcaagcccccatgtctaccctcaacactttgaaggctggcggaatacttaaccggttctccaaggatatagctatcctggatgacctccttcctttgaccatattcgacttcatccaactcttattgatcgtgatcggcgccattgctgtcgtcgccgtgctgcagccatacattttcgtagcaacggtgccagtgatcgtcgccttcatcatgcttcgcgcttatttcctccagaccagccagcaactcaagcagctggagtccgaagggcggtccccgatcttcacacacctcgttacgtcgctcaagggtctatggacgctaagggcctttggtcggcaaccttactttgaaactctgtttcacaaggctttgaacctgcatacggctaactggttcctatacctgtcgaccttgcgctggtttcagatgcgcatcgaaatgatcttcgttatctttttcatcgccgtcaccttcatctcgatcttgaccaccggagagggagagggcagggtcggtattatcctcaccctcgctatgaatattatgagcactctgcaatgggctgtcaactcgagcatcgacgtggactctctgatgcgttctgtcagtcgtgtatttaagttcattgatatgcccaccgagggcaagcccacgaagtctaccaagccctacaagaacggccagctcagcaaggtcatgatcatcgagaacagtcacgtgaagaaagatgacatctggccctcagggggtcagatgaccgtgaaagacctgaccgctaagtacaccgagggcggaaacgctattctggaaaacatttccttttccatctcccctggccaacgcgtgggtctgctaggccgcacgggtagcggcaagtctaccctgctgagtgctttcttgcgcctgctcaacactgaaggtgagattcagatcgatggtgttagctgggactcgatcacgctccagcagtggagaaaggcattcggtgttatcccccagaaggtgttcatcttttccggtaccttccgtaagaacctcgacccgtacgagcaatggtcggatcaagagatatggaaggtggctgacgaggtaggacttcgttccgtcatcgagcagttccctggcaagctcgactttgtcctggtcgacggaggttgcgtgctgtcccacggtcacaagcaacttatgtgccttgcccgtagcgttctcagcaaggctaagatcctcctcctggatgagccttcggcccatcttgaccctgttacctaccagatcattcgccgtaccctgaagcaagccttcgctgactgtaccgtgatcttgtgcgagcaccgcatcgaggccatgctcgagtgccagcagttcctggtgatcgaggaaaacaaagtgcgtcagtacgactccatacaaaagttgcttaatgagcggtctctcttccgtcaggccatctccccttccgatcgggttaagctattcccccaccggaactcgtcgaagtgcaagagcaaaccgcaaatcgctgccctgaaggaagagaccgaggaggaggtgcaggacactaggcta

SEQ ID NO: 10145 - DNA, 4440 bp, synthetic construct
  misc_feature 1..4440: note = source = /note="Description of Artificial Sequence: Synthetic coding sequence"
  source 1..4440: mol_type = other DNA
atgcaacgaagccccctcgagaaggcttcggtggtgagcaagttgttcttctcctggactcggccgatcctgcgtaagggataccgccagcgccttgagctgtctgacatctaccaaatcccatccgtcgactcggcggacaatctgagcgaaaagctggagagagaatgggaccgcgagctcgccagcaagaagaacccgaaactcatcaatgcgctgcggcgctgctttttctggaggttcatgttttacggcatctttctctacctgggcgaagtgaccaaggcagtgcaaccactgctcctcggcagaattatcgcttcctacgacccggacaataaagaagaaaggagcatcgcaatctacttgggcatcggattgtgtctgcttttcatcgtccggactctgttgctccaccctgctatcttcgggcttcaccacattggaatgcagatgcggatcgcgatgttctcactgatctacaagaaaacgttgaaactgtcaagcagagtcctggataagatctcgatcggacagctggtcagcctcctctccaataacttgaataagttcgatgagggcttggccctggcccatttcgtgtggattgccccgcttcaggtcgctcttctgatgggcctgatctgggagcttctgcaggcctcggctttctgcggtttggggtttcttattgtgctcgcgctgttccaggccggactcggtcgcatgatgatgaaatacagagatcagagggcaggaaaaatctcagagcggcttgtcatcacttccgaaatgattgagaatatccagtcggtgaaggcctactgttgggaggaagcgatggagaagatgatcgaaaatctcaggcagaccgagctcaagctgactaggaaggcggcatacgtccgctacttcaactcatccgcgttcttcttctcggggttcttcgtcgtgttcctctcagtgcttccgtacgccctgatcaagggaatcattctcagaaagatattcacgactatttctttctgcatcgtcctcagaatggccgtcaccagacaatttccatgggctgtccaaacctggtacgattcattgggagcgatcaataagatccaggatttcctccagaaacaagaatacaaaactctcgaatacaatctgactactaccgaagtcgtgatggagaatgtcaccgctttttgggaggaaggcttcggcgagttgtttgagaaggcaaaacagaacaacaataaccgtaagacgagcaacggagacgactccctcttcttctcgaatttctcgctcctcggaactccagttttgaaagacattaacttcaagatcgaacgcggacaactcttggccgtggctggatcgactggggccggcaagaccagcctgctcatggtcattatgggtgaactcgaaccttcagagggaaaaatcaagcattcgggcaggatcagcttctgttcgcaattttcttggatcatgccgggaaccatcaaggaaaacatcatctttggcgtgagctacgacgaataccgttatcggtcggtgattaaggcgtgccagctggaggaagatattagcaagttcgccgagaaggacaacatcgtgctcggagaaggaggaatcacgctcagcgggggacagcgcgccagaatctcactggccagggctgtgtacaaggacgccgatctgtacctgttggactcgcctttcggatacctggatgtcctcactgaaaaagaaatcttcgagtcgtgcgtgtgtaagctgatggccaacaagacgagaatactcgttacctcaaaaatggagcatctcaagaaggctgacaaaatcctgatcctgcatgaaggatccagctacttttacgggaccttcagtgaactccagaacctgcaacccgacttttcgtccaagctgatggggtgcgactcgtttgatcagttttcggccgaacggagaaacagcatcttgactgaaaccctccacaggttttctctggaaggagacgcgcccgtgagttggaccgaaactaagaagcaatcgttcaagcagactggcgaattcggagaaaagcgcaagaattcaatcctcaaccccatcaattccatcagaaagttctcgatcgtgcaaaaaacccccttgcagatgaatggaatcgaggaggattcggatgaaccgctggaacggcgactttccctggtcccggactcggaacagggagaggccatcctgcctaggatctccgtgatctcaaccggaccaaccctccaggcacgccgaaggcaatccgtcctgaacctgatgacgcacagcgtgaaccagggccaaaacatccacagaaagaccaccgctagcactcgcaaggtcagccttgctccgcaggctaatcttactgaactcgacatttactcacgcagactgagccaggagacgggtctggaaatctctgaggagatcaatgaagaggatttgaaggagtgtttcttcgacgatatggagtcaatcccggccgtgaccacttggaacacctacctgagatatatcaccgtgcacaaatcgttgatttttgtgctcatttggtgcctggtcattttcctggctgaagtggccgctagcctggtggtgctgtggctcctgggaaacaccccgttgcaagataaagggaactccacccactcacggaacaatagctacgccgtcatcatcacctccactagctcgtactacgtgttctatatctacgtgggagtggccgataccctgctggcaatgggcttcttccggggactcccactggttcatactctcattaccgtgtccaagatccttcatcacaaaatgctccactctgtgctccaggcaccaatgagcacgctcaataccctgaaggccggcgggattctgaaccggttctcaaaggacatcgctatcctggacgatctcctcccgctcactatctttgactttattcaactgctccttatcgtcatcggagccatcgccgtcgtggcggtgcttcagccatacatctttgtggccactgttccggtgatagtggcattcatcatgttgcgagcctacttccttcagacttcacagcaactgaaacagctcgaatccgaaggacggtcgcctatcttcacccatctcgtgactagcctcaaaggactgtggactctgcgggctttcggcaggcagccatatttcgagactttgttccacaaggcccttaacctgcacactgcaaactggttcctctacctgtcgacccttcgctggttccagatgcgcatcgagatgatctttgtgattttcttcatcgctgtcaccttcatctcgatcttgaccaccggcgaaggtgagggtagagttggaatcatcttgactctcgcgatgaacattatgtccactcttcaatgggctgtgaactcctcgatcgatgtggattcactcatgcggtctgtgtcgagagtctttaagtttatcgacatgccaaccgaaggaaagccgactaagtcgaccaagccatacaagaacggacagctgtcaaaggtgatgatcatcgaaaactcacacgtcaaaaaggacgatatctggccaagtggaggccaaatgaccgtcaaagacctgactgcgaagtacaccgagggaggcaacgctattctggagaatatctccttctcaatctcacccgggcagagagtcggacttctgggacgcacgggatccggaaagtcgactctgctttcggcgttcctgcggctgctcaacactgagggggagatccagatcgatggtgtcagctgggactcaatcaccttgcaacagtggcggaaggcttttggagtaattccacagaaggtctttatcttctcgggcactttcagaaagaacctggacccgtacgaacagtggagcgatcaggaaatctggaaggtggccgatgaagtggggctccggtccgtcatcgaacagttccctggcaagctcgattttgtgctcgtggacggaggatgtgtgctgtcccacggccacaagcagctgatgtgcctggctcggagcgtgcttagcaaggcaaagatcctcctcctggatgagccgagcgcccatcttgacccggtgacttatcagatcatccggagaacgctcaagcaggcctttgcagactgcaccgtgatcttgtgcgagcatcgcatcgaagctatgctcgagtgtcaacagttcctggtcatagaagaaaacaaggtccggcagtacgacagcatccagaaactcctcaatgagcgcagcctgttcagacaggcaatttccccgtccgacagagtgaagctgttccctcacagaaacagcagcaagtgcaagtccaagccacagattgcggcattgaaggaagaaactgaagaagaggtgcaagacacccgcctc

SEQ ID NO: 10146 - DNA, 4440 bp, synthetic construct
  misc_feature 1..4440: note = source = /note="Description of Artificial Sequence: Synthetic coding sequence"
  source 1..4440: mol_type = other DNA
atgcaaaggagtcctttggagaaagcatcagtggtttctaaattgtttttctcttggactcgtccaatcttgaggaagggctaccgtcagaggcttgaattaagtgatatttatcaaataccatccgtggattctgctgacaacctcagtgaaaaattagagcgagagtgggatcgggagttggcttccaagaagaatccaaagctcattaatgctttgcgaaggtgcttcttctggcggttcatgttctatgggatcttcttgtacttaggagaggtcactaaggctgttcaaccattattgctaggtagaattatagcttcctacgatccggacaataaggaagaaagatcaattgctatctacttgggtattggattgtgcttgcttttcattgtgcggactcttcttttgcatccggctatctttggtctccatcatatcgggatgcaaatgaggattgctatgttttctctcatttataaaaagacattaaaactgagttcgcgtgtgctagataagatttcaattggtcagcttgtatctcttttaagcaataacctcaacaagtttgatgaaggtctcgctcttgcgcatttcgtttggattgcccccctccaagtggcattgctgatgggacttatttgggaactccttcaagcatcagctttctgtgggcttgggttcctaatcgtgcttgcacttttccaagctggattggggagaatgatgatgaaataccgagatcagagggccggtaagattagcgagaggctagtgataaccagtgaaatgattgagaacattcaatctgtaaaagcatattgctgggaggaagcaatggagaagatgattgaaaaccttcggcagacggaattgaagcttactaggaaggcagcttacgtgagatatttcaatagctcagctttctttttttcgggtttttttgtcgtgtttcttagcgttctcccctatgccctcatcaaagggattatcctgcgtaagattttcacgacgatatcgttttgcatagtgcttagaatggcggtcacacggcaattcccttgggctgttcaaacttggtacgattccttgggagccattaataaaattcaagatttcctccaaaaacaagagtataaaactcttgagtataacttgacaaccacggaggttgtaatggaaaacgttacagctttctgggaggagggatttggtgaactttttgaaaaagctaagcagaataacaacaaccgaaaaacttcaaatggggatgatagtctcttcttcagcaatttttccctacttggtaccccggtacttaaagatattaacttcaagatcgaacgaggtcaattgctggcagtggccggttccacaggagctggcaaaacctccttgcttatggtgatcatgggcgaactcgaaccatcagagggaaagattaagcattctggaaggattagcttttgctcacagttcagctggatcatgcccggcactattaaggagaacattattttcggggtttcttatgacgagtatcgttacaggtctgtgataaaggcttgccaattagaagaagatatcagcaaatttgcggagaaggataatattgtgctcggtgaaggtggaattactcttagtggtggtcaaagagcgaggatcagtttggcgagggccgtctacaaggatgccgatctttatcttttggacagcccttttggttaccttgatgtgttaaccgaaaaagagatcttcgaaagctgtgtgtgtaaacttatggctaataagacacggatattggttacttccaaaatggaacatttgaagaaagctgataagatcctcattcttcatgaggggagctcatatttctatggcactttctctgaacttcaaaatctccaaccggatttctcttctaagctcatgggatgtgactctttcgaccaattctctgctgagcggcgaaattctattctgacagaaacccttcacaggttttcattggaaggtgatgcaccagtttcctggacggaaaccaagaagcaatcctttaagcaaactggagagtttggagaaaaaagaaagaattcaatcttgaatccaattaactccatacgtaagttttctattgttcagaagacacctcttcaaatgaacggcatagaagaggattctgatgagccactggaaagaagactgtctctagttcctgacagtgagcaaggggaagctatccttcctagaatttccgttattagcaccggaccaactttgcaagcaagacgtcgacaaagcgttcttaatttgatgacgcactcagtcaatcaaggacaaaatattcataggaagaccaccgcttctacaagaaaagtgagcctcgcgcctcaagcgaatctgaccgagctagatatttattctagacgtctttcccaggagactggacttgaaatttccgaagagattaacgaagaagatcttaaggagtgtttcttcgatgatatggagtcaatcccagctgtcactacttggaacacatatttgcgatacatcacagttcataagagtctcatattcgttttgatttggtgcttggttatctttcttgccgaggtcgccgctagccttgtggtcctttggctcctggggaacacaccactgcaagacaagggcaatagcacccattctaggaacaattcatatgctgttataataacttcaacctcttcttactacgtgttctatatatatgtaggtgttgcagatacacttttggccatgggtttttttcggggattaccacttgtgcatacactgattacggtctctaagattctccaccataagatgcttcatagcgtgctgcaggcacctatgagcactttaaacacgttgaaggctgggggtattctcaatcgtttttcgaaggatattgcgattttggacgatttgctccctctcacaatctttgacttcattcaattgctgctcatagtgataggagcaattgcggtggtggcggttttgcagccttatatatttgttgctacagttccggttattgttgcatttattatgttaagggcatatttcctacagacttcacaacaattaaaacaattagagtctgaaggtagaagcccaatttttacccatctggtaacctctcttaaaggattgtggactttaagggcattcggtagacagccctatttcgaaacacttttccacaaggcactcaatctacataccgctaattggtttttgtatcttagtactctccgctggtttcaaatgcggatagaaatgatcttcgttattttcttcattgcagttacttttatttcaatcctgaccactggcgagggcgagggaagggttggtattatactaactctggctatgaatataatgtctacgctccagtgggctgtcaacagcagtatcgatgttgattccttaatgcgttctgtcagtcgtgtgttcaaattcatcgatatgcctacagaggggaagcctaccaagtccacaaagccatacaagaacggacaactgtctaaggttatgattatcgaaaattcccacgttaagaaggatgatatttggccatcgggaggtcagatgaccgtgaaagatttaactgccaagtacaccgagggtggaaacgccattttagaaaatattagtttcagcattagtcccgggcagagagtaggacttctgggaagaaccggttcaggaaaatctacgttactgtctgcattcctccgacttcttaatacagagggtgaaatacaaatcgatggcgtctcgtgggattcaatcacattacaacagtggcgcaaagcgtttggcgtcattccacagaaggtctttattttttccgggacttttaggaagaatctggatccatatgagcaatggtccgaccaggaaatttggaaggtggctgacgaagtgggcctccgtagtgttatcgaacagttccctggaaagttagacttcgtcttggttgatggtggctgtgtgctttcgcacggacacaaacagctgatgtgcttggcaaggtcggttctaagcaaagctaagatcttgctattggacgaaccaagtgctcatttggatcccgtgacctatcaaattatccgccgaactcttaaacaggcatttgcagattgcactgtcatcctctgcgaacacagaatagaggcgatgttagagtgtcaacagtttctagttattgaagaaaataaggtgaggcagtacgactctattcagaaactcctaaacgaaaggagcttgtttagacaggccatttcaccatcagatagagtaaaattgtttccacatcgaaactcctcaaagtgcaaatctaagccgcaaattgcagccctaaaagaggaaacggaagaagaggtgcaggacaccaggctg

SEQ ID NO: 10147 - DNA, 4440 bp, synthetic construct
  misc_feature 1..4440: note = source = /note="Description of Artificial Sequence: Synthetic coding sequence"
  source 1..4440: mol_type = other DNA
atgcagcgaagtcccctggagaaggcctcggtcgtgtcgaaactgttctttagctggacccgccctattctccggaaaggataccgacaaagacttgaactttcggacatttaccaaattccaagcgtggatagcgcggacaatctttccgaaaagctcgaacgtgagtgggatcgcgagcttgcatcaaagaagaacccaaagttgatcaatgcactccgccgctgtttcttttggcgctttatgttttacggaatctttctgtatctgggagaagtcactaaagcagttcaacctctccttctcggtcggattatcgcctcctacgatcctgacaataaagaagaaaggagcattgcaatctaccttggaattggcctgtgtctgctcttcatagtccgtactctcctgctgcacccggcaattttcggtctgcaccacattgggatgcagatgagaatcgcaatgttttcgttgatctacaaaaagacgctcaaacttagctcgagggtgctggataagatttcgatcggacaacttgtaagccttctgtccaacaacctgaacaagtttgatgagggccttgcccttgcgcattttgtgtggattgcgcctctccaagtggcccttctcatgggccttatctgggagttgctgcaggcatcggctttctgcggactgggattcctgatcgtgcttgccctgtttcaagcagggctgggacgcatgatgatgaagtaccgcgatcagagagcgggtaagatctcggaacgacttgtgattacttccgaaatgatcgaaaacatacaaagcgtcaaggcttactgctgggaagaagcgatggagaagatgattgaaaacctccggcagactgagcttaagttgactcggaaggccgcatacgtgcggtactttaactcgtccgcgtttttcttttcgggtttcttcgtggtgttcctgtcagtcttgccgtacgctttgataaagggaattatccttaggaagatattcaccaccatttcgttctgcatcgtgctgagaatggcagtgacccgacaatttccctgggcagtgcagacgtggtacgattcgctgggtgcaattaacaagatccaggacttcctccagaagcaagaatacaaaacgctggagtacaatctcactaccaccgaggtggtgatggaaaacgtgactgcattttgggaagaaggttttggagaactgtttgaaaaggcaaagcagaacaacaataaccgaaagacgagcaatggagatgattcgctgttcttttccaacttcagcctgctgggaaccccagtgcttaaggacattaacttcaaaattgaacgggggcagcttcttgcagtggcaggttcaactggagcggggaaaacctctctgcttatggtgatcatgggagagctggaaccctccgaaggtaagatcaagcattccggcaggatttccttctgttcccaattttcgtggatcatgcccggaaccataaaggaaaacatcatttttggagtgtcctacgacgaataccgatataggagcgtgatcaaagcatgtcagctcgaagaggatatctccaagttcgcagagaaggataacatcgtgctcggagaaggcgggattacgctgagcggaggacagcgggcaagaattagccttgcacgtgcggtgtacaaggatgccgacttgtaccttctggattccccatttggttaccttgatgtgctgaccgaaaaagagatattcgagtcgtgtgtgtgcaagctgatggccaataagacgagaatcctggtgacgtccaagatggagcaccttaagaaagcagataagatcctcatccttcacgaaggaagctcctacttctatgggaccttttctgagctgcaaaatctgcaacccgatttctcgtcgaagttgatgggatgtgatagctttgaccaattctcagcagaacgtaggaattcgattctgaccgagacgctgcatagatttagccttgagggtgacgcacctgtctcgtggactgaaaccaagaagcaatcctttaagcagacgggggaatttggggaaaagaggaaaaactctattcttaatcctatcaactccattaggaaattctcgattgtccaaaagacccctctgcagatgaacggcattgaagaagattcagacgaacctcttgaacggaggctgtcgctggtccctgattcggaacaaggagaggctatactcccaagaatttcggttatcagcactggtccaaccctccaggcaagacgcaggcagtccgttttgaatctcatgacccattcggtgaaccagggtcagaatatccatcgtaaaactaccgcctctactagaaaggtgtcgctggcaccacaagctaacttgaccgaacttgacatttacagccgcaggctgtcccaagagactggtcttgaaatttcggaggagataaacgaagaggacctgaaggagtgttttttcgatgatatggaatcgatcccagccgtgacgacgtggaacacttacctccgctacataaccgtccataaatcgcttatctttgttcttatttggtgtctggtgatcttccttgcagaggtcgccgcatccctggtggtgctgtggcttttgggaaacactcctctgcaggataagggaaactcgacgcactcgagaaacaacagctacgcagtgatcataacctcgactagcagctactacgtcttttacatttacgtgggagttgcagataccctgctcgctatgggcttcttccggggtctgcctctggtgcatacccttattaccgtctcgaagattcttcaccataagatgctccattccgtgcttcaggcccccatgtcgaccctcaacactcttaaggcaggagggatattgaaccgatttagcaaggatattgcaattctggatgatctgctgcctctcaccatcttcgacttcattcagctcctgctcattgtcattggagctatagcagtggtggctgtgctgcagccatacatttttgtggccactgtaccggtgattgtggcctttatcatgttgagagcatactttttgcagacctcgcagcaattgaaacaactggaatcggagggtagaagccccatctttacccaccttgttacctcgcttaaaggtctttggactctgcgggcattcggtagacaaccttactttgagactctttttcacaaagcactgaacctgcacactgcaaactggttcctttacctgtcaaccttgcgctggttccagatgcggatcgaaatgatattcgtcattttctttatagccgtcactttcatttccattcttacgactggtgaaggggagggaagagtgggaataatcctcaccctcgcaatgaatatcatgtcaacgctgcagtgggccgtgaatagcagcattgatgtggattcactgatgcggtcagtttcgcgagtgttcaaattcattgacatgcctactgaaggtaagccaaccaagagcaccaagccatacaagaacgggcaactgtcgaaggtgatgatcatcgaaaactcacatgtcaaaaaggacgacatctggccgtccggtggccaaatgactgtgaaggatctcactgcgaagtacactgagggtggaaacgccattcttgagaacatcagcttttccatttcgcctggtcaaagagtgggacttttgggcaggactggatctggaaaaagtacgcttctttccgcattcctccgcttgctcaataccgagggggagattcagattgatggagtgtcctgggactccattacccttcaacagtggcgcaaggctttcggggtgattccacaaaaggtgtttatcttctcaggcactttccgcaagaatctggatccttacgaacagtggtcggatcaggaaatctggaaggtcgcagatgaagtggggctgagatcggtgattgagcagtttcccggaaagctggacttcgtgcttgtcgacgggggatgcgtgctctcacatgggcataaacagcttatgtgtctggcaagatccgtgctctccaaggccaaaattcttcttctggatgaaccttcagcacatttggacccggttacctaccagatcattcgaagaacccttaagcaagcgtttgccgactgcaccgtcatcttgtgcgagcacaggattgaagccatgctggaatgtcagcagtttcttgtcatcgaagaaaacaaagtgagacaatacgactccatccagaaactgcttaatgaaagatccctctttcgccaggcaattagcccatcggacagagtgaaacttttcccccatcggaactcaagcaagtgtaagtcgaaaccgcaaatcgctgcccttaaggaggaaactgaggaagaggtgcaagataccagactt

SEQ ID NO: 10148 - DNA, 4440 bp, synthetic construct
  misc_feature 1..4440: note = source = /note="Description of Artificial Sequence: Synthetic coding sequence"
  source 1..4440: mol_type = other DNA
atgcagcggagtcctttggaaaaagcctcagtggtatccaagctgtttttttcttggacacggcccatactccggaaaggatatagacagagactcgaactctccgatatttatcagattccctctgtggattctgcagataatctctctgaaaaattagagcgggaatgggatagggaactggcatcaaagaaaaatcctaaactaattaatgctctccgcagatgttttttttggcgctttatgttttacgggatctttctatatctaggggaagtgacaaaagcggtgcagcctctgctcttggggagaataatcgcctcatatgatccagataacaaagaagagcgatctattgccatctatctgggaatcggactgtgcctgctattcatagtgcgaacactgctattacatccagctatcttcggactgcatcatataggaatgcagatgcgaatagccatgttttctcttatctataagaaaactcttaaattaagttctagggtactcgataaaatctcaatcggacagctggtatctttgctatctaataacttgaataagtttgatgaagggctcgcactagcgcatttcgtctggattgcgcccctgcaggttgctttattgatgggactgatctgggaactgttacaagcctctgccttttgtgggctcgggtttcttattgtgcttgctttgtttcaggccggactcggacgcatgatgatgaaatacagagaccagcgagcaggaaaaatatctgaaaggctagtgatcacatcagaaatgatcgaaaatatccagtcagttaaagcttactgctgggaggaagcaatggaaaaaatgatcgaaaacctaaggcagactgaactaaaactcacaaggaaagcggcatatgttaggtacttcaatagttcagctttttttttctcaggattcttcgtcgtgtttctgtccgtcctgccttatgcactcatcaagggaatcatcttgagaaagatcttcacaactatttccttctgcattgttctacgaatggctgtaacacgacagtttccatgggctgtacagacttggtatgattctttgggggcaatcaacaaaatccaggatttcttgcagaaacaggaatataaaacacttgaatacaatcttactactacagaagtcgtgatggaaaacgttactgccttctgggaagaagggttcggagaactctttgaaaaagctaaacagaacaacaataatcgaaaaacttctaacggagatgattctctgtttttttccaatttctctctccttgggactccagttctgaaagatattaattttaagatcgaaagagggcagctgctcgccgtagctgggagtactggggcggggaaaacttctcttctaatggtgatcatgggagagctagagccctctgaagggaaaataaaacactccgggcgaatctctttctgttcacaattctcatggataatgcccgggacgataaaagaaaatatcatctttggggtgtcttatgatgaatatcgataccggtcagtaataaaggcttgccagttggaagaagacatatccaaattcgctgaaaaggataacattgtgttaggggaagggggaattactctctccggagggcagagagcaaggatctctttagctcgggccgtgtacaaagatgctgatctttatcttctggattcacccttcggatatctcgatgtattaactgaaaaggaaatcttcgaatcatgcgtgtgtaaactcatggcaaacaaaacgaggattttggtgacttctaaaatggaacatctcaaaaaagctgacaaaattctgatcctccacgaaggatcaagttatttctatgggacattttcggaactgcagaacctgcagccagatttcagtagtaaactgatggggtgtgatagtttcgatcagttctcagccgaacgacgaaatagtatacttacagaaacactccatcgctttagtcttgaaggagacgcacccgtgtcgtggactgaaacaaagaaacagtcattcaaacagactggggaatttggagagaaacggaaaaattctatcctgaatccaatcaattccattcggaaatttagtatagttcagaaaacgcccttacagatgaacggaatcgaggaagattctgacgaaccactagaaaggagactctcactcgtccctgactcagaacagggggaggcgatcttgccccggatctcggtgatatctacagggcctacgctgcaggcccggagaaggcagtcggttctcaacctcatgacacactcagttaaccagggacagaatatccatcggaaaacaacagcctctactcgcaaagtctctctcgccccacaggccaatctcactgaactggatatctactccagaaggttgtctcaggaaacaggactggaaatctctgaagaaatcaacgaagaagatctgaaagaatgcttctttgacgacatggaatctatacctgcggtaactacttggaacacatatcttcggtatatcactgtacacaaatcgctcatctttgtgcttatctggtgccttgtcatctttcttgccgaagtggctgcaagtttagtggtactatggctcctcggaaacactcctctccaggataaaggaaattccacacattcacggaataatagttatgctgttataattacttcgacttctagttactatgtcttttatatttatgtcggagtggccgatacattattggcaatggggtttttcagaggactccctctggtgcatactctcatcacagtgtccaaaatcctgcaccataaaatgttacattcagtgcttcaggcccctatgtcaactctcaacacacttaaagctggaggaatcctaaataggttctccaaggatatagccatcttagacgatttgctgcccctgactatattcgattttatccagctgctcctgatagtgataggggcaatcgccgtggtcgcagtgcttcagccttatatttttgtggctacagtgccagtaatcgttgcttttattatgctaagagcttattttttgcagacatctcagcaattaaaacaactggaatccgaaggaagatcacccatttttactcacctggttacttcacttaaaggattatggacactacgtgcttttggacgccaaccttactttgaaacactcttccacaaagccctaaatctgcacacggccaactggttcctgtacttatcgacacttcgatggttccagatgaggattgaaatgatatttgtaattttcttcattgccgttacattcatatcaatattaacaacaggggaaggagaaggaagggttggaatcatcctcactctggctatgaatattatgagtacactacagtgggctgtgaattcatctatcgatgtagattcccttatgcggtccgtgagtagagtgttcaaattcatcgatatgccaacagagggaaagcctacaaaatctacaaaaccctacaaaaatggacagctatctaaggtgatgatcatagagaactctcatgtcaagaaggacgacatttggccgagtggaggacagatgacagtaaaagatttaacagcgaagtacactgaagggggaaacgctatcctcgaaaacatctcgttttccataagtcctgggcagcgcgtagggctccttgggcgaacaggatcagggaaatcaactcttctaagtgcatttcttaggcttctcaatacagaaggagagatccagatagatggagtttcgtgggattctataactttacagcagtggcggaaggctttcggggtgattccgcagaaggtttttattttctctggaacatttcggaagaatctcgatccttacgaacagtggtctgatcaggagatttggaaagtggccgatgaagtgggacttaggtccgtgattgaacagttccctggaaagttagattttgtgctcgtggatggagggtgtgtgctttctcatggacataaacagctgatgtgtctagcccgctctgtcttatcaaaagctaaaatactgttgctcgatgaaccctcagcacacctggatcccgttacttatcagatcatcagacggacactgaaacaggctttcgctgattgcacagttatactatgcgagcaccgcatcgaggctatgctcgaatgccagcagtttctagttatagaagaaaacaaagtaaggcagtatgattctattcagaagttactgaatgaacggagtctcttcagacaggcgatatctcccagtgatcgcgtcaaactgttccctcacaggaatagttcaaaatgtaaatcaaagccacagattgctgccctgaaagaagaaacagaggaagaagtccaggatactcgactc

SEQ ID NO: 10149 - DNA, 4440 bp, synthetic construct
  misc_feature 1..4440: note = source = /note="Description of Artificial Sequence: Synthetic coding sequence"
  source 1..4440: mol_type = other DNA
atgcaacggagcccacttgaaaaggcgtccgtagtgtccaaactcttcttttcgtggaccaggccgatcctccgcaagggatatagacagaggctggaactgtccgacatctaccaaatcccgtcagtcgactctgccgacaatctgtccgaaaagctggaaagagagtgggatcgcgagttggcctctaagaagaatccgaaactgatcaacgcactgcggcgctgcttcttctggagatttatgttttacggaatcttcctctacctcggagaagtgaccaaggcggtccaaccactgctgttgggtcgaatcatcgcatcatacgacccagacaataaggaagagcgtagcatcgctatctacctcgggatcggactgtgcctgctgttcatcgtgagaacgttgctgctgcatccggcaatctttggactgcaccacattggaatgcaaatgcggatcgccatgttcagccttatctacaaaaagactctgaaactgtcgtcgcgggtgctggacaagatcagcatcggacagctggtgtccctgctgagcaataatcttaacaagtttgacgaaggactggcgttggctcacttcgtgtggatcgccccactgcaggtcgccctcctgatgggcctcatttgggaactcctgcaggcctcggcattttgcggccttggttttcttatcgtcctggcgctgttccaggcgggactcggaagaatgatgatgaagtaccgcgatcagcgggcaggtaaaatctcagaacgcttggtcatcacttcagaaatgatcgaaaacattcaatcggtgaaagcctactgctgggaggaggccatggagaagatgatcgagaatctgagacagactgaattgaagctgactcgaaaagccgcctacgttcggtacttcaattcctcagctttcttctttagcggcttttttgtggttttcctctcggtgctgccttacgccttgataaaaggaattatcctgcggaagatcttcactactatcagtttctgtatcgtgctgcgcatggccgtgactcggcaattcccgtgggccgtgcaaacctggtacgattcgctgggagcaatcaacaagatccaggactttcttcaaaaacaggagtacaagactttggaatacaacctcactacgactgaggttgtcatggagaatgtcaccgcattctgggaggaaggcttcggagagctcttcgaaaaggctaaacagaataacaataacaggaaaacttcaaacggtgacgattcgctcttcttctccaatttcagcctgcttggaaccccggttttgaaggacatcaacttcaagatcgaacgcggccaactgctggcagtggccggatccaccggcgcaggaaagacctccctgctgatggtgatcatgggcgaactcgagccgtcagaaggaaaaatcaagcactcaggacgcatcagtttctgctcgcagttttcgtggattatgcccggaaccattaaggagaacatcatcttcggagtctcgtacgatgaatacaggtacaggtcggtgatcaaggcctgccagctcgaagaagatatcagcaagttcgccgaaaaggataacatcgtactgggagaggggggcattactctctcaggagggcagagagctcggattagcctggcccgtgccgtgtacaaggatgccgatctgtatctcctcgattctccatttggctaccttgatgtgctgaccgaaaaggaaatcttcgaatcgtgtgtgtgtaagctcatggcaaacaagactcgcatcctggtcacgtcaaagatggagcacctgaagaaggctgacaagatcctgatactgcacgaagggtcaagctatttctacgggaccttcagcgaactgcaaaaccttcagcccgacttctcatcgaaactcatgggatgtgattcgttcgaccagttctcagccgagcgccgtaacagtattctgaccgaaaccctgcaccggttctccctcgaaggtgacgcccctgtgagctggacggaaaccaagaagcagtccttcaagcaaaccggggaattcggggagaaacgcaagaacagcattctcaacccgattaactcgattcgcaagttttcgatcgtccaaaaaaccccgctccagatgaacggcatcgaagaggatagcgacgaaccactggaacgcagattgtcactggtgccggattccgaacagggagaggctatcctgcctcgcatctcggtgatctccacgggtccaactctgcaagcccgccgcagacagagcgtgctgaacctgatgacccactccgtgaatcaggggcagaatatccacaggaaaaccaccgcgagcacccgcaaggtgtcgttggctccacaagctaatctgactgaactcgacatatactcgcggagactctcccaagaaaccggactcgaaattagcgaggagataaatgaggaagatctgaaagaatgtttctttgacgacatggaatccatccccgccgtcactacctggaacacctaccttagatacatcactgttcacaagtcgctcatctttgtcctgatctggtgcctcgtgatcttcctcgcagaggtagccgcgtccctggtggtgctgtggttgctcggaaacactccgctgcaggacaagggaaactctacccattcccgcaataacagctacgcggtgatcatcacctccacctcatcctattacgtcttttacatctacgtgggcgttgcggataccctgcttgccatgggatttttccgcggcctcccgctcgtgcacactctcatcactgtgagcaaaatcctgcatcataagatgctccactctgtactgcaggctccaatgtccactcttaacaccttgaaagcaggcggcatccttaacagattctcaaaagatatcgcaatcctggacgacctgctccctctgacgatcttcgatttcattcagctccttctcatcgtcattggcgcgattgcggtggtggccgtactgcaaccgtacatctttgtggctactgtcccggtcatcgtggccttcatcatgctgcgggcgtacttcctgcaaacttcgcagcagttgaagcaactcgaatccgaaggcaggtcccctatcttcacgcatcttgtgacctccctgaagggactctggaccctgcgcgcgttcggaaggcagccttatttcgagacgctcttccataaggccctcaatctgcataccgcaaattggttcctgtacctgagcactctgcggtggtttcaaatgcgcatcgagatgatcttcgtgatcttcttcatagcggtgacctttatctcaatcctcacgaccggtgaaggagaggggcgggtcggtatcattctgaccctggccatgaatatcatgtcaaccttgcagtgggccgtcaactcgtccatcgacgtggactcgctcatgcggtcggtgtctcgggtgttcaagttcattgacatgccaactgagggaaagcccactaagtccaccaagccatacaagaacggtcagctttccaaggtcatgatcatcgagaacagccatgtgaagaaggacgacatctggcctagcggtggacagatgactgtgaaagatctcacggccaagtacacggagggagggaacgctatcctggagaacatttcgttttcgatctcgccgggacagcgcgtcggactcctcggccgcactggatcgggaaaaagcactctcttgtccgcgttcctgagactgctcaacactgagggggagattcagatcgacggtgtctcttgggattccattacccttcagcagtggcggaaggccttcggggtgatcccgcagaaggtgttcattttcagcggcactttccggaagaacctggacccgtacgaacaatggtccgaccaagaaatctggaaagtggcggacgaggtgggactgcgctccgtgatcgaacagtttcccgggaagctggacttcgtgctggtggacggaggctgcgtccttagccacggtcataagcaactgatgtgcctggcaagatcagtcctcagtaaagcgaagatcctgctcctggatgagccgagcgcgcacctcgatccggtgacttaccagatcatcaggcggactctgaaacaagcgttcgctgattgcaccgtcattctctgcgagcatcggatcgaggcaatgcttgagtgccaacagttcctggtgatcgaggagaataaagtacggcagtacgactcgatccagaagttgttgaatgaaaggtcgcttttccgtcaggctatctcccccagcgatcgcgtcaaattgtttccacaccgcaacagttctaaatgcaagagcaagcctcagatcgcagcactgaaagaggaaaccgaagaagaagtgcaagacacccggttg

SEQ ID NO: 10150 - DNA, 4440 bp, synthetic construct
  misc_feature 1..4440: note = source = /note="Description of Artificial Sequence: Synthetic coding sequence"
  source 1..4440: mol_type = other DNA
atgcagaggagccctctggaaaaagcgtcggtcgtctcgaagctgtttttctcctggaccaggcccatcctccgcaaggggtacagacaacggctcgaacttagcgacatctaccagataccgtccgtcgactccgccgataacttgtcggagaagttggagagggaatgggaccgggaactggcatccaagaaaaacccgaagctcatcaatgccctgcgccgatgttttttctggagattcatgttttacgggatttttctctacctgggtgaagtaaccaaagcggtccaaccgctgctcctgggaaggatcatcgcgtcgtacgacccagacaacaaggaggaacgctccatcgcaatctacctcggaatcggtctgtgccttcttttcatcgtgcgcactctgctgctccatcctgctatcttcggactccatcatattggcatgcagatgcgcatcgccatgttttctctgatctacaagaaaaccttgaagctgtcaagccgcgtgctggataagatcagcattggtcaacttgtgtcacttctgtcgaataatctcaataagttcgacgaaggactggctcttgctcatttcgtgtggatcgcgccattgcaggtggccctcctgatgggactcatatgggaattgctccaggcctccgcgttctgcggactgggtttcctgattgtgctcgcactgtttcaggcgggattgggtagaatgatgatgaagtaccgggatcagagagccgggaaaatctccgagagactcgtcatcacttcagaaatgattgaaaacatccagtcggtcaaggcatattgctgggaggaagccatggagaaaatgatcgaaaacctgcgacagactgagctcaagctgaccagaaaagccgcgtacgtgcgctacttcaattcctcggcctttttcttctcgggattctttgtggtgttcctgagcgtcctgccttacgctctgatcaagggaattatcctgcgtaagatcttcactacgatatcattctgcatcgttcttaggatggccgtgacgcgccaattcccatgggcagtgcagacctggtacgactccctcggagccattaacaaaatccaggacttcttgcaaaaacaggaatacaaaaccttggaatacaatctgaccactacggaagtggtgatggagaatgtgaccgcgttctgggaggaaggattcggcgagttgttcgagaaggcgaagcagaacaacaacaatcggaaaacttctaatggagacgattcattgtttttctcgaacttcagcttgctcggaaccccggtcctgaaggacatcaacttcaaaatcgagcgcgggcaactcttggccgtggctggatcgaccggcgcgggaaagacctccctgcttatggtgattatgggggaactggagccgtcagagggaaaaatcaagcactcgggacgtatctcattctgctcgcagttttcgtggattatgccaggcaccattaaggagaacatcatctttggcgtgtcgtacgatgaataccgctaccgctcggtcatcaaggcatgccagctggaggaagatatcagcaagtttgcagagaaggataacatcgtcctgggtgagggcggaatcactttgtcgggaggacaacgggccaggatcagcctggccagagcagtttacaaggacgccgacctgtacttgctggactcgccgtttggctacctggatgtcctcaccgagaaggagatattcgaatcgtgtgtctgcaagctgatggctaataagacccgcatcctggtgacctctaagatggagcacctgaaaaaggctgacaagatcctcatcctgcacgaaggctcttcctacttctacgggaccttcagcgaactccagaacctgcagccggacttcagttcaaagctgatgggttgcgattcgttcgatcagttcagcgccgaaagacggaattcaatcctgactgaaactctccacagattcagtctcgagggtgacgcaccagtgagctggacggaaacgaaaaagcaatcgttcaagcaaactggggaattcggagagaaacgcaagaacagcatcctgaatcccatcaactcaattaggaagttttcgatcgtgcagaaaactccgctgcaaatgaacgggattgaagaggactcggacgagccgctcgagcgccgactctccttggtaccggattcggaacagggcgaagcaatcctgccgcgcatctcagtgatatcaaccggccctaccctgcaagcgcggcgcagacagtccgtgctcaacctgatgactcactcggtaaaccagggtcagaacatccaccgtaaaacgactgcatcgacgaggaaagtttcgctggctccgcaggctaacctcactgaactcgacatctacagccggcgcctcagccaggaaaccggactcgagatcagcgaggagattaacgaagaagatctgaaggagtgcttctttgatgatatggaatcgatccccgcagtgaccacttggaatacctatctcagatacatcacggttcacaagtcgctgatcttcgtcctgatctggtgtctggttatcttcttggccgaggtggccgcctcgctcgtggtgctttggctcttgggaaacaccccgctgcaggataagggaaactccactcactccaggaacaactcctacgcagtcatcattacctcgacttcctcctactacgtattctatatctacgtgggagtggcagatactcttcttgctatgggatttttcagaggcctgccgctggtgcatactctcatcaccgtgtctaagatcctgcaccacaagatgttgcattctgtgctgcaagctccaatgtcaactctgaacactctcaaggccggaggtattctgaaccggttttcaaaggatattgcaatcctcgacgacctcctcccgttgactatcttcgactttatccagctcctgctgatcgtcattggagccatagcagtcgtggccgtgttgcagccgtacatcttcgtggcaaccgtgccagtcatcgtggcgttcattatgctccgggcgtacttcctccaaacttcacaacagctgaaacaattggaatcagaaggacggtcgccgatctttactcatcttgtcaccagccttaagggcctgtggaccttgagggccttcggacgccagccatacttcgaaactcttttccacaaagccctcaatctgcacaccgccaactggttcctgtatctctccaccctccgctggtttcaaatgcggatcgaaatgatcttcgtgatcttcttcatcgctgtcacttttatcagcatcttgaccactggagaaggagaaggaagggtcgggattatcctgaccctggcaatgaatatcatgagcactctgcaatgggccgtgaactcgagcatcgatgtggactcactgatgcgctccgtctcgagagtgttcaaattcattgatatgccaaccgagggcaaaccaaccaagtcaactaagccgtacaagaatggccagctttccaaagtcatgatcatcgagaactcccatgtgaaaaaggacgacatctggccatccggaggacaaatgaccgtgaaggatctgactgctaagtacaccgaaggcggcaacgctattttggagaatatcagctttagcatatcaccaggtcagagggtcggactgctcggccgaacgggaagcggtaagtccacccttctcagcgccttcctgcggcttcttaataccgagggagagattcagattgacggggtgagctgggactccatcaccctccagcagtggcgcaaggctttcggcgtgatccctcaaaaggtgttcatcttctcaggcacgttccggaaaaacctggacccttacgaacaatggtcggaccaggaaatctggaaagttgcagacgaagtgggcctgaggagcgtgatcgagcagtttcctgggaagttggatttcgtgctcgttgacgggggttgcgttctttcacatgggcacaagcagctgatgtgcctggcgagaagcgttctgtcaaaggcgaagattctgctgctggacgaaccctccgcgcatctggatcccgtcacctaccaaatcatcagacggacgttgaagcaagcctttgcggactgtaccgtgatcttgtgcgaacaccggatcgaagctatgctggagtgtcagcagttcctggtcatcgaagagaataaagttcggcagtacgactcgatccagaagctcctgaatgaacgcagtctgttccgccaagccatcagtccgtccgatagagttaagctgtttccccaccggaactcgtcaaagtgcaaaagcaagcctcaaatcgcagctttgaaggaggagactgaagaagaggtgcaagatactagactg

SEQ ID NO: 10151 - DNA, 4440 bp, synthetic construct
  misc_feature 1..4440: note = source = /note="Description of Artificial Sequence: Synthetic coding sequence"
  source 1..4440: mol_type = other DNA
atgcaaaggagccccctggagaaggcatcagtcgtgtctaagttgttcttttcctggactagaccaattctgagaaaaggctacagacaaagacttgagctttccgacatttaccaaatcccatcggtcgactcggctgacaacctgtctgaaaagttggaacgcgaatgggatcgtgagctcgcaagcaagaaaaatcccaagttgattaatgcactccgccggtgtttcttttggcgcttcatgttctacgggatatttctttacctgggagaggtgaccaaggccgtgcagcctctgcttcttggaagaatcattgcatcgtacgacccagacaataaagaggaaaggagcattgcgatttacctggggattggactgtgccttctctttattgtgagaactttgctgctgcatcctgcaatcttcggactgcatcatattggaatgcagatgagaattgcaatgttctccttgatttacaaaaagaccctgaagctgtcgtcccgcgtgctcgacaagattagcattggtcaactcgtgtcactcctgtccaacaatctgaacaagtttgatgaaggcttggcactcgcgcactttgtctggatagcacctctgcaggtcgcactgcttatgggccttatctgggaactgctgcaggctagcgccttctgtggactgggatttcttatcgtgctcgccctgtttcaagctgggctgggaagaatgatgatgaaataccgggatcagcgggcaggcaagataagcgagaggctggtcatcacctcggagatgatcgagaatattcaaagcgtgaaggcatactgttgggaggaagcaatggaaaagatgattgagaatttgcgccagaccgaacttaagctcactagaaaggcggcctacgtgcggtacttcaactcgtcagcatttttcttctcagggttttttgtggtgttcctgtcagtgttgccctatgcgctgatcaagggtatcattctgcggaagatctttactaccatctcgttttgcattgtcctgcgcatggcagtcactcgccagtttccttgggctgtgcagacctggtacgattcccttggtgcaatcaacaaaattcaagattttcttcagaaacaagaatacaagactttggaatacaatctgactacgaccgaggtcgtcatggaaaacgtcaccgcgttctgggaggaggggtttggcgaactgtttgaaaaagcaaagcaaaacaacaacaatagaaagacgtcaaacggagatgattcgcttttcttttcgaacttttcgcttttgggcactccagtgttgaaggacattaacttcaagatcgagaggggacaacttctggcagtggcaggatcgaccggagcaggaaagactagccttctgatggtgataatgggggaacttgagccttcggagggcaagatcaagcattcgggcaggataagtttttgttcgcaattctcatggataatgcctggcactatcaaggaaaacatcatctttggtgtgtcctacgatgagtaccggtacaggtcggtcatcaaggcctgccaactggaggaagatatatcgaagtttgcggaaaaggataacattgtgctgggagaaggtggaatcacgctgagtggtggccagcgcgcgcgtattagcttggcccgagcagtgtataaggatgcagacctgtacctgcttgattccccctttggctacctggatgtgcttaccgagaaggaaatcttcgagtcttgcgtgtgtaagttgatggcgaacaaaactagaattctcgttacttctaaaatggagcatctcaagaaagccgataagattcttatcctccatgaaggttccagctacttctacggtactttttcggagcttcagaatctgcaacccgacttttcgagcaagctcatgggatgtgatagttttgatcaattttctgccgaacgccgcaactcgattctgaccgaaactcttcatagatttagccttgaaggtgatgcccccgtcagctggacggagactaagaagcaatcatttaagcaaactggagaatttggagaaaagagaaaaaacagcattctgaatcctatcaattccattcgcaagttttccattgtgcaaaagaccccactgcagatgaacggaattgaagaagatagcgatgaaccgctggaaagacgcctttcacttgtgcctgattcagaacagggagaagctattttgccgagaatctcggtcatctcgactggacctactcttcaagcaaggcggcggcagtccgtgctgaaccttatgacgcactcagtgaaccaaggccagaatattcatcggaaaactactgcatcgactagaaaggtttcgctggcaccccaggcaaatctgaccgaattggacatttactcacggcggctgtcacaggaaaccggtctggagattagcgaagagattaacgaagaagatctgaaagaatgcttctttgatgatatggagagcatacctgcagtgaccacctggaatacttatctccggtacataaccgtgcacaagagcctgatctttgtgctgatttggtgtcttgtgatttttctggcggaagttgcagcgtcgctggtggtgctttggctgttgggtaatactcctctccaggataagggaaattcgactcattccagaaacaactcctacgcagtcatcatcacctccacgagctcctactacgtgttttacatttacgttggagtcgcagacaccctcctggcaatggggttctttcgcggattgcctctggtgcatactctgattaccgtatctaagattctccaccacaaaatgctgcactcagtgctgcaagctcccatgtccacccttaacacccttaaggcaggcggaattttgaaccgattctccaaagacatagcgattctggatgatctgcttcctttgaccatttttgatttcattcagctcctcctgattgtgattggagcaatcgcagtcgtggcggtgctccaaccatacattttcgttgcaactgtgcctgtcattgtggcattcatcatgttgagagcatactttcttcaaacttcacaacaactgaagcaactggagtcggaaggaagatcaccgattttcacccatcttgtcacttccctgaaaggactctggactttgcgtgcattcgggcgacagccgtactttgaaaccctgtttcataaggccctgaatctgcacactgctaattggttcctgtatctgtcaactcttcggtggttccaaatgcgtattgaaatgatttttgttatcttcttcattgcggtgaccttcatttccatactcaccacgggggaaggtgaaggacgcgtgggaatcatcctcaccctggcgatgaacattatgtccactctccagtgggccgtcaactcgtcgattgacgtcgatagccttatgcgtagcgtgtctagggtgttcaaattcattgacatgccgacggaaggcaagcctactaaatccacgaaaccatacaaaaacggtcaactttctaaagtcatgattatcgaaaactcgcacgtgaaaaaagatgacatctggccgtcaggtggacagatgactgtgaaagatctcactgcaaaatacaccgaaggcggtaatgcaatcctggaaaacatctccttttcaattagcccaggacaacgcgtgggtttgcttggcaggactgggtcagggaagtcgacgcttttgtccgccttcctgagactcctgaatacggagggcgaaattcagattgatggcgtgtcgtgggactcgataactcttcagcagtggcgcaaggcttttggggtcattcctcagaaggttttcatcttttcaggcacctttcggaagaatctcgatccttacgagcaatggtcggatcaagaaatatggaaagtggcagatgaggtcggactccggtccgtgattgagcaattcccaggcaagttggatttcgtgctcgtggacggaggatgtgtgctgtcacacggtcataagcaacttatgtgtcttgcccgttccgtgctctcaaaggcaaagatactgctcctcgacgaaccttcagctcacctggacccggttacttaccagattatcagacggaccctcaagcaggcatttgcggactgtacggtcatactgtgtgaacatcgcatcgaagcgatgcttgaatgtcagcaatttctggtgattgaggaaaacaaggtgcgtcaatacgattccatacaaaagctcctgaacgagagatcgctttttaggcaggcaatctcaccttcggatcgggtgaagctctttccccacagaaactcgtcgaagtgcaaatccaagccacagattgcggcactcaaggaggaaaccgaggaggaagtgcaagatactcgcctc

SEQ ID NO: 10152 - DNA, 4440 bp, synthetic construct
  misc_feature 1..4440: note = source = /note="Description of Artificial Sequence: Synthetic coding sequence"
  source 1..4440: mol_type = other DNA
atgcagaggagtccactcgagaaggcttctgtggtgagcaagttgttcttttcatggacacgccctatcttgcgaaaggggtataggcagcgcctggagctgtcagacatttatcagatcccatcggtggattccgcagataacctgtccgagaagctggaacgggagtgggatcgcgaactggcgagcaagaaaaatccaaagctgattaatgcgctacgccggtgctttttttggcgatttatgttttacggaattttcttgtacctgggtgaagtaacgaaagcagtccaacctctcctgctggggcgcataattgcctcatatgacccagacaacaaggaagaacgtagcatcgcgatttatctgggcattggactgtgtcttctgttcatagttcgtacgttgctgcttcacccggccatcttcggtttacaccacatcggtatgcagatgcgcatagcaatgtttagcctaatctataaaaagacgctcaagctgagcagccgagtgctggacaagatcagcatcggtcaactggtgagcctgctctccaataaccttaataagtttgacgaaggtctggctctggctcatttcgtttggattgcgcctctccaggtggcgctactgatgggactgatttgggagctgctgcaggcgagcgcattttgcggactgggcttcctgatcgttttggcgctgtttcaggccggcctcggcagaatgatgatgaagtatcgcgaccagcgcgccggtaagatcagcgagagactggttatcaccagcgagatgattgagaacatccagagcgtcaaggcttactgctgggaagaggcaatggagaaaatgatagaaaatctgcgtcaaactgagctgaaactcacaaggaaggcggcctacgtcaggtatttcaactcaagcgcatttttctttagcggcttcttcgtcgtttttctgtcagttcttccttatgcgctgattaaaggtattattctgcgcaagatcttcaccacgatctcgttctgcattgtgttacgtatggccgtcactcgccagttcccctgggcggtccaaacttggtatgattccttgggcgccattaacaagattcaggatttcctccagaagcaggagtataagactttagagtataacctgacgactacggaggtcgtgatggagaatgtgactgcattttgggaggagggattcggcgaactctttgagaaggcaaagcagaacaacaacaatagaaaaacgagcaacggtgacgactccctgtttttctcgaactttagcctgctgggaacgccagttctgaaggatattaacttcaagatcgaacgcggccagcttctggcggtggcaggcagcacgggcgctgggaaaacttcgctgttaatggtgataatgggggaactggaaccgtcagaaggcaaaatcaagcacagcggtcgcattagcttctgtagccagttcagctggattatgcctggaaccatcaaagaaaatataattttcggagtgagttacgatgagtaccggtaccgctctgttattaaagcatgccagctggaggaagatatcagcaagttcgcagaaaaggacaacatagtcctgggcgagggaggcattacgcttagcgggggccagagagctcggatctcactggcgcgtgcagtctataaagatgcagatctttacctgttggattcaccgttcggttacctggatgtcctgacggaaaaggaaatttttgagagctgcgtttgcaagctgatggccaataagacgcgcatattggtgactagcaagatggaacatctgaaaaaggcggataagattctgattctgcacgaggggtcttcctatttctatggtacattttctgagctgcaaaacctgcaaccagatttttcaagcaaactgatgggctgcgatagcttcgatcagttctccgccgagagacgcaacagcatcctcacagagacgcttcaccgcttcagcttagaaggtgacgcgcccgtctcttggactgaaacaaaaaagcagtcctttaagcagactggcgaattcggcgagaagaggaagaattccattttgaacccaattaacagtattaggaagtttagcatcgtccaaaagaccccactgcaaatgaatggcattgaggaggattctgatgagccactggaacgtcgcctctcgctggtgccagacagcgagcaaggagaagcgatcctgccacgcatcagcgtgatcagcaccggcccgactctgcaggcgcgcaggcgtcagagcgtcctgaatctgatgactcattctgtgaaccagggtcagaacatccaccgtaaaacgactgcgagcacgagaaaagtatcgctggcgccacaggccaatctgaccgaactggatatttacagccgccggctgtctcaggagactggtctggaaatttcagaagagatcaacgaggaagacttgaaagagtgcttctttgacgacatggagtccattccagcggttaccacgtggaatacttatctccgctatattactgttcacaaaagcttaatcttcgttctgatctggtgtctggtgatcttcctcgcagaagttgcggcaagcctggttgtgctctggctgttgggcaacactccactccaggacaagggtaacagcacgcacagccgtaacaacagctacgctgtgattataacgagcacgagcagttactatgtcttctacatttacgtgggtgttgcggacaccctgcttgccatgggtttcttccggggcttaccactagtgcacacgctcatcacggtgtctaagatcttacaccacaagatgcttcatagcgtactgcaggcccctatgtcaaccttgaataccttgaaagccggtggaattctaaaccggttcagtaaagacatcgccatcctggatgatctgttgcctctcactatctttgattttatccagctgctgttaattgtaatcggggcaattgccgttgtggccgttctgcaaccgtatatattcgtcgctaccgtgccagttattgtggcgtttattatgctcagggcctattttctgcagacgtctcaacagctgaagcagctggaaagcgaaggtcgtagccctatcttcactcacctggttacgtccctcaagggtttgtggactctgcgcgccttcggccgccagccttactttgagaccctgttccacaaagctttaaatcttcacaccgcaaactggttcctgtatctgtctacactgcgatggtttcaaatgcgcattgagatgattttcgttatcttttttattgcagtgactttcatcagcatcctgactacgggagaaggtgagggtcgggtcggtataatcctgacgctggctatgaatattatgagtactctgcagtgggccgttaattccagcatcgacgttgatagcctgatgcgcagcgtttcccgcgtgtttaagtttattgacatgccgactgaaggtaaaccaacgaagagcaccaagccatataaaaacggccaactcagcaaagttatgatcattgagaattctcatgtcaaaaaggatgatatctggcctagcggtggccagatgactgtgaaagacttgacggccaagtacactgaggggggcaatgccatcctggaaaatattagcttcagcatctccccgggccaacgcgtcggcctgctggggcgcaccggtagcggtaagtccacactgctgagcgctttcttgcgcctgttgaatactgaaggggagattcaaatcgatggcgtgagctgggatagcatcacgctgcaacagtggcgaaaagccttcggggttattcctcaaaaggtgttcatcttcagcggaacattccgcaagaatctagacccgtacgagcagtggagcgaccaagaaatttggaaagttgctgacgaggttgggctacgcagcgtgattgagcagttcccaggcaagctggatttcgtcctcgtggacggcgggtgcgttcttagccatggtcataagcaacttatgtgcctggctcgcagcgtactaagcaaagcaaagattctcctgcttgacgagccttctgctcacctggacccagtcacgtatcaaataatccgtcgcaccctgaaacaggcatttgctgactgtacagttattctgtgcgaacatcgcatcgaggcaatgctagagtgccagcagttcctagtgatcgaggaaaataaagtacgtcagtacgattcaatccaaaaactgctgaacgaacgaagcctgtttcgccaagctatcagcccatcagacagggtgaaactgttcccacacaggaatagcagcaaatgtaagagcaagccgcaaattgccgccctgaaagaagagacggaagaagaagtgcaagatactcgcctt

SEQ ID NO: 10153 - DNA, 4440 bp, synthetic construct
  misc_feature 1..4440: note = source = /note="Description of Artificial Sequence: Synthetic coding sequence"
  source 1..4440: mol_type = other DNA
atgcagagatccccgctcgaaaaagcatccgtggtgagcaaattgtttttcagctggactagacctattcttcgcaaggggtaccgccagcggctcgaactctcggatatctaccaaattccttcggttgatagcgctgacaatctctcagagaaactggagcgcgaatgggatcgcgaactggcatcgaaaaagaatcctaagctcataaacgcgctgcgtagatgcttcttttggcgctttatgttctatgggatatttctttacctgggtgaggtgactaaggccgtccaacctcttcttctcggaaggattatagcctcctacgatcctgataacaaggaggaacgatccatcgccatttacctggggatcggtctgtgtttgctctttatagtgcggacccttctccttcatccagcaattttcgggctccaccatatcggaatgcaaatgcggattgctatgttttcgctcatctacaagaaaacgctgaaactttcgtcaagagtgctcgacaagatctcgataggacaattggtgtcgcttctctcaaataaccttaacaaattcgatgaaggcctcgcactggcccattttgtctggatcgcaccactgcaagtggcacttcttatgggcttgatttgggaactcctgcaggcgtccgccttttgtggacttgggtttcttatcgtactcgcgctttttcaggctggccttggaagaatgatgatgaaataccgggaccaaagggcgggtaagatatccgaaagacttgtgattacctccgaaatgatcgagaatattcagtccgtcaaggcgtattgttgggaagaagccatggaaaagatgattgaaaacctgcggcagaccgaactcaaacttacccgaaaggcggcatacgtgcgctacttcaactcctcggcattctttttctccggcttcttcgtggtgtttctgtccgtgctgccttacgcactgataaagggaatcatactccgcaagattttcaccacgatatcgttttgcattgtgcttagaatggcagtcacccgacagttcccatgggccgtgcaaacctggtacgactcactcggagcaatcaacaagattcaagactttttgcaaaagcaagaatacaaaacccttgaatacaatctcaccaccaccgaagtggtcatggagaatgtgaccgcattttgggaagaaggattcggagagctcttcgaaaaggcaaaacagaacaacaataacagaaagacgtcaaatggggatgactccctctttttcagtaatttctcgctgcttggaacgcctgtgctgaaggacattaactttaagatcgaacgcggacaactcctggcagttgcaggtagcactggtgctggtaagacttcgctgctgatggtgattatgggtgaacttgaaccttctgagggtaagattaagcattcgggtcggatatcattctgtagccagttttcctggatcatgcccggtaccattaaagagaacattatctttggagtgtcatacgacgagtatcggtaccgttcggttatcaaggcatgtcaactggaagaggatatttctaagtttgcagaaaaggataacatcgtgcttggagaaggtggaattaccctgtcgggtggccaacgggcaagaatatctcttgctcgggcagtctacaaggacgcagatctgtacctgctcgactcaccctttggatacctggacgtccttactgagaaagagattttcgaatcatgcgtgtgtaagctcatggcgaacaagacgcgaatcctggtgacttctaagatggaacatcttaagaaggccgacaagatactgatcctgcatgaaggctccagctacttctacgggactttttctgaacttcagaatctgcaacctgatttttcatccaaacttatggggtgtgattcgtttgaccaatttagcgccgaaaggcggaactccattctcactgaaacgctgcatagattttcacttgagggggacgctccagtatcctggactgagactaaaaagcagagctttaagcaaacgggagaatttggagagaagcgaaagaacagcattctcaatcccatcaatagcattcgaaagttttcaatcgtccagaaaaccccactgcaaatgaacggaattgaggaagattcggatgagccccttgagagacgcctgtccctcgtgcctgattccgagcagggtgaagccattttgccaagaatatcagtgatctcgaccgggcccacccttcaagcacgtaggaggcagagcgtccttaacctgatgacccactcggtgaaccagggccaaaacattcatcgcaaaactactgctagcacccgcaaggtaagccttgcaccacaggcaaacttgactgaattggacatctactcccggagactgtcacaggaaacgggccttgagattagcgaagagattaacgaagaggaccttaaggagtgcttttttgatgacatggagagcataccagccgtgactacctggaacacctaccttcggtacatcactgtgcacaaatccctgatcttcgtgctcatttggtgtctggtgatattcctggcagaagtggctgcgtccctggtggtcctttggcttctgggcaacaccccgctccaagataaggggaattcgactcacagccgaaacaactcctacgccgtcatcatcacttccacctcctcttactacgtattctacatctacgtgggagttgcggacaccttgcttgcaatgggctttttccgaggcctgcctctcgtccacacgctcattaccgtgtcgaagattctccatcataagatgctgcattcagtgcttcaagcaccaatgtcgacgctcaacaccctcaaggcgggcggaattctgaataggttttccaaggatattgcaatcctggatgatctgttgcccctgaccatttttgacttcattcagctgcttttgatagtcatcggcgcgatcgcagtcgtggcggtcctgcaaccttacatcttcgtggcaaccgtgccagtgattgtggcatttatcatgctgcgggcatatttccttcagacctcgcagcaacttaagcaactggagtcagaagggagatcacccattttcacgcacctggtcacgtccctgaaaggactttggacccttagagcattcgggcgccagccatacttcgaaacccttttccacaaggcactgaaccttcacaccgccaattggtttctctacctgagcaccctgagatggtttcagatgaggatcgagatgatcttcgtgatctttttcatcgcagtgaccttcatttcaattctgactactggagaaggggaagggcgggtgggaatcattctcacgctggctatgaacataatgtcgacccttcaatgggcagtgaacagttcaatcgatgtggattccctgatgagatccgtgtcaagagtctttaagttcatcgacatgccgacggaagggaaacccactaagagcacgaagccatacaagaatgggcagctttcgaaggtcatgattattgagaattcccatgtgaagaaagatgacatctggccttcaggtggccagatgaccgtaaaggatctcactgccaagtataccgaaggcggaaacgctatcctggagaacatatcatttagcatatcgccgggtcaacgcgtcggtctgctgggtcgtacggggtcgggaaagtcaactctgctgtcagcgttcctccgccttttgaacactgaaggagagattcaaattgatggagtctcgtgggattccattaccctgcagcaatggcgtaaagcctttggtgttatcccacaaaaagtgttcatcttttcgggaacttttagaaagaaccttgatccatacgaacaatggtccgatcaggaaatttggaaggtggcagacgaagtgggacttcgctccgtgatcgaacaatttccaggtaaactggattttgtgctggtggacggtggatgcgtgcttagccacgggcataaacaattgatgtgcttggcaagatcggtcctgtccaaggcgaaaatacttttgcttgatgagccctcggcacatcttgatcccgttacgtatcagattatccgtagaaccctgaaacaggcctttgcagattgtactgtgattctttgtgagcataggattgaagcaatgctggagtgtcaacaatttctggtgattgaagagaacaaggtgcggcaatacgattcgatccaaaaacttcttaatgaacggtcactttttagacaggcaatttcccccagtgaccgtgtgaagttgtttcctcatcggaattcatccaaatgtaaatcaaaaccacagattgcagctcttaaggaagaaactgaggaggaggtgcaggatactcgtttg

SEQ ID NO: 10154 - DNA, 4440 bp, synthetic construct
  misc_feature 1..4440: note = source = /note="Description of Artificial Sequence: Synthetic coding sequence"
  source 1..4440: mol_type = other DNA
atgcagaggagcccacttgagaaagctagcgtggtgagcaaactcttctttagctggacacggcccatcctgaggaaaggctatagacagcgcctggaacttagcgacatctatcagattccttctgtagactccgccgacaatttatctgagaagctggagcgggagtgggaccgtgagctggcctccaagaagaatcccaaactaataaatgccctcaggcgctgttttttctggcgctttatgttttacggaattttcctctatctgggggaagtaaccaaagccgtccaacccctgcttttagggcgtataatagcctcatatgatccagataataaagaggaacgcagtattgccatctatctgggcatcggcctgtgtcttctatttatcgttaggactctgctactacatccggctatttttggcctgcaccacatcggcatgcagatgcgtatcgccatgttttctttgatttataagaaaaccctcaagctgagttcaagagttctggataagatttcgatcggccagttagtctccttgctatcgaacaatctgaacaagtttgacgaaggccttgccctcgcccactttgtttggatcgctcccctccaggttgccctgcttatggggctgatctgggagctgcttcaggccagcgccttctgtggtttggggtttctcatcgtgctggctctcttccaagccggcctggggcggatgatgatgaagtatagagatcagcgggctggaaaaatcagcgaacgactcgtgattacctcagaaatgattgaaaatatccagtcagtgaaggcttattgctgggaagaggcaatggagaaaatgatcgagaatctcaggcaaactgagctcaaattgacgcgcaaagccgcatacgtgaggtactttaatagtagcgctttcttcttcagtggctttttcgtcgtgtttctgtccgtgttgccttatgctctgattaagggcatcatcctgcgaaagattttcactacgatctctttctgcatcgtgttgcggatggccgtgactcgacagtttccctgggctgttcagacttggtatgacagcctcggcgctatcaacaagatccaggatttcctgcagaagcaagagtacaagacattggagtacaacctgaccacaactgaggtagtgatggaaaacgtgaccgccttttgggaggaggggtttggtgagctgtttgagaaagcaaagcagaataacaacaataggaaaacatcgaatggagacgattcacttttctttagtaatttctctctattggggaccccagtccttaaggatataaatttcaagatcgagagaggacagctgctagccgtggccgggtccactggcgccgggaagaccagcctgttgatggttatcatgggcgaactagagccttccgaaggaaagatcaagcacagcggacgcatcagcttctgttcccagttttcgtggataatgcccggcacgatcaaggagaacattatcttcggcgtgagttacgatgagtacagatatcgaagcgtcatcaaggcctgtcagcttgaagaggatatcagcaagtttgcagaaaaagacaatatcgttctgggggagggtgggatcacgcttagcggtggacagcgtgccagaatctcactggcacgcgctgtgtataaggatgcggacctgtatctgctcgattccccttttggttatctcgatgtcctgacagaaaaggagatctttgaaagttgcgtatgtaagctgatggccaataagaccaggattctggtcactagcaagatggaacacctgaagaaggctgataagatcctaattcttcacgaaggcagctcatacttctacggaactttctctgagctccaaaacctacagcccgacttctcctctaagcttatgggttgtgacagctttgaccaattctcagcggagcgtagaaatagtattctgaccgagaccctccatcgattctctctcgagggtgacgccccggtgtcatggacagagactaagaagcagtcttttaaacaaacaggagagtttggcgagaaacggaagaatagcatcctgaaccccatcaatagcattcgtaaattttccatcgtacagaagaccccactgcagatgaacgggatcgaagaggattcagatgaacccttggagcggaggctgagcttagtccctgacagtgaacagggagaagcgattctgcctcgaatctctgttatatccaccggcccgaccctccaagcgagacggaggcaatcagtgcttaatctcatgactcactctgtcaatcagggacaaaacatccacagaaagacaactgcatccacacggaaagtgagtctggccccccaggcgaacctaaccgagctagatatctatagtcggcgtttgagccaagaaactgggcttgagatcagcgaagagatcaatgaagaggatcttaaggaatgtttcttcgacgatatggagtccatccccgctgtgaccacttggaacacttatctgcgatacatcacagtccataaatccttaatattcgttctgatttggtgtcttgtaatttttctcgcagaggtggccgcatccctcgttgtgttgtggctcctgggcaacacaccactccaagataagggcaacagtactcatagtaggaacaatagctatgctgttattattacctcaaccagttcttactacgttttctatatctacgtgggcgtggcagacaccttgctggcaatggggttcttcagagggctccccttggtgcacaccctgataacggtctccaagatcctacaccataagatgttgcatagtgtcttacaggcccctatgtctaccttgaatacactgaaagccggggggatactgaatagattctccaaagacatcgctatcctggatgacctgctgcccctgacaatctttgattttattcagctgcttctcattgtgatcggggcgatcgcagtcgtggcagtgttgcagccgtatatattcgtagctaccgtgcctgtgatcgtggcattcattatgctgcgagcttatttcctccagaccagccagcagttgaagcaactcgaaagcgaaggcaggtcacccatctttacacatctggtaactagtctcaaaggtttatggacattgagagccttcgggcgacagccatatttcgaaaccctgtttcacaaggccctgaacctccatacagccaactggttcctttacctatctactttaaggtggtttcagatgcgcatcgaaatgatcttcgtcattttcttcatagctgtgacatttataagcattctgaccaccggcgagggggaaggcagagtgggcattattctgacactggcaatgaacatcatgtcgaccttgcaatgggcagtcaattcgtccatcgacgtagactctttaatgaggtcagtgtctcgcgtgttcaaatttattgacatgcctacagagggtaaaccaacaaagtccaccaagccatacaagaacggccagctgagtaaggttatgattattgagaactcccacgtcaaaaaggacgacatatggccaagcggagggcagatgactgtgaaagatttaactgcaaaatatacagaaggtggcaacgcaatcctagagaacatcagcttctctatatcacctgggcagagggtgggactgttaggccggacagggtctgggaagagcacattgctgtcagcttttctccgtctcctgaacactgagggggagatacaaattgacggagtttcttgggatagcatcactctgcaacagtggaggaaggccttcggcgtcatcccccaaaaagtctttatcttctctggaacatttcgcaagaatttggatccttatgaacagtggtcggatcaggagatctggaaggtcgcagacgaggtagggttgcgcagtgttatcgagcagttccctgggaagctggacttcgtgctggtggatggtggctgcgtcctgtcacacgggcataagcagttgatgtgtctggcccgcagcgtcctgagcaaagccaaaattcttttgttggatgaaccttctgcccatcttgatcctgtgacctatcagatcatacgaaggaccttgaagcaagccttcgccgattgtaccgttatactgtgcgagcaccggatcgaggcaatgctggagtgtcagcagttcctggtgattgaggaaaacaaagtgcggcaatatgatagcattcagaagctgctgaacgaacggagtctgtttcggcaggcaatctccccatcagatcgggttaaactgttccctcatcgaaatagcagcaaatgtaagagcaagccccagattgctgccctgaaagaggaaacagaagaggaagttcaggacactcgactc

SEQ ID NO: 10155 - DNA, 4440 bp, synthetic construct
  misc_feature 1..4440: note = source = /note="Description of Artificial Sequence: Synthetic coding sequence"
  source 1..4440: mol_type = other DNA
atgcagcggagtccactggaaaaggcctccgtggtgagcaaactgttcttttcgtggactcgaccgatcttgcggaaaggctaccgccaaagactggaactgtcggacatctaccaaatcccatcagtggactcggcagataacctgtccgagaagctcgagcgcgaatgggaccgcgagctcgcctccaagaagaacccaaaactgatcaatgctctgcgccgctgctttttctggcggttcatgttctacgggatcttcctgtacctgggcgaagtgactaaggctgtgcaaccgctgctgctgggacggatcatagcctcatacgacccagacaacaaggaagaacgctccatcgccatctacctgggaatcggactgtgcctcttgtttatcgtgagaactctgttgctgcacccagctatctttggtctgcaccacatcggaatgcagatgcgtatagcgatgttctccctcatctacaaaaagaccctgaaactgagctcaagagtgctggataagatctccatcggacagctggtgtcactcctctccaacaatctcaacaaatttgatgagggactggctctggcccatttcgtgtggatcgccccactccaggtggcactgttgatgggactgatctgggaactgctccaagctagcgctttctgcggcctcggcttcctgattgtgctggcgttgtttcaggccggtcttggacggatgatgatgaagtaccgggatcagagggccggcaagatttccgaaaggctcgtgatcacctctgagatgattgagaatatccagtcggtcaaggcatactgttgggaagaggcaatggaaaagatgatcgagaacttgagacagaccgagctgaagctgacgcggaaagctgcatacgtgagatacttcaattcatcagcgtttttctttagcggctttttcgtggtctttctgtcagtcctgccatacgctctgatcaagggaatcatcctccggaagatcttcactactatctccttttgcatcgtgctgaggatggcggtaacccgccagtttccatgggccgtgcaaacgtggtacgattcactgggagccatcaacaaaatccaagacttcctgcagaaacaagaatacaagaccctggagtacaacctgactaccactgaagtcgtgatggagaacgtcactgctttctgggaagagggattcggagaactgtttgaaaaggcgaagcagaataacaacaatagaaagaccagcaatggagatgactcgttgtttttctcaaacttctcactgcttggaacccccgtcctgaaggacatcaatttcaaaatcgaaagaggacagctgctcgccgtggcaggctcgactggagcgggcaaaacctcgctgctcatggtgatcatgggagagctggagccttccgagggaaagatcaaacactcaggtagaatctctttctgttcgcagttcagctggatcatgccagggaccatcaaggaaaacatcatcttcggagtgagctacgatgaataccgttaccggtcggtcataaaggcatgccagctggaggaagatatcagcaaattcgccgagaaggacaacatcgtgcttggagagggaggtatcacgctgagcgggggacaacgcgcccgaatctccctggcacgcgctgtctacaaagacgctgatctgtacctcctggactcaccgtttggctacctcgatgtgcttaccgagaaggaaatcttcgaatcgtgtgtgtgcaagctgatggctaacaaaactagaatcctggtgacctcgaagatggagcacctgaagaaggccgacaagatccttatcctgcatgagggcagcagctacttctatggaaccttctccgagctgcagaatttgcaaccggacttctcgtcgaaactgatgggctgtgactcctttgaccagttcagcgcagaacgccgcaattcaattctgactgaaacgctgcatagattctccttggagggagatgcgcctgtcagctggaccgagacgaaaaaacagtccttcaagcagaccggagaatttggcgaaaaacggaagaactcgatccttaatccgatcaactcgatccgcaagttcagcatcgtgcagaaaacgccactccaaatgaatggaattgaggaggacagcgacgagccgctggaacgtaggttgagcttggtgccggactcagaacagggcgaggccattctgccgcggatctcggtgatttcaactgggccgacgctccaggcgagacggcgccagagcgtcctgaacctgatgacgcattccgtcaatcaaggacaaaacattcatcgcaaaactactgcctcgacgcggaaggtgtcccttgccccgcaggctaatctgaccgaactggacatctattcccgccgcctcagccaagaaactggacttgaaatctcggaagaaatcaacgaagaggacctgaaggagtgctttttcgacgatatggagtcaattcccgcagtcaccacgtggaacacctacctgcggtacatcactgtgcataaatcgctcattttcgtgttgatctggtgtctcgttatcttcttggcggaagtcgcagcgagccttgtcgtgctgtggctccttggaaatacccctttgcaggacaagggaaactcgacgcactctcgcaacaatagctacgcagtcatcatcacgtcgacttcgagctactacgtgttttacatctacgttggggtggctgataccctgctcgcaatgggcttcttccggggtttgcccctggtccacaccctgattaccgtatccaagatcctgcatcacaagatgctgcactcggtgctgcaggcgcccatgtcaaccctgaacactctgaaggcgggcggcatcctgaatcggttttccaaggatatcgccattctggatgacctcctcccgttgactattttcgacttcatccaactgctgcttatcgtcataggtgcgattgcagtcgtagccgttctgcagccttacattttcgtggcaaccgtccctgtcattgtcgctttcatcatgcttagggcttacttccttcagacttcgcaacaactcaagcagctggaatcggaggggcggtcgccgatcttcacgcacctcgtcacctcgctcaaagggctgtggactctgagagccttcgggaggcagccgtacttcgagactttgttccataaggcactgaacctgcacaccgccaattggttcctctatttgagcactctgcggtggttccagatgcgcatcgaaatgattttcgtgattttctttattgcagtgaccttcatctccattctcacgaccggagaaggggagggacgagtgggtatcatcctcactctcgcaatgaatatcatgtccaccctccagtgggccgttaatagttccattgatgtggattcgctgatgcgatccgtgtcacgcgtgttcaaattcattgacatgcccactgagggcaagccgacgaagtcgaccaagccttacaaaaatggacagctctcgaaggtgatgattatcgaaaactcgcatgtgaaaaaggacgatatctggcccagcggcgggcagatgaccgtcaaagacctcacggctaagtacaccgaagggggaaacgcaatcctcgagaatatcagcttcagcatcagcccaggtcagagagtcggactcctcggaagaacgggatcgggcaaatccactcttttgtcggcgttcctgcgcttgctgaataccgagggggagatccagatcgacggtgtctcttgggattcaatcaccctgcagcagtggcggaaagccttcggggtgatcccgcaaaaggtgttcatcttttccggaactttcaggaagaacttggatccgtatgagcagtggagcgaccaggaaatttggaaagtcgcggacgaggtggggctgagaagcgtgatcgaacagttccccgggaagctggactttgtgctcgtggacggaggatgcgttctgagccacggccacaagcagctcatgtgtctggcccggagcgtcctttccaaggccaagatcctcctgctcgacgagccgtcggcacacctggaccctgttacttaccagatcatcaggagaactctgaagcaggcgtttgcggactgcaccgtgattctgtgtgaacatcgcattgaagctatgctggaatgccagcagtttctggtgatcgaggaaaacaaagtgaggcagtacgactccattcagaagctgctgaacgaacggtcactgtttagacaagcaatcagccccagcgaccgcgtcaagctgttcccccacaggaattcatcgaagtgcaagtcaaagccccaaatcgcagcactgaaagaagaaaccgaggaagaagtccaggacactaggctg

SEQ ID NO: 10156 - DNA, 4440 bp, synthetic construct
  misc_feature 1..4440: note = source = /note="Description of Artificial Sequence: Synthetic coding sequence"
  source 1..4440: mol_type = other DNA
atgcagagatctccgttggaaaaagcttctgtggttagtaagctgttctttagctggacccggcctatactgcgtaaaggatatcgtcagcggcttgaattgtcggatatttatcagatacctagtgttgattcagccgacaacttgagcgaaaaacttgagcgtgagtgggacagagaactggcgagcaaaaagaatccgaaacttattaatgcacttcgcagatgctttttctggcgctttatgttttatggaatcttcttgtacttaggagaggtaactaaagctgttcaaccgcttctgctgggtagaatcattgcttcatacgatcctgataataaggaagagcgtagcattgccatctatttgggcattggcttatgtttattgtttatagtgcgtacgctattattacaccctgctatatttggcctacatcatataggaatgcaaatgcgaattgcgatgttttctctgatctataagaagacattgaaactgtcgtcacgtgtattagataaaatctccataggtcagctcgtatcattacttagtaataatttaaataaatttgatgagggattagcactggcccatttcgtatggatcgccccgttacaggtggccctgctaatgggcctgatctgggaattattacaggcttctgcattttgcggcttaggtttccttatcgtgcttgctctttttcaagctggcttaggccgaatgatgatgaagtatcgtgatcagcgcgcgggcaagatttccgagcgcctggtgattacgagcgaaatgatcgaaaacatccagagtgttaaagcgtattgctgggaggaggcaatggagaaaatgatagagaatctcaggcaaacggaattaaaacttacacgcaaagcagcgtatgttcgatattttaattcatccgcgttttttttttcaggattttttgtggtttttctgtcagtattaccgtatgcccttatcaaaggaatcattcttcgtaaaatttttacgacgatttcattttgtatcgttctgcgtatggcggtcacgcgacagtttccgtgggcagtgcagacatggtatgactcgctcggtgccatcaataaaatacaagacttcctgcaaaagcaggagtataagacattagaatacaatcttacaacaacagaagttgtcatggagaacgtgactgctttctgggaggaggggtttggcgagctttttgaaaaagcgaagcaaaataataataatcgtaaaacttctaacggggacgattctttgttcttttctaatttttcgttgctgggaacaccggttctaaaagatatcaattttaaaattgagcgtggccagttactggcagtcgcaggctctacaggcgccggtaaaaccagccttttaatggtcattatgggagaacttgaaccctctgagggaaagatcaagcatagcggccgaattagcttttgctcccagttttcatggataatgccaggaaccatcaaggaaaacatcatttttggagtgtcgtacgatgagtaccggtatcgttcagttatcaaagcttgccaacttgaggaagatatttcaaagtttgccgaaaaagacaatattgtcctgggtgaaggcggaattacactttcgggaggacagagggctcggatttcgttggcgcgcgcggtttataaagacgcagatctgtatttacttgattccccatttggttatttggatgttttaacggaaaaagaaattttcgaatcttgcgtgtgcaaactgatggctaacaagacgcgcattctggtcacttcgaaaatggaacacctgaaaaaagctgataaaatcctgatcctgcatgaaggaagttcctatttttatggcaccttttctgaattacagaacctgcaaccggactttagctctaaactcatgggatgtgatagcttcgaccagttctctgcagagaggcgcaattcgatcttgacagagacattgcatagatttagcctcgagggggatgcaccggtgtcttggacggaaacaaaaaaacaaagctttaaacagacaggggagttcggggagaaacggaagaattccatcctgaatcctattaacagcattcgcaagttttctattgttcaaaaaacacctttgcagatgaatggaatcgaggaagacagtgatgagcctttggaacggagattgtctcttgttccggattccgagcagggagaagccattcttcctcgtatctcagttatatcgactggtcctacactgcaagcaagacggagacagtcggttctaaacctgatgacacatagcgtgaaccaagggcagaacattcataggaaaacaaccgcatcaacccggaaggtttctttggcgccacaagcaaatttaacagagctggatatttatagtagacggctgtcacaagaaacaggtttggaaatttcagaagaaataaatgaggaagaccttaaagaatgcttttttgatgatatggagtctattccggctgtcacaacgtggaacacatatttacgttacattacagttcataaatcgcttatttttgtcttaatttggtgcctggtcatttttttggctgaagttgctgcgtcgcttgttgtcttatggttattaggtaatacacctttacaggacaagggcaacagtactcactcgcggaataattcttatgcagtgatcattacaagtacaagctcctattatgtattctatatctatgtgggagttgcagacacacttctggcgatggggtttttcagaggattaccgcttgtgcatacgctgattaccgttagcaaaatcctgcatcataaaatgctgcattcagtgttacaagccccgatgagtacgttaaataccttgaaagcgggcgggattcttaataggttttctaaagatattgcaatcctggatgatcttcttccgttgactatttttgattttatccaactactgctgatcgtgataggtgccatagccgtcgtcgcagtactgcagccttatatctttgttgccactgtgccagtgattgtagcattcattatgcttcgtgcttatttcctgcaaacatcacaacagttaaagcagctcgaatccgagggtagatctccgatttttacacatctggtcacatcgcttaaaggcctctggaccttacgagcctttggccgccaaccgtacttcgaaacgctctttcataaggcgttaaaccttcacacagccaattggtttttatacctgtccactcttcggtggtttcaaatgagaatcgagatgattttcgtgatcttttttattgccgttacatttatttctattttgacaacgggtgagggagaaggtagagttggcattatactaactctcgcaatgaatataatgtccacattacagtgggcagtgaacagttctattgacgtagactcacttatgcgcagcgtcagcagagtttttaagttcatcgacatgccgaccgaaggcaagccgacaaagtcgacaaaaccgtataaaaacggacagcttagcaaagttatgatcatagaaaattcccatgtaaaaaaagatgacatatggccatctggcggacaaatgacggttaaggatttaactgcaaaatacacagaaggaggcaatgcgatcttagagaatatctcgttctccatttcaccgggacagcgtgtaggcttattaggtcgcacaggctctggaaaatcaacacttctttcagcttttctgcgactgctcaacactgaaggagaaatccagatcgatggcgtctcttgggactctattacacttcagcagtggaggaaagcgtttggtgttattccacaaaaagtctttatttttagcggtacgtttagaaaaaatctggacccttacgaacaatggtcagatcaagaaatctggaaggtagcggatgaggtcggcctccggtcagtgatcgaacaatttccgggcaagttagattttgtgctggtagatggaggctgtgtacttagccatggccataaacaactgatgtgtcttgcgagaagcgtactttctaaggcgaaaatactgttacttgatgaaccgtcggcgcacctcgatccagttacctatcagattattcgacgcacacttaaacaggcatttgccgattgcacggtaatcctctgtgagcaccgtatcgaagctatgcttgaatgtcagcagtttcttgttattgaagagaacaaagtgagacaatatgactctatccagaaattattaaacgaaagatcgctttttagacaggcaatctctccaagtgacagagttaagctcttcccacatcggaactctagcaaatgtaagtctaagccgcagattgcagcccttaaagaagaaacagaggaagaggttcaggatacacgcctc

SEQ ID NO: 10157 - DNA, 4440 bp, synthetic construct
  misc_feature 1..4440: note = source = /note="Description of Artificial Sequence: Synthetic coding sequence"
  source 1..4440: mol_type = other DNA
atgcagagatctcccctcgaaaaagcctctgtggtgtcaaaactgtttttttcctggacgcgtcccattctgcgtaagggttataggcagcggcttgagctcagtgatatataccagattcctagcgtggattcagccgataatctttctgaaaaactggagcgcgaatgggaccgagaattggcatccaaaaaaaatccaaaactgataaacgcactcaggagatgtttcttctggcgctttatgttctacgggatttttttataccttggcgaagtcacaaaagcagtgcaacccctcctactcgggcgcatcatagcctcttacgatccagataataaagaagaacgatccatagctatatatctcggaataggcctgtgcctgctgttcattgttcggaccctcttactgcatcccgctatcttcggattgcaccacataggcatgcagatgagaatcgcaatgtttagtttaatttataagaagactctgaagctttcatcacgcgtcctcgataagattagtatcgggcagctggtctccctcttgtcaaacaacctgaataagtttgatgaaggactggccttggctcatttcgtgtggattgcaccgcttcaggtcgcactgcttatgggtttgatttgggagctgctacaggctagtgccttctgcgggctcggtttccttatcgtgctagcacttttccaggccggtctggggagaatgatgatgaagtatcgggatcaaagagccgggaagatctcagagcgcctcgttataacttctgaaatgatagaaaacatccagtctgtgaaggcctactgttgggaagaggccatggaaaagatgatcgagaaccttcggcagacagagctgaaactgaccagaaaggccgcctatgtgagatactttaactcatcagcttttttcttcagcgggttcttcgtcgtcttcttgtctgtgctgccttatgcgctgattaaggggataatcctgagaaaaatctttactaccatctcattctgcatcgtcctccggatggctgtcaccaggcagttcccttgggccgtccagacgtggtacgacagccttggcgctatcaataagatccaggattttcttcagaagcaggaatacaagaccctggagtacaatctgaccaccactgaggttgttatggaaaacgttaccgccttttgggaggagggatttggagagctgttcgaaaaagctaagcagaacaataacaaccgaaaaacttccaacggagacgacagcttattcttttcaaatttctccctcctgggaacacccgtgctcaaggacattaacttcaagatagaacgagggcagctgctcgcagtggcagggtcaaccggcgccgggaaaacaagcttactgatggtcatcatgggggagttagagccctcagaaggaaagattaagcactccggccgaatttccttttgttctcagttctcatggatcatgcccgggaccataaaggagaatattattttcggtgtttcatacgatgagtaccgctatcggagtgtcatcaaggcatgtcagctggaagaggacatttctaagttcgccgagaaggacaatattgtcctcggagagggaggcatcacattgtccggaggtcaacgagcacggatcagtcttgctcgtgcagtgtataaagatgccgatctttacctgttggattctccattcgggtaccttgacgtcctcaccgagaaggagattttcgagtcctgcgtatgcaagttaatggctaacaagacccggatccttgttactagcaaaatggagcatctaaagaaggctgacaagattctgattctgcatgaagggtcctcctacttttatggtaccttttctgaactacaaaacctgcaacccgactttagctccaagcttatggggtgtgattcctttgaccagttctcagccgaaaggaggaactccatcctaactgaaacccttcatcgtttcagtctcgaaggcgacgccccagtctcatggacagagacaaagaagcagtcttttaaacagaccggcgagttcggggagaagagaaaaaacagtatcctgaacccaatcaattctattcgaaagttcagcatagtgcagaagacaccacttcagatgaacggaatagaggaagactccgacgagcctcttgaacgcagactctctctagtcccggactcggaacagggtgaagctattctgcctcgcatctcagtgattagtaccggacctaccctgcaagccagaaggagacagtcggtgctcaacctcatgacccattccgtgaatcagggccaaaacatccataggaaaacgacagcgtcgacacgcaaggtttccctcgccccccaggctaatctcactgaactcgacatatatagccggcgacttagtcaggaaactggtttagaaattagcgaagagattaacgaagaggatcttaaggagtgcttctttgacgacatggagtccattcctgccgttacaacatggaatacttacctgcgatacatcactgtgcacaagagtttgatcttcgtgctcatttggtgtctcgtgattttcctcgcagaggtggcggccagtctcgtggtgctctggctgcttggaaacaccccattacaggacaaggggaacagtacccactccaggaacaactcgtacgctgtgattatcacttcaaccagcagttactacgtattctatatttatgtcggcgtggcagatacactcctggcaatgggtttttttaggggcttgccgctggtgcacacactcataacagtttctaagatcctgcaccataagatgctgcactcagtgctccaggcacctatgtcgacactgaacactcttaaggcaggagggattctgaatagattctcaaaggacattgcaatcctggacgatttgctccccctgactatcttcgacttcattcagctcctgcttattgtgattggggccatagctgtggtggcggtgttgcagccatacattttcgtggctaccgtcccagtgattgtggcgtttatcatgctaagagcgtacttcctccagacttcccagcagcttaagcagctggaatccgaaggacggtcaccaatcttcacgcatctggttacctcactgaaggggctttggactctccgagccttcggccgtcagccctattttgagaccctgtttcataaagcactcaacctccacaccgccaattggttcctttatctgtctaccctcaggtggttccagatgcggatcgagatgatttttgtgattttctttattgccgtgacctttataagcatcctgaccacgggagagggggaaggacgggtgggcattattttgaccttggccatgaacattatgagtactcttcaatgggccgttaactcctcaatcgatgtcgactcactcatgcgctctgtgtcccgagtctttaaattcatcgatatgccaacggagggcaagccaacaaagtccacaaaaccttacaaaaacggccaactatcaaaagtaatgatcattgagaactctcacgtgaagaaagacgacatttggccctccggagggcagatgactgtgaaggacctgaccgctaaatacacagaagggggtaatgccattctggagaatatatctttctccatctctccgggacagcgcgtggggctcctgggcaggaccggctctggcaagagtacccttctgagcgcctttctgcggctgctgaataccgagggcgaaatacaaatagacggtgtgtcatgggactccattactcttcaacagtggcgcaaagctttcggagtgatccctcagaaggtgttcatcttttctgggacgttccgtaagaatttggacccctacgaacagtggagcgatcaggagatttggaaagttgcagacgaggtggggctgcgatccgtaatcgagcagttcccaggcaaacttgattttgtcctggtcgacggcgggtgcgtgttgagccatgggcacaaacagctgatgtgcctcgcccggtccgtcctaagtaaagccaagattctactattagacgagccttctgcgcatctcgaccctgtaacatatcagatcattcgcagaacgttgaagcaagcctttgccgactgtacagtgatattgtgcgagcaccggatcgaggcaatgcttgaatgtcaacagtttctcgttatcgaggaaaataaggtcagacaatatgattctattcaaaagctgctgaatgaacggtctctgtttcggcaggccatttctcctagtgatagagtgaagttgttcccccacaggaacagtagtaagtgcaagagcaaaccacagattgccgctctgaaggaggagactgaggaggaggtgcaagacacccgattg

SEQ ID NO: 10158 - DNA, 4440 bp, synthetic construct
  misc_feature 1..4440: note = source = /note="Description of Artificial Sequence: Synthetic coding sequence"
  source 1..4440: mol_type = other DNA
atgcagagatccccgctggagaaagcatccgtggtgtccaaactcttcttttcctggaccagacctattttgcgaaagggatacaggcaaagacttgagctgtcggacatttaccaaatcccctctgtggatagcgccgataatctctccgaaaaacttgaaagggagtgggacagggaacttgccagcaaaaagaacccaaaactgatcaacgcgctgcggcggtgtttcttttggcgttttatgttttacggtatctttctttacctcggagaagtgactaaagcagtgcaacctttgctccttggccgcattatcgcctcatacgatcctgacaacaaggaagagaggtcgattgccatctacctcggtataggactttgcctcttgtttatcgttagaactctgcttctccaccctgcaatctttggactccaccatatcggcatgcaaatgaggatagcaatgttctcgttgatttacaagaaaaccctgaagctgtcgagccgcgttcttgataagatctccatcggacagctggtgtccctcctgagcaacaacctgaacaagtttgatgagggacttgcactggcccactttgtttggattgcgccactccaggtcgcactgttgatgggcttgatctgggaactcctccaagcgtctgccttttgcgggctgggttttctgattgtcctcgccctttttcaagccggacttgggcgcatgatgatgaagtacagggatcagagggcgggtaagattagcgagcgccttgtcataaccagcgaaatgattgagaacatccagagcgtcaaggcatactgctgggaagaggcaatggaaaagatgatcgaaaatctgcgtcaaactgaattgaagttgactagaaaagcagcgtacgtgagatacttcaattcgtcggcattcttcttttcgggcttttttgtcgtattcctttccgtgcttccctacgcactgatcaaggggattattctgcggaagattttcacgactatttctttttgtattgtattgagaatggcagtcacccgtcaattcccatgggctgtgcaaacctggtacgattcgctgggggcaataaacaagatccaggatttcttgcagaagcaagaatacaagacgcttgagtacaatctcaccactaccgaagtggtgatggagaacgtgacggcattttgggaagaaggcttcggagaactgttcgaaaaggcgaaacaaaacaataacaacaggaaaacgtcgaatggcgacgattccctgtttttcagcaacttctcactcctcggaacccctgtgcttaaggatatcaatttcaagatcgaacgcggacaacttctggcagtggcagggtccacgggtgcaggcaagacgtcactgctcatggtcataatgggagagcttgaaccttctgaaggaaagatcaagcacagcgggcgaattagcttttgttcccaattctcgtggattatgccaggtaccataaaggaaaacataatcttcggcgtgagctacgacgaatacagatataggagtgtgattaaggcatgtcagcttgaagaagatatctcgaagttcgcagagaaggataacatcgtccttggagaggggggaatcactctgtcaggaggtcagcgagcacggataagtttggcaagggccgtctacaaagatgcggatctctacctgcttgattccccttttggctacctggatgtgctgacggaaaaggaaatctttgagtcgtgcgtgtgtaaactgatggccaataagactagaattctggtaaccagcaagatggagcatctcaagaaggcggataagattcttattcttcacgagggatcgtcctacttttacgggacgtttagcgagttgcagaatctccagcctgatttctcctcaaagctcatggggtgtgactcatttgatcaattttcggcggaacggaggaacagcatacttactgaaactcttcataggttttcgctggagggtgacgcgcctgtctcttggactgaaactaagaagcagagctttaagcagacgggagaattcggtgaaaaaaggaaaaactcgattcttaacccgattaactcgatccggaaattctcaattgtgcaaaagacgcctcttcagatgaatggtatcgaagaagattcggatgaacctctggagcgcagactgagccttgtgcccgatagcgagcaaggagaagcgatactgcctcgcatcagcgtgatttccaccggaccaaccctccaggcacgccggagacagtcggtgcttaacctgatgactcactcggtcaatcaggggcagaacattcatcgaaaaacgactgcttcgacccggaaagtctcccttgcacctcaggccaatctgacggaactcgatatctactcgcggcgcctgtcgcaagaaaccggacttgagattagcgaagagattaacgaagaggaccttaaggagtgcttttttgacgacatggaatccatacccgcagtgaccacctggaatacctaccttcgatatatcaccgtacacaagtccctgatttttgtgcttatttggtgccttgtcatttttctggcagaagtcgcggcatccctggtggtcctgtggcttcttgggaatactccactccaagacaaaggcaactccactcattcacggaacaactcctatgcagtgatcattacctcgacctcgtcttactacgtgttttacatttacgtgggagttgcagataccctccttgcaatgggattcttcagaggactgccactggtgcataccctgatcaccgtctcgaaaatactgcatcacaagatgcttcattcagtgctccaagcaccaatgtccacccttaacactctgaaagctggtggaatcctcaatagatttagcaaggacattgccatactggacgaccttcttcccctgactatctttgactttattcagctccttcttatcgtcatcggagcaatagccgtggtggccgtgctgcagccctacatcttcgtggccaccgtcccagtgattgtggccttcattatgctcagggcttacttcctgcagacctcgcaacagcttaagcaactcgagagcgaagggcgtagccccattttcacccacctggtcacgtccctgaaaggtctgtggaccctgcgcgcctttggacggcaaccttactttgaaactctgtttcataaggcgttgaacctgcataccgcaaattggtttctttacctgtcgactctccggtggttccagatgcgtattgaaatgattttcgtgatattctttattgcagtgactttcatttccattcttactactggtgagggtgaaggacgcgtcggtattatcctgacccttgcgatgaacataatgagcaccctgcaatgggcggtcaattcgagtattgatgtcgactcgctgatgagatccgtgagccgggtgtttaagtttatagacatgccaacggaagggaaaccaaccaagtcaaccaaaccttataagaacggacagctcagcaaggttatgatcatcgaaaacagccacgtgaagaaagacgatatttggccttccggaggtcaaatgacggttaaggatctcaccgcaaagtacaccgagggaggcaatgcaatccttgaaaacatctccttctcaatatcacccggccagcgcgtgggtctgctgggtagaactggctcgggtaagtcgactcttctttcagcatttctccgccttctcaacaccgaaggggaaattcagattgatggggtttcctgggattcaattacgctccaacaatggcggaaggcttttggcgtgatccctcaaaaagtctttatcttttcggggacgttccgtaagaacctggatccatacgagcaatggtcagatcaagagatctggaaggtggccgatgaagtggggctgcgctcagtgatcgaacagtttccgggaaagctggatttcgtcctcgtggatggcggttgtgtgctgtcccacggacataagcagcttatgtgtcttgcaagaagcgtcctctctaaagcgaagatacttttgcttgatgaaccgtcggcacatcttgacccggtgacctatcaaatcatccgccggactcttaagcaagcgtttgcggactgtaccgtgatattgtgcgagcatcgcattgaggcaatgctggaatgtcaacaatttctggttatagaagagaataaggtgcgtcaatacgactcaatacagaaattgctcaacgagcgctccctctttaggcaagcaatttccccgagcgacagggtgaagctgttcccccatagaaattcatcaaaatgtaaatccaaaccacaaatcgctgccctcaaggaagaaaccgaagaggaagtccaggacactcgcctt

SEQ ID NO: 10159 - DNA, 4440 bp, synthetic construct
  misc_feature 1..4440: note = source = /note="Description of Artificial Sequence: Synthetic coding sequence"
  source 1..4440: mol_type = other DNA
atgcagcgaagcccgctggaaaaagcgtcggtggtgtcgaaactgttcttctcgtggactcggccaatcttgaggaaaggttacagacagcgtctggaactcagcgacatctaccaaattccaagcgtggattccgcagacaatctctctgagaaactcgaacgcgagtgggatagagaactcgcttcaaagaagaaccctaaactcataaacgcgctgagacgatgctttttctggaggttcatgttctacggaatctttctgtacctgggtgaggttacgaaggccgtgcagccacttctcctcggacggatcatcgcgtcgtacgatccggacaacaaggaggaacgcagcatcgccatctatctggggattggactctgtctgctctttatcgtccgcacgctgctgctgcatccagccatcttcggcctccaccacatcggaatgcaaatgcgcatcgccatgttcagcttgatctacaaaaagactctgaagctcagctcccgcgtgctggacaagatttcgatcgggcagctggtgtcgctgctgtcaaataacctgaataagttcgacgagggactggcactggcccatttcgtctggatcgccccactgcaggtggcgctgctgatgggcctcatctgggagctgctccaggcgtcggctttctgcggtctgggtttcttgatagtcctggccctgttccaggcgggactcggccgcatgatgatgaagtaccgggaccagcgcgccggtaagatctcggaacggctcgtcatcacgagcgaaatgatcgagaacatccagtcagtgaaggcgtactgttgggaagaagctatggagaagatgattgagaacctgagacaaaccgagctgaaacttactcggaaggcagcttacgtgcgctatttcaactcctcagccttcttcttctccggattcttcgtggtgttcctctcggtcttgccgtacgccctcatcaagggaatcatcctgcgcaagatctttaccactatcagcttttgcatcgtgctgcggatggccgtgactagacagttcccgtgggccgtgcagacctggtacgactccttgggggccatcaacaaaatccaagacttccttcagaagcaggaatacaagaccctggagtacaacttgactactactgaagtcgtgatggaaaatgtcactgcgttttgggaagaaggattcggggagttgtttgagaaagctaaacaaaacaacaacaaccggaaaacctccaatggggatgactccctcttcttctccaatttctccctgctcggaactccagtgctgaaggatatcaactttaagatcgagcgcggacaactgctggccgtcgctggatcaactggagctggcaagacttccctgcttatggtgattatgggcgaactggaacctagcgagggaaaaatcaagcattcgggacgcatttccttctgcagccagttcagctggattatgcccgggaccatcaaagaaaacatcatctttggagtctcctacgacgaatacaggtaccgatcggtcatcaaggcctgccagctggaagaggacatctcaaagttcgcggaaaaagacaacatcgtccttggagaaggcggaatcactctgagcggaggtcagagagccagaatatccttggctcgggcagtgtataaggatgccgacctgtatcttcttgactcccctttcggttacctcgacgtgcttactgaaaaggagatcttcgaatcatgcgtctgcaagttgatggccaacaaaacccgcattctggttacttcgaagatggagcaccttaagaaagctgataagatccttatcctccacgaggggagctcctacttctacggcaccttctctgagctgcagaatttgcaaccagatttctcgtcgaagctgatggggtgcgactcgttcgaccagttctcggctgaacggaggaactcgatcctgacggaaaccctgcatagattctcgctggaaggggatgccccagtgagctggaccgagactaagaaacagtccttcaagcagactggggagtttggggagaaacgcaagaattccatcttgaacccgatcaactcaattaggaaattctccatcgtgcaaaaaactccgttgcagatgaatggaatagaagaggattccgacgagcctttggagcgcaggctctccctggttcccgactccgaacagggcgaagccatcctcccgcgcattagcgtgatctcgaccggcccaactctgcaagcccgccggcgccagtcagtcttgaacctgatgactcactcagtcaaccagggccaaaacattcaccggaaaaccaccgcatcgacgagaaaggtgagcctggcccctcaagccaacctgactgaactggatatctactcccggaggctttcacaagaaaccggactggaaatctccgaggaaatcaacgaagaagatctcaaagagtgcttcttcgacgatatggaatctatcccagccgtgaccacctggaatacgtatctgcgctacatcactgtccacaagtccctcatttttgtccttatttggtgcctcgtgatcttcctggcagaagtggccgcatcccttgtggtgctctggctcttgggaaataccccactccaagacaaggggaacagcacccactcgcggaataactcgtacgcggtcatcatcacctcgactagctcgtactacgtgttctacatctatgtgggagtggccgatacgctgttggctatgggtttctttaggggactgccgcttgtgcacactctcatcactgtctcgaagatcctccatcataagatgctgcactccgtccttcaagcccctatgagcactctgaataccctcaaagctggagggatcctgaacagattcagcaaagacattgcgatcctcgacgacctgctccccctcaccattttcgactttatccagttgttgcttatcgtgatcggagctattgcagtcgtcgccgtgctccagccatacatcttcgtggcaaccgttcccgtgatcgtggcgtttatcatgctccgcgcctacttcttgcaaacctcccaacaactcaaacagctggaatcggagggtcgctccccgatcttcactcatctcgtgacttccctcaagggactctggaccctgcgcgcctttggcagacaaccgtactttgaaacccttttccacaaggcgctcaatctgcataccgccaattggttcctgtacctctcaactttgcgatggttccagatgcgcatcgaaatgatcttcgtcatattctttatcgccgtgacctttatctcaatattgactactggtgaaggagaaggccgcgtcggaattatccttactctggctatgaacatcatgagcactctccagtgggcggtcaactccagcatcgatgtcgactcgctgatgcgcagcgtgtcgcgggtgttcaagttcatcgacatgccgaccgaaggaaagccgaccaagtctaccaagccctacaagaacggccagctttcgaaggtgatgatcatcgaaaacagccacgtgaagaaggatgacatttggcctagcggtggacagatgaccgttaaggacctgactgcgaaatacactgaaggagggaacgccatcctcgagaacatctcgttcagcatctctcctggacagcgggtggggctgcttggaaggaccggatcgggaaaatcgaccctgttgagcgcatttctccgactgcttaacaccgagggagagatccagatcgatggggtgtcgtgggactcgattaccctgcagcaatggcggaaagcattcggcgtgattccgcagaaggtgttcatcttttcgggaactttccgcaagaatctcgatccgtacgagcagtggtcagaccaagaaatctggaaggtggccgatgaagtgggcctgcgttcagtcatcgagcagttccctggcaagttggacttcgtgctggtcgacggaggctgcgttctgtctcacggccacaaacaactgatgtgcctcgcgcggtccgtgctgtccaaagcaaaaatcctgctccttgacgagccgtcggcgcacctggatccggtgacgtatcagatcatccggagaaccctgaagcaggccttcgcagattgtactgtgatcctttgcgaacatcgaatcgaggccatgctggagtgccaacagtttctggtcatcgaggagaacaaggtgagacagtacgactcaatccaaaagctgctgaacgaaaggtcactttttcgccaggccatctcaccatccgatcgagtcaaactcttcccacatcgcaactcctccaagtgcaagtcgaagccgcagatcgctgcactgaaggaagagactgaagaagaagtccaggacacccgcttg

SEQ ID NO: 10160 - DNA, 4440 bp, synthetic construct
  misc_feature 1..4440: note = source = /note="Description of Artificial Sequence: Synthetic coding sequence"
  source 1..4440: mol_type = other DNA
atgcagaggtctcccctggagaaagcatctgttgttagtaagctgttctttagttggactcgccccatattacgtaaggggtaccggcaacggttggagctttcagacatttaccaaattccctcagttgactcagctgataatctgtccgaaaagctagagcgagaatgggacagggagctggctagcaaaaagaaccctaaactgattaacgcactacgtaggtgttttttttggcgattcatgttttacgggatttttctctatctgggggaggtgactaaggccgttcagcctctcctgctgggacggattatcgcaagttacgaccctgataacaaagaggaaagatccatcgctatatacttgggcattggtctatgcttactattcatcgtgaggaccctcctcctgcaccctgccatcttcggcttacatcacataggcatgcagatgaggatcgccatgttttctcttatatacaagaagaccctcaaactatccagcagggtgctcgataaaatctccatcggtcaattagtttccctgctgagtaacaatctaaacaaatttgacgagggtctagccctagcacactttgtttggattgcccctctgcaggtggcactgcttatgggacttatttgggagctgctgcaagcctctgcattttgtgggctgggcttccttattgtgctcgctttgtttcaagctggtcttggtcggatgatgatgaaatatagggaccagagagcaggtaaaatctccgaacgtctggtgataacctccgagatgatcgaaaatatccaaagcgtcaaagcctactgttgggaggaggcaatggagaagatgatagagaatctccgccagaccgaactaaagctaacaaggaaggccgcatacgtgagatatttcaattcttctgctttcttcttttcaggtttctttgtagtgttcctctctgtgctgccatatgcactgatcaaggggatcatactgcgcaagatctttactacaattagcttttgtatcgtgctgagaatggccgtcactaggcagtttccttgggctgtgcagacttggtacgactctctgggcgccataaacaagatccaggatttcttacagaagcaggagtataaaaccttagagtacaatctgaccaccactgaggttgttatggagaacgtcacagccttttgggaggaggggtttggagaactgttcgagaaggcaaagcaaaacaacaacaaccgtaagacctctaacggtgacgatagtctattcttcagtaattttagcctgctaggcacccccgtgctgaaggacatcaacttcaagatcgaacggggccagctattggctgtcgccggttcaaccggtgcaggaaagacttccctgctgatggtgataatgggggagctggagccatccgagggcaagataaaacattctgggaggatttccttctgcagccaatttagttggatcatgccaggcacaattaaggaaaacatcatctttggcgtttcttatgatgagtatcgctataggagcgttatcaaggcctgtcaattagaggaagatatctccaagtttgccgaaaaggacaatatcgtgctgggcgaggggggcattaccttaagcgggggccaacgagccagaatctctctcgcaagagctgtgtacaaggatgctgatctgtatctgctggactcccccttcgggtatctcgacgtgctgacagaaaaagagatcttcgagtcctgcgtgtgcaaactgatggctaacaagacacgtatcctagtcacaagtaaaatggagcaccttaagaaagctgacaagattctaatactgcacgagggctcatcctacttctatggcaccttttccgaattacagaacctgcaaccagacttcagcagcaagctcatgggttgcgatagtttcgatcagttctctgccgagcgacgaaactctatactaaccgagactctgcatcgcttctccctggagggagacgccccagtctcttggactgagacaaaaaaacagtcttttaaacagactggcgagtttggcgagaagagaaagaactctattctaaacccaataaacagtattcgcaagttttctattgttcagaaaactcctcttcagatgaacggcatcgaggaagatagcgatgaacctctggagcgtcggctctctctggtgccagattccgagcagggggaggctattcttcccaggatttccgtcatatccaccggccctacactgcaggcaagaagaaggcagtccgtgcttaacctaatgactcactccgtgaaccagggacagaacatccacagaaagactactgcttctacccgaaaagtgtcactggccccccaagctaatctgactgagctggacatttactctcgtagactttcccaggaaactggcttagagatcagtgaggaaattaatgaagaggacctgaaggagtgcttcttcgacgatatggagtcaattcccgccgtcaccacctggaatacatacctgcggtacatcactgtgcacaagtccctgatctttgtgctcatctggtgtctcgtgatattcttggccgaggtggctgcttctctcgttgtgctctggctgctcggtaatacacccctccaggacaaaggtaacagcacccactctcggaataatagctacgctgtgataataactagtaccagctcttattacgtgttttatatatatgttggggtcgctgacactctgttggctatggggttctttcggggtctaccactagttcacacattgattactgtctccaaaatcctgcaccacaagatgttacacagcgttctacaggcccccatgtccacactgaatacacttaaggccggcggaatcttgaataggttctccaaggatatcgccatcctggacgatctgctgccattgaccatctttgattttatacaattactattaatagtgattggggccatcgccgttgtggctgtgctgcaaccttacatttttgtggcaaccgttcccgttattgtcgcattcatcatgttgagggcttactttctgcagacctctcagcagttaaagcagttggagtcagagggcagatcccccatctttactcatcttgtgacctctctcaaggggttatggactctaagagcctttgggcgacagccatatttcgagaccctctttcacaaggcacttaacctccacacagctaattggttcctgtacctcagcactttgagatggttccaaatgcgcatagagatgatattcgtgatatttttcattgcagtgaccttcatctctatactgaccacaggcgagggcgagggcagagtcgggattatcctgactctggcaatgaatatcatgtctactctccagtgggctgtaaatagttccattgatgtcgatagcctgatgagatccgtgtctcgcgtttttaaatttatagacatgccaaccgagggcaagcctaccaagagcaccaagccttacaagaacggccagttgagtaaagtaatgattattgagaactcccatgtgaagaaagatgacatctggccctcaggtggccagatgaccgtgaaggatttgacagccaagtacactgaagggggcaacgcaattttggagaacatctcttttagcatcagcccaggccagcgcgttgggctcctgggcaggacaggctctgggaagtctacactgctgagtgctttcttgcggctcctgaataccgaaggagagatccagattgatggagtgagctgggattccatcacattacagcaatggcggaaggcctttggagtgatcccacaaaaggtcttcatcttcagtgggaccttcaggaagaatttagacccatacgagcagtggagtgaccaggagatctggaaggtggcagacgaagttggcctgcggtccgtgatagagcagttcccaggaaaactagatttcgtgcttgtggacggcggctgcgtgctgtcacacgggcacaagcagctgatgtgtctggctcgcagcgttctaagtaaagctaagattctgctattggatgagccctccgcacatctggaccctgttacctatcagataatccggcggaccctgaagcaagcatttgctgattgcacagtgattctgtgcgaacatcgcatcgaagcaatgctggagtgccaacagtttctggtcatcgaagaaaataaggtgcgacagtatgactctattcagaagctgttaaatgagaggtctttatttaggcaagccataagccccagcgatagagtcaaactgttccctcaccggaattcctccaaatgcaaaagcaagcctcaaatcgctgccctgaaagaggagaccgaggaggaggttcaggatactcgcctg

SEQ ID NO: 10161 - DNA, 4440 bp, synthetic construct
  misc_feature 1..4440: note = source = /note="Description of Artificial Sequence: Synthetic coding sequence"
  source 1..4440: mol_type = other DNA
atgcagcgttcacctctggaaaaggcctccgttgtatcgaaactgttctttagctggacccgaccaattctcaggaaagggtaccggcagagactcgagctgagcgatatctaccagatcccctctgtggatagcgctgataacctgtcggagaaactagagcgcgaatgggaccgcgaactggcctcaaagaagaatcctaaattgatcaatgctcttcgccgctgcttcttttggcggtttatgttctacggtattttcctgtacctcggagaagtaacaaaggcggtgcaacctctcctgctgggcagaatcatcgcttcgtacgatcccgacaacaaggaggaacggtccatcgccatttacctgggaatcgggctgtgtctgttgttcatagtcaggaccctgcttttgcaccctgccatattcggcctgcaccatatcggcatgcagatgaggatcgctatgttctccttaatttataagaagaccctgaaactgtcatcaagggttctcgataagattagcattggccagctggtatctctgttaagcaacaaccttaacaaattcgacgagggcctggctctagcccactttgtgtggatcgcccctcttcaggtcgcgctcctcatgggtttgatctgggagctgctgcaggcaagcgccttctgcggcctcggttttcttatagtcctagctctgttccaagcaggcctgggccggatgatgatgaaatatagggaccagcgcgctggtaaaatctccgaacgcttggtcataacaagcgagatgatcgaaaatatccagagcgtcaaagcttactgttgggaagaagctatggagaagatgatcgaaaatctgaggcagactgaactgaaacttacacgtaaagccgcctacgtgcggtacttcaattcctcggcctttttcttcagtggtttctttgttgtgtttctatctgtgttgccttatgctttaatcaagggcataattctgagaaaaatcttcacgaccatctctttctgcatcgtgttacgcatggctgtgacaaggcagttcccatgggccgtccagacttggtatgacagtctgggggccatcaataagattcaggacttcctccaaaagcaagaatacaaaacactggaatacaatctgaccacaaccgaggtggtaatggagaatgtaacggccttctgggaggaaggattcggcgagctgtttgaaaaagcaaagcaaaataacaacaatagaaagacttctaatggcgatgactccttattcttttcaaactttagcctgctgggaactcccgttctgaaggacatcaactttaaaatcgagagagggcagttattggcggtggctgggagcaccggggccggaaaaacatcgctgctaatggtgattatgggagagctggaaccctctgaaggtaaaataaagcactccggccggatctccttttgctctcagttctcgtggataatgccggggacgatcaaggagaatatcatttttggagtctcgtatgacgagtaccgttatcggagcgtcatcaaggcgtgccagttagaggaggatatctccaagtttgccgaaaaagacaacattgtgttgggagaggggggcattacgttatccggagggcaaagggctaggatctcgctggctagggccgtgtataaggatgcagacctttacctgcttgactctccatttggttacctggacgtcttaactgagaaggagatatttgaatcatgcgtgtgcaagctcatggccaacaagacaaggatcctcgtgacgagtaagatggagcacttgaaaaaagctgataagatattgatactgcacgaaggcagctcctatttctatgggacgtttagcgagctgcaaaacctccaaccagatttcagctccaagctcatgggatgcgattcgtttgaccagttctcggccgaacggagaaatagcatcctgactgagacactacaccgcttttctcttgaaggtgatgcgccagtaagttggaccgagaccaagaaacaatcctttaaacagacgggtgaattcggggagaagaggaagaatagcatcctgaatccaataaactctattcggaagttttcaatcgtccagaagaccccactgcagatgaacggaattgaggaggattccgacgaaccactcgagagaaggctgtcgctggtccctgatagcgagcagggagaagcgatcctcccccggataagcgtaatcagcaccggacccacactgcaggcgaggcgtcggcaatcagtccttaatcttatgactcacagcgtcaaccaggggcagaacatccacaggaagaccaccgcctcaaccaggaaggtgtcgcttgcaccacaggccaatctgactgagctggacatctactccagacggctttcacaggagacgggccttgaaattagtgaggagattaatgaagaggacttgaaggagtgcttttttgacgatatggagtcaattcctgccgtgacaacctggaatacgtacctaaggtacattacagtccataaaagtctgattttcgtgctgatctggtgtcttgtgatttttttggccgaagtggcagcttctctcgtggttttgtggctgcttgggaacactccccttcaagacaaggggaatagtacccattccagaaacaatagctacgctgtgatcattactagcacttctagttactatgtcttttatatatacgtgggagtggcagatactttactcgcaatggggttcttccgtggcctgcccctcgtgcacaccctcatcacggtaagcaaaatcttgcatcacaaaatgctgcacagcgtgctgcaggcaccaatgagtactctgaatactttgaaagcaggagggatcttgaataggtttagtaaggatatagctattctcgatgacctgctgcctctgacaattttcgatttcatccagctcttattgattgtcataggagccattgcggttgtggcggtgctgcagccctacatcttcgttgccactgtgccagttatagtcgccttcatcatgctaagggcctattttctgcaaacatcgcaacagcttaagcagctagaaagtgagggccgctccccaatctttacccacctggtgacctccctgaaaggtctctggactctgcgcgcatttgggagacaaccgtactttgaaaccctcttccacaaagctttaaatcttcataccgctaactggtttctgtaccttagcaccttgcgctggtttcagatgaggatcgaaatgatctttgtgatcttcttcattgcggtgaccttcatctccatactgactaccggcgaaggagagggacgagtgggcatcattctcactctggccatgaatattatgagcacgctgcagtgggctgtcaatagttccattgacgtcgactccttgatgcgaagcgtgtcccgcgtcttcaagttcattgacatgcccaccgagggtaaaccaaccaagagcacgaaaccttacaaaaacggtcagttaagcaaggtcatgattatcgagaatagtcatgtgaaaaaggacgacatatggccatccggaggccagatgaccgtgaaagacctcactgccaaatacactgaaggagggaatgccatcctggagaacatcagcttctcgataagccctggacagagggtgggtctgctcggacgcacaggctctggcaagagcacgctgctaagcgcctttctccggctgttaaacaccgagggggagatacaaattgatggggtcagctgggactcaattacactgcagcagtggaggaaggccttcggagtcatccctcagaaggtttttattttctccggtacctttagaaaaaacctggacccttacgagcagtggagcgaccaggagatctggaaggtggccgacgaggttggtcttagatctgtgatcgaacaattcccagggaagttggacttcgttctggtcgatgggggttgtgttctgagccatggacataaacaactgatgtgcttagcaaggtctgtgctcagcaaggctaagatcctcttgctggacgaacccagcgctcacctggaccctgttacctaccagatcataagacgtaccctcaaacaggcttttgcagactgtaccgtaattttgtgcgaacacagaattgaggccatgttggaatgtcagcagttcctggtgatcgaagagaacaaagtgagacagtacgacagtatacagaaattattaaacgagcgcagcctctttcgtcaggccattagtcccagcgacagagtgaaactatttccacatcggaattcttcgaaatgtaagtctaaaccccagatagctgccctgaaagaagagacagaagaggaagtgcaggacactcgactg

SEQ ID NO: 10162 - DNA, 4440 bp, synthetic construct
  misc_feature 1..4440: note = source = /note="Description of Artificial Sequence: Synthetic coding sequence"
  source 1..4440: mol_type = other DNA
atgcaaagatcaccattagaaaaagcatcagtagtatctaaattgtttttctcatggacaagaccaattttaagaaaaggttatagacaacgtttagaattaagtgatatttatcaaattccaagtgttgatagtgcagataacttaagtgaaaaacttgaaagagaatgggatagagaattagcttcaaaaaaaaatccaaagttaattaatgcacttagaagatgctttttttggagattcatgttctatggaatatttctttatctaggagaagttactaaagcagttcaaccacttttgttaggaagaattattgcttcatacgatccagataacaaggaggaaagaagtattgcaatttatttagggatcggattgtgccttttatttattgttagaacacttttattacatcctgctatatttggattacatcatattggaatgcaaatgcgtattgctatgttttctttaatttataaaaaaactttaaaattatctagtagagttttagataaaatatcaattgggcaattagttagtttattaagcaataatttaaataaatttgatgagggtcttgctcttgcacatttcgtttggattgctccattacaagttgctttgttaatgggacttatttgggaacttcttcaagcatcagccttttgcggattaggatttttaattgttttagcattgttccaagctggattaggaagaatgatgatgaagtatcgtgatcaaagagcaggaaaaatttctgagaggttagttattacttctgaaatgattgagaatattcaaagtgttaaggcttattgttgggaagaagctatggaaaaaatgattgaaaatcttagacagacagaacttaaacttacacgaaaagcagcatatgttagatattttaactctagtgctttttttttctcaggatttttcgtggtttttctttcagttttgccatatgcccttattaaaggtataattttgcgtaaaatttttacaacaatatcattttgtatagttttacgtatggctgttactagacagtttccttgggctgttcaaacatggtatgattcattgggagcaataaataaaattcaagattttttacaaaaacaagaatataaaactttagaatataaccttacaacaactgaagttgtaatggaaaatgtaacagcattttgggaagaaggatttggagaattgttcgaaaaggcaaaacaaaataataataatcgaaaaacttctaatggtgacgatagtctttttttctcaaatttctctttattaggaactccagttttaaaagatatcaattttaaaattgaaagaggtcaacttttagccgtagctggatcaactggagctggaaaaacttcgttgcttatggtgattatgggagaacttgaaccatctgaaggtaaaattaaacattcaggaagaattagtttctgttctcaattttcttggattatgccaggtacaattaaagaaaatattattttcggagtatcatatgatgaatatagatatagatcagttattaaagcttgtcaacttgaagaagatattagtaaatttgctgaaaaagacaatattgttttaggagaaggaggaattacactttcaggaggacaaagagcacgtatctcattggcaagagctgtttataaagatgctgatctttatttattagacagcccttttggatatttagatgttttgactgaaaaagaaatttttgaaagttgtgtttgtaaattaatggcaaataaaacaagaattttagttactagtaaaatggaacatttaaaaaaagctgataaaattttaatcttacatgaaggatcatcttatttttatggaactttctctgaacttcaaaatttacaaccagattttagttctaaattaatgggatgtgacagtttcgatcaattctcagcagaaagacgtaactctattttgactgaaacattacataggtttagtttagagggtgatgctccagtttcatggactgaaaccaaaaaacaatcattcaaacaaactggagaattcggagaaaaaagaaagaattctattttaaaccctattaactctattagaaaattttcaattgttcaaaaaactccattacaaatgaatggaattgaagaagattcagatgaaccacttgaaagaagactttctcttgtacctgattcagagcaaggtgaagcaattttaccacgaatttcagttatttctacaggaccaacacttcaagcaagaagacgacaatctgttcttaatttgatgactcattcagttaatcagggacaaaatattcatagaaagacaacagcttctacacgtaaagttagccttgcacctcaagctaatctaacagaacttgatatttattcaagacgtttatctcaagaaacaggtttagaaattagtgaagaaattaatgaagaagatcttaaagagtgtttttttgatgatatggaatctataccagctgtaacaacatggaatacttatttaagatatattactgtacataaatcattgatttttgttttaatttggtgtttagttatttttcttgcagaggttgcagcatcattagttgttctttggctccttggaaatactcctttacaagataaaggaaattctactcatagtagaaataattcatatgcagttattataacctcaacatctagttattatgttttttatatttacgttggagttgcagatactcttcttgcaatgggattcttcagaggattgcctttagttcatacattaattactgtttcaaaaattcttcatcataaaatgcttcatagtgttttacaagctccaatgagtactttaaatactcttaaggcaggaggaatattaaatagatttagcaaagatatagctattcttgacgacttattaccattaacaatattcgatttcattcaattattacttatcgtaattggagctattgcagttgtagcagttcttcaaccatatatttttgtcgctacagttccagttattgtagcttttattatgcttagagcatatttcttacaaacaagtcaacaattaaaacaattagaatcagagggaagatctccaatttttactcatcttgttacttctcttaaaggtttatggactcttcgtgcttttggaagacaaccatattttgaaactttgtttcataaagcattaaatcttcatactgctaattggtttctttaccttagtaccttaagatggtttcaaatgagaattgaaatgatatttgttatcttttttattgctgttacatttattagtattttaactactggagagggagaaggtagagttggtattattcttacacttgctatgaatattatgtcaactcttcaatgggcagttaattcatctattgatgtagatagtctaatgagatcagtttctcgtgtgttcaagtttattgatatgcctactgaaggaaaacctactaaatcaacaaaaccttacaaaaatggacaattatccaaagttatgataattgagaattcacatgttaaaaaagatgatatttggccatcaggaggacaaatgacggttaaagatttaactgcaaaatatacagaaggaggtaatgcaatattagaaaatatttcattttcaatatcacctggacaacgagtaggtttattaggaagaacaggatcaggaaagagtacattattatcggcattcttacgtttacttaatacagagggagaaattcaaattgatggagtaagctgggatagcatcactctacaacaatggagaaaagcatttggtgtaataccacagaaagttttcattttttctggaactttcagaaaaaatttagatccttatgaacaatggtcagaccaagaaatttggaaagttgcagacgaggttggattaaggtccgttattgaacaatttcctggaaaattagattttgtacttgttgatggaggatgtgtattatcacatggacataaacaattaatgtgtcttgcaaggagtgttctttcaaaggctaaaattttattattagatgaaccaagtgcacatcttgatcctgtaacttatcaaattattagaagaacattaaaacaagcatttgcagactgtacagttatattgtgtgaacacagaattgaagctatgttagaatgtcaacaatttcttgtaattgaagaaaataaggttagacaatatgattcaattcaaaaattacttaatgaacgtagtttatttcgacaagcaatttcaccatctgatcgtgttaaattatttccacatagaaattcaagtaagtgtaagtcaaaaccacaaatagctgctcttaaagaagaaactgaagaagaagtacaagatacaagactt

SEQ ID NO: 10163 - DNA, 4440 bp, synthetic construct
  misc_feature 1..4440: note = source = /note="Description of Artificial Sequence: Synthetic coding sequence"
  source 1..4440: mol_type = other DNA
atgcagcgcagtcccctggagaaggcatcagtggtatccaagcttttcttttcttggacacgcccaattcttaggaagggctacaggcagaggctcgaactctctgacatttatcagatcccttcagtggactcagctgacaatctttctgagaagttggagagggagtgggacagggaacttgctagcaagaagaatcccaagttgatcaacgcgttgaggaggtgctttttctggagatttatgttctatggcatcttcctttacctgggcgaggtgacaaaggcagttcagcctttgcttttgggccgcatcatcgcctcctatgatcccgataacaaggaagaaaggagcatcgctatttacctgggcataggcctgtgtcttctgtttattgtgaggaccctgcttttgcaccctgcgattttcggcctgcatcatataggcatgcagatgagaatcgccatgttctcacttatttataagaaaaccctgaagctcagcagtagggttcttgacaagatttctattggtcaattggtatcactgttgtcaaacaacctgaacaagttcgacgaaggtctcgcacttgctcatttcgtgtggatcgcccctttgcaggtggccctgttgatgggtctcatatgggagctgcttcaagccagcgccttctgtggtcttggattcctcatcgtgctggcattgttccaggccggactgggcaggatgatgatgaagtaccgcgatcagagagccggtaagatctccgaacgcttggtgattactagcgagatgattgagaatatccagtctgtgaaggcttactgttgggaagaggccatggaaaagatgatagagaatctgaggcagaccgagttgaagcttactagaaaagcagcgtatgttcgctactttaactcctctgctttctttttcagcggattttttgtggtgttccttagcgtcctcccctacgctctcataaagggtatcatccttcgcaagatcttcactaccatttccttctgcattgttctgaggatggccgtgacaagacagtttccatgggcggtgcagacctggtacgactctcttggagccatcaacaagatccaggattttctccagaagcaggagtataaaaccttggaatacaaccttactactacagaagtcgtgatggagaacgtaaccgccttctgggaggaaggcttcggtgagttgtttgaaaaagccaagcagaacaacaacaaccgcaagacgtccaatggagacgacagcttgtttttctctaacttctcactgctcggcacaccagtcctgaaagacataaatttcaagatagagaggggccagctgctcgccgtggccggttccaccggagccggcaaaactagcctgctgatggttatcatgggcgagctcgaaccttccgaaggaaaaattaagcactccggtagaataagtttctgcagccagttcagctggattatgccgggcaccatcaaggagaacatcatatttggtgtcagttatgacgagtataggtaccgcagcgtgatcaaggcatgccagctggaagaggatataagtaagttcgccgagaaggataacatcgttctcggagagggcggtatcacgctcagcggtggccaaagagctaggatttctctggctagagctgtctacaaggatgccgacctttatctgctggactccccgtttggttatctcgacgtactgacagagaaggagatattcgagagctgtgtctgcaaactcatggcgaataagacacgcattctggtcacttccaagatggagcacctgaaaaaggcagacaaaattttgatccttcatgaaggttccagttacttctacggtacattttccgaattgcagaatttgcaaccagacttttcatcaaaattgatgggttgcgattcatttgaccagttttcagcagaaagaagaaatagcatcttgacagaaactttgcaccgcttttctctggaaggtgacgcgccggtgagttggacagaaactaagaaacagtcctttaaacagacaggtgaatttggagaaaagagaaagaattctattttgaatcccatcaactccattagaaaattctccattgtgcaaaaaacacctcttcagatgaacggaatagaagaagattccgatgaaccactggagaggagacttagcctggtgcctgatagcgagcaaggcgaggcaattctcccccgcatctccgtgatttccaccggccccacattgcaagccagacgccgccaatctgtcttgaatctcatgacgcactctgttaaccagggtcagaatatccacaggaagacgactgcctcaaccagaaaggttagcctggccccccaagcgaacctgacagaattggacatctactccagaaggctctcccaggagacgggtcttgagataagtgaagagatcaacgaggaagacttgaaagaatgcttcttcgatgatatggaaagtatcccagcggttacgacctggaatacatacttgcgctacattactgtccacaagtccctcatcttcgtgctgatttggtgcctcgtaatcttcctcgctgaggtcgcagcatcccttgtcgtgctgtggcttttgggcaacacacctctccaggataagggcaatagtacccactctaggaataactcttacgcagtcataattacaagcacatcctcctactatgtcttctacatttacgttggcgtggctgatacattgcttgcaatgggtttcttcagaggactccccctggttcacaccctcatcacagtgagtaagatcctgcaccacaaaatgttgcatagcgtgctccaagctccaatgtctacgttgaatactttgaaggcaggaggtattcttaacagattctcaaaagacatcgcgatccttgatgaccttcttcctctgacaatctttgacttcatccagcttctgctcatcgttatcggtgcgatcgccgtcgtggcagttctgcagccttatatcttcgtggctaccgtgccggtcattgtcgctttcataatgctgagagcctactttcttcagacatcccaacagcttaagcagctcgagtcagagggcaggtccccaatttttacacacctggtaaccagtctgaagggcctgtggacgctgcgcgcatttggaaggcagccctactttgaaactctgtttcataaagcccttaatctgcatactgctaactggttcctctacctgagtacactccgctggtttcaaatgaggatcgaaatgatttttgtcatcttcttcatcgccgtgactttcatcagcatactgactacaggcgaaggcgagggaagagtcggaatcattctgactcttgccatgaacattatgagcactctgcagtgggccgtcaattcctccatagatgtagactccttgatgcgctctgtttcccgcgtttttaagttcatcgatatgcccactgaaggtaaacccactaagagtaccaagccatacaaaaacggacagctctctaaggttatgattattgagaacagccatgttaaaaaagacgacatatggcctagcggaggtcaaatgacagtaaaggatctcaccgctaaatatactgagggcggaaatgctattctcgagaatatttcattcagtataagcccaggtcagagagtgggcttgctgggccgcacaggatccggaaaaagtactcttttgtctgccttcttgcgcctgctgaacactgagggtgagatacagatcgacggtgtctcatgggacagtatcacattgcagcagtggagaaaggctttcggtgttattcctcaaaaagtcttcattttcagcggaaccttcaggaagaacctggatccatatgaacagtggtcagatcaggagatctggaaggtggctgacgaggtgggtttgaggagcgttatcgagcaatttccaggcaaactggacttcgtgctcgtggacggcggctgtgtgctgtcccacggtcataagcagctcatgtgtttggccaggagtgtgctgagcaaggctaagatactgctgcttgacgagccgtccgctcacctggacccagtgacataccaaattattaggaggacccttaaacaggcgtttgctgactgcactgttattctctgcgaacacagaatcgaggccatgctggaatgtcagcagtttcttgtgattgaggaaaataaagtaaggcaatacgactcaattcagaaactcttgaacgaaagatccctgttccgccaagccatcagtcccagcgacagggtgaaactcttccctcacagaaattcctccaagtgcaaaagcaaaccacaaattgctgctctgaaggaggaaaccgaagaggaggtgcaggatacacgcctg

SEQ ID NO: 10164 - DNA, 4440 bp, synthetic construct
  misc_feature 1..4440: note = source = /note="Description of Artificial Sequence: Synthetic coding sequence"
  source 1..4440: mol_type = other DNA
atgcagcgctcccctctggagaaggcgtcagtggtcagcaagctcttctttagttggacccgacccattttgcgcaaaggataccggcagcgacttgagctgtcggacatttaccagatcccttcagtcgattccgccgataatctttcggaaaagctggaaagggagtgggaccgagaacttgcatccaagaagaacccaaagctgatcaatgctctccgcagatgtttcttttggcgctttatgttttacggcatatttctttacttgggtgaagtgactaaggcagtgcaacctctgctgcttgggcgaattatcgctagctacgatccagacaataaggaggaacgttcgatcgccatttacttgggaatcggtctgtgccttttgtttattgtgagaactttgcttctgcacccagccatatttggattgcaccacataggtatgcaaatgagaattgcgatgttttcactgatatacaagaaaacgctcaagctctcatcgagagtgcttgacaagatctcgattggacaacttgtgtccttgctgtccaataacctgaacaagtttgacgagggccttgcacttgcccattttgtctggattgcacctcttcaagtcgcactcctgatgggacttatctgggaattgcttcaagcatccgcattctgtggcctgggttttctcattgtgttggccttgtttcaggcaggcctgggaagaatgatgatgaagtatcgcgatcagcgtgcgggcaagatttcagagagactggtgatcacctcagagatgatcgagaatatacagtcggtcaaggcatactgttgggaagaggccatggaaaagatgatagagaatttgaggcagaccgagctgaaacttacgcggaaggcagcatacgtgcgatactttaactcatctgccttctttttcagcggcttctttgtggtgtttctttccgtcctcccatacgcgctgattaagggcatcattctgcgtaagatctttactacgatttcgttttgcatcgtcctgcggatggcagtgactcgtcagtttccatgggccgtgcagacgtggtacgattcgctgggagcaattaacaaaatccaggattttcttcaaaagcaggaatacaagactttggaatacaacctgaccactactgaagtggtcatggaaaacgtgactgctttttgggaagaaggctttggagagctgtttgaaaaggcaaagcagaacaacaataaccgtaagacgtcaaacggcgatgattcgttgttcttttccaacttttccttgctcgggactccagtactgaaagatatcaacttcaaaatcgaacgaggccagctgctggccgtggcggggagcactggtgcaggaaaaacctccctgcttatggtaatcatgggcgagcttgaaccgtcagaagggaaaatcaaacattccggtagaatcagtttctgtagccaattctcatggatcatgcccggcactattaaggagaacattatcttcggggtgtcgtacgacgaataccgctacaggagcgtgatcaaggcctgccagctggaagaagatataagcaagttcgcagagaaggataacattgtgctgggtgaaggtggtataaccctgtcaggtggacaacgagcaaggatcagcctcgctagggcagtgtacaaagacgcagatttgtacctgctcgactccccctttggttacctggatgtgctcactgagaaggagattttcgaatcgtgtgtctgcaagctgatggctaataagactcgaatcctcgtgacctcgaagatggagcatctgaagaaggctgacaaaattcttatacttcacgaaggaagctcctacttctacggtaccttttccgagctgcaaaacctccaaccggatttctcatccaaactgatggggtgtgattcgttcgatcaattttcagcagaacgccgcaattctattctgaccgaaaccttgcacaggttcagcctcgaaggtgatgcacctgtctcgtggaccgaaactaagaagcaatcatttaagcagaccggtgaattcggagaaaaaagaaagaactccatccttaatccaataaactccattcgtaagttttccattgtgcaaaagacgcctctgcaaatgaacggaattgaagaagatagcgatgagccattggaacgtcgactgtctcttgtgcccgattctgaacaaggggaagcgattcttcctcgaatctccgtgattagcaccgggcctacccttcaggcccgccggagacagtccgtcctgaaccttatgactcactcggtcaaccaaggtcaaaacatccatagaaaaacgaccgcatcgacccggaaggtatcccttgcaccccaagcaaacctgactgagctcgacatttacagccggcgactctcccaggaaactggtctggaaatctcggaagagattaatgaggaagatctgaaggagtgttttttcgatgacatggaatcaattccggctgtcaccacctggaacacctacctgaggtatatcactgtccataagagcctgatctttgtgctcatttggtgcctcgtgatttttctcgccgaagtggcagcaagccttgtggtcctgtggttgttgggtaacactcctctgcaggacaagggaaatagcacccattcccgaaacaattcatatgcagtcattatcacttcaacttcatcctactacgtattctacatttacgtgggagtcgccgataccctgctggcaatgggatttttcaggggtctgcctctggtccataccctgattacggtttcgaaaattctgcaccataagatgcttcacagcgttctccaagcgccaatgagcaccctgaacactcttaaggcaggtggaattctgaataggttttcgaaggatatcgcgattctcgacgaccttcttcccctcaccatttttgacttcattcaactccttttgattgtgatcggagcaattgcagtggtcgcagtgctgcaaccatacatatttgtggccaccgtccccgtgattgtggcgtttatcatgctgcgcgcctatttccttcaaacctcgcaacagctgaaacagcttgaatccgaagggcgatcccctatcttcactcatctggtgacctcactgaaaggactctggactctgcgcgcatttggccggcagccatactttgaaaccctttttcataaggcactgaatttgcataccgcaaactggttcctttaccttagcactcttaggtggttccaaatgcgtatcgagatgatattcgttatcttctttattgcggtgactttcattagcatcctgacgactggtgaaggcgagggacgggtgggaataatccttacccttgcaatgaacattatgagcacccttcagtgggcagtgaattcatctattgatgtggactcacttatgcggtccgtttcgagagtctttaagttcatcgacatgcctaccgagggaaagcctacgaaaagcactaaaccttataagaatgggcaactgtccaaagtgatgatcatagaaaactcacatgtcaagaaggatgatatttggcctagcggaggccagatgactgtgaaggatcttactgcaaaatacactgagggtggcaatgcgattctggaaaacatatccttttccatttccccagggcagcgtgtcggtctgcttggtcggaccggatccggcaaatcgactcttctttcagcgttcctcagactgctcaatactgagggagaaattcaaatcgacggcgtgtcatgggacagcattacgcttcaacagtggcggaaggcctttggcgtgatccctcagaaagtgttcatcttttcgggaacctttcggaagaaccttgatccttatgagcaatggagcgatcaagaaatttggaaagtggccgatgaggtgggattgcgttcggttattgaacaattccccggaaagctggactttgtgctcgtcgacggagggtgtgtgcttagccacgggcataagcagcttatgtgtcttgcccgatctgtgctttccaaagcgaaaatactgttgctcgacgaaccttcggctcacctggacccagtcacgtaccaaatcatacggagaacccttaaacaagcatttgctgattgtaccgtgattttgtgtgaacatcgaattgaagccatgctggaatgccaacagttcctcgtgattgaggaaaacaaagtgagacaatacgatagcattcaaaaactgcttaatgaaaggagtctgttcagacaagctattagcccgtcagatagagtgaagctctttcctcataggaattcgtccaagtgtaagtcgaaaccgcagattgcagccctcaaggaagagactgaagaagaagtccaagacacccgactg

SEQ ID NO: 10165 - DNA, 4440 bp, synthetic construct
  misc_feature 1..4440: note = source = /note="Description of Artificial Sequence: Synthetic coding sequence"
  source 1..4440: mol_type = other DNA
atgcaaagatccccgttggaaaaggcgtccgtggtgagcaagctcttcttttcgtggactcgcccgatcctgcggaagggatacagacaacgcttggagttgtccgatatctaccagattccgagtgtggacagcgctgataacctgtcagagaagctggagagggaatgggacagggaactggcatcaaagaagaaccctaaactcatcaatgccctccggaggtgttttttctggcgcttcatgttctacggaattttcctgtacctgggagaggtcactaaggccgtccagccactgctgctcgggcggattatcgcatcgtacgacccagacaacaaggaggaaagatccatcgccatctacctgggaattggcctttgccttcttttcatcgtgagaactctcctgctgcacccagccatctttggattgcaccatatcggcatgcaaatgcgcatcgctatgttctcactgatttacaagaaaaccctgaagctctcctcaagagtgctcgacaagatctccatcggccagctcgtgtccctgctgagcaacaacctgaacaagtttgacgagggacttgccctcgcgcacttcgtgtggatcgcgcctctgcaggtggctcttctcatgggactgatctgggagctgctccaggcttcggcgttttgcggactgggattcctgatcgtgctggccctcttccaggcaggactggggcggatgatgatgaagtaccgggatcaacgcgccggcaaaatctcagaaaggttggtgatcacgtcggaaatgatcgagaatattcaatccgtcaaagcatactgctgggaagaggcgatggaaaagatgatcgaaaacttgcgccagaccgaactgaagctcacccgcaaggctgcatacgtccggtacttcaattcgtccgcattcttcttctcaggattcttcgttgtgttcctgtcggtgctgccgtatgccctgatcaagggaatcatcctcaggaagatctttacgaccattagcttctgcatcgtgctgagaatggcagtgacccgccagttcccatgggctgtgcaaacttggtacgattcactgggcgcgatcaacaagatccaggacttccttcagaagcaagagtacaagaccctggaatacaatctgactaccaccgaagtggtgatggagaatgtgaccgcgttctgggaggaagggttcggggaactgtttgagaaggccaagcagaataacaataaccgaaagacttcgaacggcgacgattcgctgttcttctccaacttttccctcctcggtactccggtcctcaaggacatcaatttcaaaatcgaaagaggccagctcctggctgtcgccggaagcaccggcgccggcaagacctccctgctgatggtgatcatgggagaactggagccgtcagaagggaagatcaagcacagcgggagaatctccttctgtagccaattctcctggatcatgcccggaactatcaaagaaaacatcatttttggagtcagctacgacgaatacaggtaccgctccgtgatcaaggcgtgtcagttggaggaggatatcagcaagttcgccgaaaaggacaacatcgtgctgggagaggggggcattacgctgtcgggaggacagcgcgcgcggatttccctggctagagctgtgtacaaggacgcagacctgtacctgctggactctccgttcggctacctcgacgtgctgaccgagaaggagatattcgaatcgtgtgtctgcaaactgatggccaacaagacccgcatcctggtgacctcaaaaatggaacacctcaagaaggctgacaaaatcctgattctccatgaaggctcctcctacttctacggcacttttagcgaacttcagaacctccaacccgatttcagctcaaaactcatgggctgcgactccttcgaccagttcagcgccgagcggcgcaattcgatcctgaccgaaactctgcatcgctttagcctggagggagacgcccctgtcagctggaccgaaaccaagaagcagtctttcaagcagaccggggagtttggagaaaagaggaagaattccatcctcaacccaatcaacagcatccggaaattcagcatcgtgcaaaagaccccgcttcaaatgaatggcattgaagaggattcagatgaacctctcgagcggagactttcactggtccctgatagcgaacaaggcgaagcaattctgcctaggatcagcgtgattagcactggaccgactctgcaagccaggaggcgccaaagcgtcctgaacctgatgactcactcggtgaaccagggccagaacatccaccgcaaaacgaccgcgtcaacccgcaaggtgtcacttgccccacaagcaaacctgaccgaattggacatctactcccgccggctgtcccaggagactgggctggaaatctccgaagaaatcaatgaggaggatctgaaggaatgttttttcgacgatatggaaagcatcccggccgtgaccacctggaacacctacctcaggtacatcactgtgcataagagcctcattttcgtcttgatctggtgcctggtgatcttccttgccgaagtggcggcatcccttgtggttctgtggctcctgggcaatacccctctgcaggacaagggaaatagcactcattcacggaataactcctacgccgtgatcatcacctcaacgtcatcgtactacgtgttctacatctacgtcggggtggcggataccctgcttgcaatgggttttttccgcggacttccgttggtccatactctgatcactgtgtccaaaatcttgcatcataagatgctccacagcgtcctgcaagcaccgatgtcgactctcaacactctgaaggccggagggattctgaataggttctccaaggacattgccatcctggatgacctcctgccgctcacgatcttcgatttcatccagctgctcctgatcgtgattggcgctatcgccgtggtcgccgtcctccagccctacatctttgtcgccacggtgccggtgatagtggcgttcattatgttgcgggcatacttcctccagactagccagcagctgaagcaactggaatcagaggggcggagccccattttcactcatctggtgacctccctcaagggactctggaccctgagagccttcgggcggcaaccgtacttcgaaactttgtttcacaaggcccttaacttgcatacggctaactggttcctctacctttcaaccctcagatggtttcagatgcgcatagagatgatctttgtgatctttttcatcgccgtgactttcatctccatcctgaccaccggcgaaggagagggtcgcgtcggaatcattttgacccttgcgatgaatatcatgtcgacgctgcagtgggccgttaatagctcaatcgatgtggactcgctgatgcgctcggtgtcacgggtgttcaagttcatcgacatgccaactgaagggaaaccaactaagagcaccaaaccgtacaagaacggtcagctttcgaaggtgatgataattgaaaattcgcacgtgaaaaaagacgacatctggccatccggaggacaaatgaccgtgaaagacctcaccgcgaagtacaccgagggcggaaacgccatcctggaaaacatctccttcagcattagcccgggccagagagtcggactgctcggtcgcaccggatcagggaagtctactcttctctcagctttcctgcgtttgctcaatacggaaggggagatccagatcgacggagtgtcctgggattcaatcaccttgcagcagtggcgcaaggcctttggagtgatcccgcagaaggtgttcattttctcgggaactttcagaaagaacctggatccgtacgagcaatggtcagaccaggaaatctggaaagtggcggatgaagttggactgagatccgtgatcgaacagttcccaggcaagctggacttcgtgttggtcgatggcggatgtgtgctgtcccatggccacaaacagttgatgtgcctggccagaagcgtcctcagtaaggcaaagatcttgctgctggatgaaccgtccgcacatttggacccggtgacttaccagatcatacggaggactctgaagcaggccttcgctgactgtacggtgattttgtgcgagcacagaatcgaagctatgctggagtgtcagcagtttcttgtgatcgaagaaaacaaagtaagacaatacgactcgatccaaaagttgctcaacgaaagatcgctctttcggcaggccatctcaccgtccgatcgagtcaaactcttcccgcacaggaattcttccaagtgcaagtccaaaccgcaaattgctgcactgaaggaagaaaccgaggaagaagttcaagacacccggctg

SEQ ID NO: 10166 - DNA, 4440 bp, synthetic construct
  misc_feature 1..4440: note = source = /note="Description of Artificial Sequence: Synthetic coding sequence"
  source 1..4440: mol_type = other DNA
atgcaacgctcccctctcgagaaggcctctgtggtaagtaaactgtttttcagctggacacgcccaattctgcgtaagggctatagacaaaggctcgaactgtcagacatttaccagatcccttctgtggactcagcagataatctgagcgagaagctggagagagaatgggatagagagctggcatcaaagaaaaacccaaagctgataaacgcactccggcgttgcttcttctggcgattcatgttctacggaattttcctctacttgggcgaggttaccaaggccgtgcagcctttgcttctcggtagaattatcgccagttatgacccagataataaggaagaaagatcaatcgccatctatctgggtataggactatgtctcctcttcattgtgaggactttgctgttacaccctgccatatttgggctacatcacattggcatgcagatgagaattgcgatgttcagcctcatctacaaaaaaacattgaagctcagctcacgagtgctcgacaaaatatccataggccagctggtcagcctgctgagcaataatctcaacaagtttgacgaggggcttgcactggctcacttcgtctggattgccccgttacaggttgcactgctgatgggactgatttgggagctgttacaggcgtctgccttttgcggcctggggttccttattgtcttagctctgtttcaggccgggctcggaaggatgatgatgaagtatcgagatcaacgggccggaaaaataagcgaaaggctagtcattacttcagaaatgattgaaaatattcagtcagtgaaagcctattgttgggaggaagctatggagaaaatgattgaaaatctgcggcaaaccgagctgaaactgacaaggaaggctgcctatgtgcgatacttcaatagtagcgcattttttttctcaggattctttgttgtcttcctgtccgttttgccatatgccctgatcaagggaataatcctacgtaagatctttacaacaatcagcttctgtatcgtgctgagaatggccgtgacccgacagtttccatgggcagtgcagacttggtacgatagcctcggtgccatcaataaaatacaggattttctacagaagcaggaatataagacacttgagtataatctgaccaccaccgaggtggtgatggaaaacgtcacagcgttctgggaagaagggtttggcgagttgtttgaaaaggccaagcaaaacaacaataatagaaaaacatctaacggcgacgattccttattcttttccaactttagcctgcttggcactcctgtgctgaaagatatcaacttcaagattgagcgaggccagctattggccgtggccggatcaactggagctggcaagacctcattgctgatggttattatgggagagctagaaccaagtgaaggaaaaatcaagcactccggccgcatctccttttgcagtcaattctcctggataatgcccggaaccattaaggaaaatatcatattcggcgtttcttacgacgaatatagataccgaagcgttatcaaggcttgtcagctcgaagaagacattagcaaattcgctgagaaggacaacattgtgctgggagaaggcggtatcacattaagcggaggccagcgggctaggatctccctggcccgggccgtgtacaaagatgcagacctgtacctgttagattccccctttggttacctggatgtgcttacagaaaaagaaatcttcgagagttgtgtttgtaaactaatggcaaacaagaccagaatactggtcacatctaagatggagcatctgaaaaaggccgacaagattctaattctccatgaagggtcctcatacttttacgggacatttagtgagcttcagaacctgcagccagatttctcctccaagctcatgggctgcgattcttttgatcagttctcagccgagaggagaaactctatcttgacagaaacactacatcgattctccctggaaggcgacgcccccgtgtcctggacagaaacaaagaaacagtccttcaagcagaccggagagttcggggagaaacgaaagaattcaatcttaaatcctatcaacagtatccggaagtttagtatcgtccagaagacgcccctccagatgaatgggatcgaggaggattctgacgaacctctcgagcggcggttgagcttggtgcccgatagcgaacagggagaggcgattctgcctcgcatcagcgtgatatctactggtcctactttgcaagctagaaggaggcagagcgtgttgaatctaatgacacactccgtgaaccaaggtcagaatattcaccgaaaaaccacggcatccactagaaaagtaagcctggcaccccaagccaacctgaccgaacttgatatttattccagacgtctctcccaggaaactgggctggagatttctgaagagataaatgaagaggacctgaaagaatgttttttcgatgatatggaatcgattcccgccgtcaccacttggaatacctacttgaggtatatcacagtgcataaatctttgatttttgtgcttatctggtgtctggtcatcttcttggcggaagttgccgcgtcgctcgtggtcctatggctgttaggaaacaccccactccaggacaagggcaactccacacacagtagaaataacagctacgccgtcataatcacctccacaagcagttactatgtattctatatttatgttggcgtcgccgacaccctgctagccatggggttctttagggggttgcctcttgtgcatacactgattacagtgtctaagatcctccatcataaaatgttgcacagtgttcttcaggcccctatgagcacccttaatacattgaaagcaggaggcatccttaaccgtttctcaaaggatatagccatcttagatgacctcctgccactgaccattttcgactttatccagctgctgcttattgtgattggggccatcgcagtggtagctgtgctacaaccttatattttcgtcgcaaccgtacccgtcatcgttgcttttattatgttgcgagcttattttctccaaacatcacaacagcttaagcagctcgaaagtgaaggtagaagtcctattttcactcaccttgtgacctccttaaaaggcctgtggaccctgagggcgtttgggaggcagccgtatttcgagaccctgttccacaaggccctcaatctacatacagcgaactggtttttgtatttgtcaaccctgaggtggttccaaatgagaatcgagatgattttcgtaattttcttcattgcagtgacattcatttcgatactcacaacgggcgaaggagagggacgcgtaggcataattctcacactggctatgaacattatgtctactctccagtgggcggtcaactcgagtatcgatgtggattcgctgatgagaagcgtcagcagggttttcaagttcatcgacatgcctactgaaggaaaacctaccaagagtaccaaaccgtataagaacggtcagctgtcgaaagtaatgatcattgaaaattcacatgtaaaaaaagatgatatttggccctccggcggtcaaatgacagtgaaggatctgacagctaaatataccgagggggggaatgccatcctagagaatatctccttcagcatctcacccgggcaacgagtgggcttattgggcagaaccggcagcggcaagagcaccctacttagtgcctttctgagattgctcaacacagagggggagattcaaatcgacggagtgagttgggactctatcaccctgcagcaatggcgcaaagctttcggggtcattccacagaaggtttttatctttagtgggacttttagaaagaatctggatccatacgaacaatggagcgatcaggagatctggaaagtggctgacgaagtgggcctacgtagcgtgattgaacagtttcccggaaagctggatttcgtcctggtggacggcggttgtgtgctatctcatgggcataagcagctcatgtgtctggccaggtccgtcctatcgaaggcaaaaattctgctcctggatgagccatccgcacacctggaccccgtgacttatcaaataatcagaaggacgctaaaacaggccttcgcggactgcacagtgatcctatgtgaacacagaatagaggctatgttagaatgtcagcagttcctggttattgaggaaaacaaagtgcgacagtacgattcaatacagaagcttctcaacgagcgttcactctttcggcaggcaatttcaccctccgacagggtcaaactcttccctcatagaaatagctcgaaatgcaagagcaaaccccagatcgctgcactgaaagaggagacggaggaagaagtccaagatacccgactt

SEQ ID NO: 10167 - DNA, 4440 bp, synthetic construct
  misc_feature 1..4440: note = source = /note="Description of Artificial Sequence: Synthetic coding sequence"
  source 1..4440: mol_type = other DNA
atgcaacgctcgccgctggaaaaagcgtccgtagtctccaagctgttcttttcatggactcggccgatccttcggaagggctacagacaacggctggaattgtccgacatttaccagattccctccgtggactcagcggacaatctcagcgagaaactggaacgcgaatgggaccgggagctcgcgtcgaagaaaaacccgaaactgatcaacgccctccgcagatgcttcttttggcggtttatgttctatggaatcttcctgtacctgggtgaagtgaccaaagcggtgcagccactcctgctcggacggatcatcgcctcctacgatccggataacaaggaggagcggtcgatcgccatctacctggggattggtctgtgccttttgtttatcgtgcgcactctgcttctgcacccggcgatatttggattgcatcacatcggaatgcagatgcggattgcgatgttctccctcatctacaaaaagactctgaaactgtcctcacgcgtgctcgacaaaatctcgatcggacaactcgtctcactcctgtcgaataacctcaataagttcgacgagggactcgcactggcgcactttgtgtggatcgccccactccaggtggctctcctgatgggactcatctgggagctccttcaggcgtcggccttctgcggcctcggcttcctcatcgtcctggctctgtttcaggccggactgggcaggatgatgatgaagtaccgcgaccagcgggcaggcaagatttccgagaggttggtgatcacctcagaaatgatcgaaaacatccaatcggtcaaggcatactgttgggaagaagccatggagaaaatgattgagaacctccgacagacggagctgaagctcaccagaaaggccgcttacgtgcgctacttcaacagcagcgctttctttttctccgggttctttgttgtgtttctctccgtgctcccttacgctcttatcaaaggaatcatcttgcgaaagatcttcactacgatctcattttgtatcgtgctccggatggccgtgactaggcagttcccctgggccgtgcagacttggtacgacagcctcggagcgatcaacaagatccaagacttcctgcaaaagcaggaatacaagaccctggagtacaacctgactaccactgaagtcgtcatggagaacgtgaccgcgttctgggaggaggggttcggagaactgtttgagaaagcaaagcagaacaacaacaatcgcaagacctccaacggggatgactcacttttctttagcaacttctcactccttggaacgccggtgctgaaggatatcaatttcaaaatcgagcgcggtcaactgctggccgtggccggatcgactggggctgggaaaaccagcctcctcatggtgatcatgggtgaattggaaccgtccgagggaaagataaagcacagcgggcgcatttcgttctgctcgcaattcagctggatcatgccgggaacgatcaaagagaatatcattttcggagtgtcctacgacgagtaccggtacaggtcagtgatcaaggcgtgccagctggaggaagatatttccaagtttgccgaaaaggacaatatcgtgcttggagaaggtggcattaccctgagcgggggccaacgcgcaagaatctccctcgcccgtgcggtgtacaaagatgctgatctgtacctgctggactctcctttcggctacctggacgtcctgactgaaaaggagatcttcgaaagctgtgtgtgcaagttgatggcaaacaaaacgcggatccttgtgacctccaaaatggagcatcttaagaaagccgataagatcctgatcctgcatgagggaagctcctacttctacggaacgttctccgagcttcagaacttgcaaccagacttttcgtcgaaactcatgggatgcgactcgtttgatcaattcagtgccgaaagaagaaactcgatcctgacggagactctgcatagattctcgctggagggagacgccccagtgagctggaccgagactaagaagcagtccttcaagcaaaccggagagttcggagagaagaggaagaattctatcctgaaccctatcaactctatccgcaagttttcgatcgttcaaaagacccctttgcaaatgaatggcattgaggaggactcggatgagccacttgagagacgcctgtcccttgtgccggattcggagcaaggggaagctatcctccctaggatctccgtgatcagcaccggaccgaccctccaggctcggcgcaggcagtcagtgctgaacctgatgactcactccgtgaaccagggccagaacatccatcgaaagaccaccgcaagcacccggaaagtgtcccttgccccacaagccaatcttactgagctggacatctacagtagaaggctctcccaggagactggccttgaaatctccgaagagattaatgaggaggatctcaaagagtgtttctttgacgatatggagtcaatcccagcagtgaccacctggaatacctaccttcggtacatcacggtgcacaagtcgctgatcttcgtgctcatctggtgtctcgtcatttttcttgctgaggtcgcggcgagcctggtggtgctctggctcctgggcaacaccccactgcaagataaaggcaactccacccactcccggaataactcctacgcagtgatcataacctcgacctcctcatactacgtattctacatctacgtgggagtcgcagacactctcctggccatgggatttttcaggggcctgcccctggtgcacactctgatcaccgtgtccaagatcttgcatcacaagatgctgcactccgtgctgcaggctccgatgtcaactctcaacacgctgaaggctgggggcattctgaaccggttctcgaaagatatcgccatcctcgatgacttgttgcctctcactatcttcgactttatccagctgttgctcattgtcattggcgctatcgccgtggtggcggtgttgcagccttacattttcgtcgccactgtcccagtgatcgtcgccttcatcatgctgcgcgcttacttcctccagacttcacagcagctgaaacaactcgagtcggaaggtcgctcccctatcttcacccacctggttacttcactgaagggcctgtggactctgcgcgcgttcggacggcagccatactttgaaactctctttcataaagctctgaacctccacactgctaactggtttctttacctgtcgaccctcagatggtttcaaatgcggattgaaatgatcttcgtgatcttctttatagctgtgacttttatctcgattctcaccactggggaaggagaaggacgggtgggaatcatcctgaccctcgcgatgaacatcatgtcaaccctgcaatgggccgtgaacagctcaatcgacgtggattcgctcatgagaagcgtgtcccgggtgtttaagtttatcgacatgcccactgaaggtaaacccactaaatcaactaaaccatacaaaaatggacagctctcgaaggtgatgatcattgaaaacagccatgtgaagaaggacgacatttggccgtctggcggacagatgaccgttaaggatctgactgctaaatacactgagggaggcaatgccatcctggaaaacatttcgttctcaatctccccgggacagcgcgtgggactgttgggacgcaccggaagcggtaagagcactttgctgagcgcttttctgcggctcctgaacaccgaaggggagatccagatcgacggagtgagctgggactcgatcaccctccagcagtggagaaaggcctttggcgtgatcccgcagaaggtgttcatcttctcaggtaccttccggaagaatctcgacccatatgagcagtggtctgaccaggaaatctggaaggtcgccgatgaagtggggctgaggtccgtgatcgagcagtttccgggcaagctggactttgtgctggttgatggaggatgtgtgctgagccacggacacaaacaattgatgtgtctggcgcgcagcgtcctgtccaaagccaagatccttctgctggatgagccgtcggcccacctggacccggtgacctaccagatcattcggcgcactcttaagcaggcgttcgcggactgtactgtgattctgtgtgagcatcgtatcgaagcaatgctggaatgccaacaattcctggtcatcgaagagaataaggtccggcagtacgattcaatccagaagctgttgaacgagcggagcctgttccggcaggctatctcgccgtcggatcgcgtgaagctctttccgcatcggaattcgtcaaagtgcaaatcaaagccacagattgcggctctgaaggaagaaaccgaggaagaagtgcaggacacccgcctg

SEQ ID NO: 10168 - DNA, 4440 bp, synthetic construct
  misc_feature 1..4440: note = source = /note="Description of Artificial Sequence: Synthetic coding sequence"
  source 1..4440: mol_type = other DNA
atgcagcgctcacctctagagaaggctagcgttgtgagcaaactgtttttctcttggactaggcctatcctgcgaaagggctacaggcagcgccttgagctgtcagatatataccagataccttctgttgactccgccgacaatcttagcgagaagctcgaacgggagtgggatagggaattggccagcaagaaaaacccaaagcttattaatgccttgcggagatgtttcttctggcgatttatgttttacgggatcttcctgtatctgggggaggtgacgaaagccgtgcagccgttgctattaggaagaatcatcgccagctacgatcccgacaataaggaggaacggtccattgcaatctatctgggcatcgggctttgcctgctcttcattgtccggacactgctgctccatcccgccatcttcggattgcatcatatcggaatgcagatgcgtatcgctatgttttccctgatttacaagaaaaccttgaaactctcctcccgagtgctcgataaaatctcaataggacagttggtgagtctcctctccaataacctgaataaatttgatgagggacttgcactggctcactttgtgtggatcgcgcccttgcaggtggcgcttctgatgggcctcatctgggagttgctgcaggcaagcgccttctgtggactcggtttcctaattgtgctcgctctgttccaggctggcctggggaggatgatgatgaaatatagggaccagcgcgccggcaagatatctgagaggcttgtcattacaagcgaaatgatagagaatatccagtccgtgaaggcttactgttgggaagaggccatggagaaaatgatcgaaaacctgcgacagacagagttgaagctgacacgtaaggcagcttacgtgagatattttaactctagcgccttttttttttcaggtttctttgtcgtctttctgtctgtgctgccttacgccttgatcaaaggaataatacttcggaagatcttcaccacgatcagtttttgcattgttctgcggatggctgttactcgccagttcccctgggccgtgcagacgtggtatgattcgcttggagccataaataagattcaggactttctgcaaaaacaggaatataaaaccttggaatataatcttacgaccacggaggtagtgatggaaaacgtaacggcgttctgggaagaggggtttggcgaactcttcgaaaaggcgaagcagaacaataataataggaaaacaagtaacggggatgattctctgtttttctctaacttttctctgcttggcactcctgtgttaaaggatattaactttaagatcgaaaggggtcagcttctcgccgtggcaggcagcacgggagccggcaagacgtccttgcttatggtaatcatgggagagctcgagccttcggagggaaaaatcaagcactccggacgaataagtttttgtagccagttcagctggattatgccggggaccatcaaggaaaacatcatttttggcgtgagttacgatgagtaccggtatagaagtgttattaaggcctgccagctggaggaagacatttcaaaattcgcggaaaaggacaacatcgtcttaggcgaaggaggcatcactttgagtggcggccaaagggcccgcatctccctggcacgggccgtgtacaaggatgcggacctttatctcctagacagccctttcggatacttggacgtcctgacggagaaggaaatatttgagtcatgtgtgtgtaagttaatggccaacaaaacccgcattctcgtcacctcaaaaatggaacatcttaaaaaggccgataaaattctgatattgcatgagggatcctcctatttctatggcactttttccgagctgcagaacttgcagcctgatttttccagtaagttaatgggatgcgattccttcgatcaattcagcgccgagcggcggaactccatcttgacagaaacactccatcgtttctcactcgagggcgatgctcccgtgagttggacagagacgaaaaagcaatcttttaagcagaccggtgagttcggcgaaaagcgaaagaattcaattttgaacccaataaactctattaggaaattcagcatcgtccaaaaaacacctctgcagatgaatggaatagaagaggatagcgatgagccgctcgagaggaggttatctctagtgcctgatagcgaacaaggtgaggcaattctcccgaggattagtgtgatatccactgggccaactctgcaggcccggcgacgtcagtccgtcctcaatctgatgacccactcagtgaaccagggccagaacattcacagaaaaaccactgcctctaccagaaaggtgtcacttgcccctcaggcgaatctcaccgaactggacatttactcccggaggctctcacaggagacgggacttgaaatatctgaagagataaatgaggaggatctgaaggaatgtttcttcgacgatatggaatccatacccgccgtaacaacatggaacacctacctgagatacataacagtgcacaagagtttgatttttgttctgatatggtgcctagtcatctttctggcggaggtggcagcctccttagtggtgctgtggctgctcggtaacaccccgctccaggataagggaaattcaacccacagtaggaacaattcctatgccgtgatcatcacatctacatcttcttattatgtgttttacatctacgtgggcgtggccgacaccctgctcgccatggggttctttcgaggtttgcctttggtgcacactctgattaccgtcagcaaaattctgcaccacaaaatgctgcacagtgtcctgcaagcacctatgtctacgctgaacactctgaaggcaggcggtatcctgaacagattttctaaggacatcgcaatactcgacgatctgctgcccctgacgatttttgatttcatacagttgctactcatcgtgataggagctatagcggtcgtggcggtgttgcaaccgtatatctttgtcgccactgttcccgtcatcgtagctttcattatgctcagagcctacttcctgcaaacatcccagcagctcaaacagctcgagtccgagggtaggtcccctatcttcacccacctggtgacttctctaaagggactctggactctcagggcgttcggtcgccagccctatttcgagactctcttccataaggccctgaatctgcacacagcgaactggtttctgtacctaagtacgcttaggtggttccaaatgaggatcgagatgatcttcgttattttcttcattgcagtcacttttattagcattcttactacgggggagggtgaaggacgagtcggaatcatcttaactctggctatgaacattatgtccaccctacaatgggccgtgaactctagtatcgacgtggactcacttatgagaagcgtgagccgagtgtttaagtttatcgacatgcctacagagggaaaacccacgaagtctaccaagccgtataaaaacggtcaacttagcaaggttatgattatagagaactcacacgtaaagaaggacgacatttggccatccggggggcagatgactgttaaggatctgacagctaagtacaccgagggcggcaacgcaatcctggagaatattagtttctctatttccccgggacagagagtggggcttttaggccggactgggtcaggaaaaagtaccttgctgagcgcatttctgcggctcctgaacactgaaggcgaaatccaaattgacggcgtgagctgggattcaatcaccttgcagcaatggcgtaaggctttcggggttattccacagaaggtgttcattttctctgggactttccggaaaaatctagacccctacgagcagtggtcagaccaagagatttggaaggtggctgacgaggtcggtctgcggagcgtcatcgagcaattccccgggaaactggatttcgtgctggtggacggtggctgtgtattgtcccatgggcacaaacagcttatgtgtctggcacggtctgtactgtccaaggctaaaattttactgctcgatgaaccttcagcgcatctagaccccgtgacctaccaaattatccggagaaccctaaagcaggcttttgctgactgtaccgtgatattgtgtgaacaccgcattgaggcaatgttggagtgccaacagttcttggtaatcgaagaaaacaaggtcaggcagtatgattcaattcaaaaactgctcaacgagcggtcactgttcaggcaggcgatcagccctagtgacagggtaaaactgttccctcaccggaatagctctaaatgtaaatccaaacctcaaattgccgcattgaaggaagagaccgaagaagaggtgcaggatactcggctg

SEQ ID NO: 10169 - DNA, 4440 bp, synthetic construct
  misc_feature 1..4440: note = source = /note="Description of Artificial Sequence: Synthetic coding sequence"
  source 1..4440: mol_type = other DNA
atgcaacgatcccctcttgagaaggcatccgtggtgtcgaaacttttcttttcttggacgaggccaattttgagaaagggatacagacaaagactggaactgtctgatatctaccaaatccctagcgtggacagcgccgataacctttccgaaaagctggaacgagagtgggaccgggaattggcctcgaaaaagaatccaaagctgattaatgccctgaggagatgttttttctggaggtttatgttttacggcatttttctctaccttggcgaagtcaccaaggcggtgcagcctcttctgcttggtcgaatcatcgcatcgtatgaccctgataacaaggaagagcggtccattgcaatttacctgggaattggactctgtctcctctttattgtcagaaccctgcttcttcatcctgcgatatttgggctgcaccacataggaatgcaaatgcgcattgccatgttctccctgatttacaaaaagactttgaaattgtctagccgtgtcctggataagatctcaatcgggcagctcgtatccttgttgagcaacaatttgaacaagtttgatgaaggtcttgcattggcacactttgtgtggatcgcccctctgcaggtcgcactgctcatgggactgatctgggagctcctgcaggcctccgcattttgtggactgggctttctgatcgtgctggcactttttcaggccggactgggaagaatgatgatgaagtacagagatcaacgggcaggcaagattagcgaaagacttgtgattactagcgagatgattgagaatatccagtcggtcaaggcatactgctgggaagaagcgatggaaaagatgatagagaatctgagacaaactgaactgaaactcactcgaaaggctgcatacgtgagatacttcaatagctctgcattctttttctccggcttttttgtggtctttctcagcgtcctgccgtacgcacttatcaagggaatcattcttagaaagatattcaccaccatttccttttgtattgtgctcagaatggcggttacgcgccaatttccatgggcggtgcaaacttggtacgacagtcttggagccataaacaagattcaggattttctgcaaaagcaagagtacaagacgttggaatacaaccttacgactacggaagtggttatggagaacgtcaccgcattctgggaagagggatttggggaactttttgaaaaggccaaacagaacaacaataacagaaagacctcgaacggggacgattccctgtttttcagcaacttttccctgctgggaactccagtgctgaaggacattaacttcaagatcgaaagaggccaactcctcgcggtggcgggaagcactggagcagggaaaacttccctgctgatggtgattatgggtgaacttgaaccaagcgagggaaaaatcaagcactcaggtcggattagcttctgtagccaattttcatggattatgccaggcaccattaaagaaaacatcatttttggcgtgtcgtatgacgaatacagataccgctcagtgatcaaagcatgtcaacttgaagaagatatttccaaattcgcggaaaaggacaatattgtgctgggtgaagggggaataactctctccggaggccagagagccaggatctcgctcgcacgcgcggtgtacaaagacgcggatctgtatcttcttgatagcccctttgggtaccttgatgtgctcaccgagaaggagatattcgagtcgtgcgtctgcaagctgatggcaaataagaccaggattctggttacctccaagatggaacatcttaagaaagccgataagattcttatcctgcatgaggggtcaagctacttctacggaacgttttcggagctgcaaaacctgcaaccggatttctcgtccaaactcatgggatgcgattccttcgatcaattttcggctgagagacggaactcgatactgaccgaaacccttcatcgctttagcctggagggagatgcccctgtctcgtggaccgaaactaagaaacaatcgttcaagcagaccggagaattcggggagaaacggaaaaactccatattgaaccctatcaactccattcggaagtttagcatcgtgcaaaagacgcctctgcaaatgaatggcattgaggaggattcagatgaaccacttgagcgcagactgtcacttgtccctgactcggaacaaggagaggcaattcttcctcgcatcagtgtgatctcgactggaccaaccctgcaagcacggcgcagacaatcagtgttgaatctgatgacccattccgtgaaccagggtcagaacatccaccgcaagactactgcatccactaggaaggtcagtctggctccccaggcaaatcttacggaacttgacatttactcaagacgactgtcgcaggagactggtttggaaatttcagaggagattaacgaagaagatcttaaggagtgcttttttgatgatatggagtctattcctgcagtgaccacttggaatacctacttgaggtatatcactgtgcacaagtccctcatttttgtccttatttggtgtctggtgatattcctggcggaagtcgcagcttcccttgtggtcctgtggctgctgggcaatactcctctgcaggataagggtaattcaacccactcacgaaacaactcctacgccgtcattatcacttcgacctcatcatactacgtgttttacatctacgtgggtgtcgcggatactttgctggcaatgggatttttccgaggtctgccactggtgcacacccttataacggttagcaaaattcttcatcataagatgctccactccgtccttcaggctccaatgtccaccctcaacactctgaaggcgggaggaattctgaatcgattctcgaaggacatcgcaatcttggatgatctgctgccactcactattttcgatttcattcagctgctcctgatcgttataggagccatagcggtggtggccgtccttcagccatacatctttgtcgccaccgtgcctgtcatcgtcgctttcatcatgttgcgcgcgtactttctgcagaccagccagcaacttaaacagcttgagtcggaagggcgttcacccatattcactcatcttgtgacgtcgcttaagggcttgtggacgctgcgcgcatttggtcggcaaccatacttcgaaactctgtttcacaaagctctgaatcttcataccgcaaattggttcctctacctttcaaccctgaggtggttccagatgcgaattgaaatgattttcgtgattttctttattgccgtgacttttatctccatcctgaccaccggtgaaggagaaggacgggtgggtatcattctgactctggcaatgaacattatgagcacccttcagtgggctgtgaactcgagcatcgacgtagacagcctgatgaggagcgtatccagagtgtttaagtttattgacatgcctaccgaagggaaacctactaagtccaccaagccctacaaaaacggtcagctcagcaaagtgatgataatcgagaattcgcatgtgaaaaaagacgatatctggccctcaggcggtcaaatgactgtgaaggatctgacggccaagtacaccgaaggggggaacgcaattctggagaacatttccttctccatatccccaggccagcgagtgggactgctgggccgaaccggtagcggaaagtcaaccctcttgtcagcctttcttaggctcctgaataccgagggtgaaattcaaatcgacggtgtttcgtgggacagcattaccctccaacagtggagaaaggcatttggggtgattccacaaaaagtattcattttctctggtacttttcggaagaacctggacccttacgaacagtggagcgaccaagaaatttggaaggttgcagatgaggtcggcctgcgcagtgtgatagaacaatttcccggaaagctcgatttcgtcctggtggatggtggttgtgtgttgtctcacggccacaagcagcttatgtgtcttgcaagatcggtcttgtcaaaggcaaagatacttcttctcgatgaaccttcggcacatctcgaccccgtgacctaccagattatccgtcgcactctgaagcaggcattcgcggattgtacggtgattctctgcgagcacagaattgaagctatgcttgaatgccagcaatttctcgtgatagaagaaaacaaggtgcgacagtatgattccatccagaaactgctgaacgaaaggtcactcttcaggcaagcaatctcgccttcggatcgggtgaagctcttcccccataggaactcctcgaagtgtaaatcgaaacctcaaatcgcagcactcaaagaagaaaccgaagaagaagtgcaagacacgcggttg

SEQ ID NO: 10170 - DNA, 4440 bp, synthetic construct
  misc_feature 1..4440: note = source = /note="Description of Artificial Sequence: Synthetic coding sequence"
  source 1..4440: mol_type = other DNA
atgcagcgcagcccactggagaaagcgtccgtcgttagcaagctgttttttagctggacacgccccattcttaggaaaggctatcggcagagactcgagctctccgacatctatcagattccatctgtagactccgctgataacctgtcggagaaacttgagcgagagtgggaccgcgagttggcaagtaaaaagaatccaaagctcattaatgcattgagacggtgtttcttttggcggttcatgttttacgggatcttcctctatctgggcgaagtgaccaaggctgtccagccgcttctgctgggccggatcattgcctcctatgacccagacaacaaagaagagcgctccatcgcaatatacctgggaattggcttatgcctcctgtttatagtgcgcacactgctgctccatcctgctatatttggacttcatcatattggaatgcagatgcggatcgccatgtttagcctgatttacaaaaaaacactgaagctgtcatcgcgggtcctagataagatttccattgggcagctcgtgtccctgctgtcaaacaacctgaacaaatttgatgaaggtctcgctctcgcccactttgtctggattgcacccttgcaagtggccctgcttatgggactgatttgggagctgctacaggccagcgccttctgtggcctgggcttcttgatcgttctggcgttatttcaagctggactgggaaggatgatgatgaagtacagagaccagcgcgccggcaagatctccgaacggttagttattacctcagagatgatcgagaacattcagtccgtcaaggcatactgctgggaggaggctatggaaaaaatgattgagaacctgcgccagaccgaattgaaactcaccagaaaggccgcgtacgtccgatatttcaactcctccgcctttttcttcagtggttttttcgtggtgttcctttccgtgctgccttacgcgctaataaaagggattattctccggaaaatttttaccaccatcagcttctgcatcgtcttgagaatggcggtgacccggcaattcccatgggctgtgcaaacctggtacgactctttgggcgcaatcaataagattcaggacttcctgcagaagcaggagtacaagactttggagtacaacctcaccaccactgaagtcgtaatggagaacgtcactgccttctgggaggagggttttggcgagctgttcgagaaagcgaagcagaacaacaataatcgcaaaacttcaaacggtgatgacagcttattcttctctaatttctctcttttgggtacccctgtgctgaaggacattaatttcaagatagagagaggccagctgctcgctgtcgctggatccaccggggcaggaaagacctcactgttgatggtaattatgggggagctcgaacctagcgagggcaaaattaagcactcaggacgaatctccttctgtagccagttttcttggatcatgcccggcacaataaaggagaacattattttcggcgtgtcatacgatgagtaccgctatcggtccgtgatcaaggcatgccagctcgaggaagacatctctaaatttgctgagaaagacaacattgttctcggcgaaggtgggattaccctgtcagggggccaacgggcccggatctctctggcccgggccgtatataaggacgccgacttgtacttacttgattcccctttcggttacctggacgtcctgactgagaaggagatatttgagagttgtgtgtgtaagctgatggccaataaaacccgcatcctcgtcaccagtaagatggaacatcttaagaaggcggacaagatcctgattttgcatgaaggatcatcctacttctacggaactttttcagaactccagaacctccaacccgatttctcttccaagctcatgggatgcgatagcttcgatcaattcagcgccgagagacgaaattcaattcttaccgagactttgcaccgcttcagcctggaaggcgacgcaccagtgtcttggactgaaacgaaaaaacagagcttcaagcaaacaggggagtttggggaaaagcgtaagaactcaatcctcaatccaatcaactccatccgcaagttttctatcgtccagaagacccccctgcagatgaatgggatcgaggaggatagtgatgagcctctggagcggagactgtcactagtgccagactccgaacagggggaggccattttacctcgcatcagcgttatctccacaggacctacacttcaggcgaggagaagacagtcggtgctcaacctgatgacccactccgtcaaccaggggcagaatattcatcggaagacgaccgcctccacgagaaaggttagcctagcccctcaggctaatttgacggaactggacatttattcgcgcaggctgtcccaggaaacaggtctcgagatttcggaggagattaatgaagaggacctgaaggaatgcttctttgacgacatggaatccattcccgccgtcactacctggaatacatacctgcgatacatcaccgtgcacaagagcttgatattcgtactaatatggtgccttgtgatattcctggcagaggtggccgcatctcttgtcgtcttgtggttgctgggtaacacacctctgcaagataaaggtaacagtactcactcacggaataactcttatgctgtcatcatcaccagcacatcgagttactacgtgttctatatctatgtcggcgtggcagatactctactagccatggggttctttcgtggactgcctctggttcatacgttgattaccgtttccaaaattctgcaccacaagatgttgcactctgtcctacaagctcctatgagcaccctgaatacccttaaagcaggaggcattctaaatagattctcgaaagacatcgcaattctggatgaccttcttccgcttacaatctttgactttatccaactcctgctcatagtgataggggcaatcgcagtagtggcagtcctacagccttatattttcgtggctaccgtgcccgtgatagtggccttcatcatgttgagggcttacttcttacaaaccagccagcagctcaaacaactggaatctgaggggaggtccccaattttcacacaccttgtcacctccctcaagggcctatggaccctgagggcctttggtagacagccctactttgagaccctcttccataaagcgctgaacctgcacacagcaaactggttcctgtatctttccacactgaggtggtttcagatgagaattgaaatgatttttgtcattttttttatcgcagtgacattcataagcatcctaacaacgggggagggcgaaggccgggtcggaattattcttacgctggcaatgaatataatgtcaactctccaatgggccgttaatagtagtatagacgtcgattcactgatgaggtccgtgtccagagtgttcaaatttatcgacatgccaaccgaagggaaaccaaccaaaagcactaagccatacaaaaacggacagctatctaaagttatgattatcgaaaactcccacgtaaagaaagatgatatctggccaagtgggggtcagatgacagtgaaggacctgaccgcaaaatatactgaggggggcaacgctatccttgaaaacattagctttagcatcagtcctggccaacgggtgggcctcctcggtaggaccggttctggtaaatccaccctgctgagcgccttccttcgcctgctcaatactgaaggcgagattcaaatcgatggcgtctcttgggatagtatcactctccagcagtggcggaaagccttcggagtcattccacagaaggtctttatattcagcggcacgtttcggaagaatttggacccctacgagcagtggtccgaccaagaaatctggaaagtggcagacgaagtagggctgaggagtgttatcgagcaattccccgggaaactcgattttgtcttagtcgatgggggatgcgtgctgtctcacggacataaacagctgatgtgcttggcccggagcgtcctcagcaaagctaagatcctcctgctcgacgagccaagtgcccatttggaccctgtgacatatcagattatccgcaggacactcaagcaggccttcgcagactgtacggttattctgtgcgagcatcgcattgaagccatgctagagtgccagcagttcctagtgatagaagagaataaggtgcgacagtatgactctatacagaagttattgaacgagagatctctgttccggcaggctatatcaccaagcgaccgcgttaagctcttcccacataggaactcttcgaagtgtaaatcgaaaccacaaattgcagcgctgaaggaggagacagaagaggaagtgcaggatacaaggctt

SEQ ID NO: 10171 - DNA, 4440 bp, synthetic construct
  misc_feature 1..4440: note = source = /note="Description of Artificial Sequence: Synthetic coding sequence"
  source 1..4440: mol_type = other DNA
atgcaacggtcaccgctcgaaaaagcatcagtggtaagcaagctcttcttctcctggacgagaccgattcttcgaaagggatatcgacaaaggttggagctcagcgatatttaccaaatcccatcggtggattcggcagataacctgtcagaaaagctggagcgggagtgggaccgcgagcttgcaagtaagaagaaccctaagctgatcaatgccttacgcaggtgcttcttttggagattcatgttctatggtatattcctgtacctcggcgaggtaaccaaagctgtccagcctctgctcctggggcggatcatcgccagttatgatccggataacaaggaggagcgctccatcgccatctacctcggaatcggcctgtgtctgctttttatcgttcgtaccctcctgctccacccggctatctttggcctgcaccatattggcatgcaaatgcgaatcgccatgttttcactgatctacaagaaaactctcaaactgtcttctcgggtccttgacaaaattagcattggccagctggtttctttgcttagcaacaatctcaacaagttcgatgaaggactcgcactggctcatttcgtgtggatagcccccctacaggtagcccttttgatgggcctcatttgggaactcctgcaggccagcgccttctgcggcttaggtttcctcatcgtactggctctttttcaggcaggtctcggaaggatgatgatgaagtatcgcgaccaacgggccggaaagatcagcgagcgcttagtgattaccagcgagatgatagagaacatccagtccgtcaaagcatactgttgggaggaagcaatggagaagatgatagagaatctgagacagaccgagctgaagctcactagaaaggccgcctacgtccgttactttaacagctctgcattcttctttagcggattcttcgtggtctttctaagtgtattgccttacgctctcattaaaggaatcatattgcggaagattttcacaactataagcttttgtatcgtgttgagaatggccgtcactcggcaattcccatgggctgtgcaaacatggtacgacagcttaggagcaattaacaagattcaagattttctacagaagcaggagtacaagaccctcgaatacaacctgaccacgacagaagtggtcatggagaacgtgaccgcattctgggaagaaggatttggcgaattatttgaaaaggcaaaacagaacaataacaatcggaagacaagcaacggggacgactccctgtttttttccaacttctccctcctaggcacacctgtgcttaaggatatcaatttcaaaattgaacgtgggcaactgcttgcagtagctggctctactggagcgggtaagacaagtctgctgatggttattatgggcgagctggagccctccgaggggaagataaaacacagcgggaggatcagtttttgctcgcagttctcatggattatgccgggaacgataaaggaaaatattatctttggagtgtcttacgatgagtatcgctaccggagcgtgatcaaagcttgccaattagaggaagacatatctaaatttgccgaaaaggataacattgtactgggagagggaggaattaccttaagtggtggccaacgggctcgaatatcactagcacgagcagtgtataaagacgccgatctctacctactggattctccatttgggtatttggacgtcctcacagaaaaagagatattcgaatcttgtgtgtgcaaactcatggcaaataaaacccgcatcttggtgacaagcaagatggagcacctgaagaaagccgacaaaattctgattttgcacgaaggatcaagctacttctatgggactttctccgagctgcaaaatctgcagccagactttagctcgaagttgatgggatgcgatagcttcgaccagttctccgctgaacgacggaactcaatcctgacagagacgttacaccgcttctcattggaaggcgatgccccagtctcctggacagagaccaagaagcagagctttaagcagaccggcgagttcggagaaaagaggaaaaattcaatcttaaatcctataaactcaatccgcaagttctccatcgtccagaagacccctctgcagatgaatggaattgaagaggatagcgacgagcctctggagaggcgcctctctctggtgccagacagcgagcaaggcgaagcaatcctccctcgcatatctgttatcagcactgggcccacgcttcaggcaaggcgccgtcagtccgtgctgaacctcatgactcattccgtgaatcagggacagaatatccacagaaaaacaactgccagcacccgtaaggtgagcctcgctccccaggccaacttaaccgaattggatatttattctaggagactgtcccaggagactggccttgagataagcgaggagattaacgaggaggacttaaaagaatgttttttcgatgatatggagtcaatcccagccgtcaccacatggaacacttacctgcgatatataacagtgcataagtcattaattttcgtgctgatctggtgcttggtcatattcctcgctgaggttgccgccagcctggttgtactgtggttattaggtaacactcccctacaagacaaggggaactccacccacagccgcaataatagttacgctgtgataattacaagcacttcatcatactacgtgttctatatttatgtcggtgtcgctgacacccttctggccatgggattttttagaggcctgcccttagtccatacgctcatcactgtttctaaaattctgcatcacaaaatgctccatagcgttttgcaggccccaatgagcacactcaataccctgaaagccggggggatccttaatcgattctcgaaagatattgcgatcctcgacgatcttttaccattgacaatcttcgatttcatacaactgctcctgatcgtgatcggcgctatcgcggtggttgccgtattacagccctatatctttgtggctaccgtgcctgtgatcgtggcttttatcatgttacgcgcttacttcttacagacctcccaacagctaaaacaactggagtcagaaggacggtctcccatatttactcacctggtgactagcctgaaagggctgtggacgttgcgcgcatttggcaggcagccttacttcgagaccctatttcataaagccctcaacctgcatactgctaactggtttctgtatctcagtaccctgcggtggtttcagatgagaattgaaatgattttcgtcattttctttatcgctgttacattcatttctattcttactaccggggaaggcgaagggcgggtgggcatcatacttacactggccatgaatatcatgtcgacattgcagtgggctgttaactcatccatcgacgtggactccctgatgcgatcagtgtccagggtgtttaagtttatcgatatgcctaccgagggtaaaccaaccaagtcaacaaaaccctataagaatgggcaactttccaaggttatgatcatagaaaactctcatgtcaagaaggacgacatatggccttccgggggccaaatgaccgtgaaggacctcaccgccaaatacaccgagggtggaaatgccattctggagaacatcagcttctccatcagcccagggcagcgagtgggccttctgggacgcaccggctctgggaagagcaccctgctgtctgcctttctccggctcttgaacactgagggcgaaattcagatcgatggcgtctcatgggactctatcaccctccagcagtggcggaaagctttcggtgtaataccccagaaggtatttatttttagtggcacgttcagaaagaacctcgatccgtatgaacagtggtcagaccaggagatctggaaggtggcggatgaggtgggactgcgatcagtgatcgaacagttccccggcaagttagatttcgttttagtagatgggggttgcgtgttatcccatggtcataagcagcttatgtgcttagcacggtccgttctctctaaggcgaagatactcttgctcgatgaaccttctgcccacctagaccccgtgacataccagattatcagaaggacacttaaacaggcattcgcggattgcaccgtgattctgtgtgaacatcggatcgaggcaatgttggagtgccagcaattcctggtgattgaagagaataaggtcagacagtatgactctatacaaaagttactgaacgaaagatccttgttcaggcaagcaatctcccccagcgaccgggtaaaactgttccctcaccgtaatagttccaaatgtaagtctaagccgcagatcgccgctctgaaggaagagacagaggaggaggtccaggacacgagactc

SEQ ID NO: 10172 - DNA, 4440 bp, synthetic construct
  misc_feature 1..4440: note = source = /note="Description of Artificial Sequence: Synthetic coding sequence"
  source 1..4440: mol_type = other DNA
atgcagcgttcaccactggagaaggcaagcgtggtgagcaaactcttcttctcttggacgcgacccattctacggaagggatacagacagcgcctcgagcttagtgatatataccagattcctagtgttgactctgccgacaatttatccgaaaaactggagagagagtgggatagggagctggccagcaagaagaatccgaaactgataaatgccctgcgtcggtgtttcttctggaggttcatgttttatggtatttttctgtacctgggcgaggttacaaaagccgtccagccattgctgctcggtagaattatagcctcctatgacccagataataaagaggaacgcagtattgccatttacctgggcattggcctgtgcctgctctttattgttcggacactgctgctgcacccagcaatattcggactacaccatatcggcatgcagatgcgaatcgccatgttcagtctgatttacaagaaaaccctgaaactttcctcgcgggttcttgataagatttctattgggcagctggtctctcttttgagtaataacctgaataagtttgatgaaggactggcacttgctcacttcgtgtggattgcacccctccaggtagccttattaatgggtctgatttgggagcttctccaggcctctgctttctgtgggcttgggtttctgattgtgttggccctgtttcaggctggcctggggcggatgatgatgaagtaccgggaccaacgcgccggaaagatatcggagagactagttataacaagcgaaatgatcgaaaacatccagagcgttaaggcgtattgctgggaggaggccatggaaaaaatgatcgaaaacttgcgccagaccgaactaaaattgacgcgaaaagccgcatatgtgaggtatttcaattcatctgccttctttttcagtggtttcttcgtcgtgtttttatccgtcctcccctatgccctgatcaaaggtatcattctgcgcaagatattcacaactatctccttctgtattgtcctccgcatggctgtcacaaggcagtttccatgggcagtgcaaacgtggtacgactcacttggagccattaacaagattcaagattttctgcaaaagcaagaatacaaaaccttagagtataatctcactactacggaagtggtgatggagaacgtgacggctttttgggaggaaggattcggggaattgtttgaaaaagctaaacagaacaataacaacagaaaaacgtcaaatggagacgatagcttatttttcagcaacttttccctgttgggaacaccagttctgaaagatattaattttaagattgagcgagggcagctgctggccgtcgcagggagtaccggagcagggaagacctcacttttaatggtgattatgggagagttggagcctagcgaggggaagatcaagcactcgggtcggatcagcttctgctcccagttctcatggattatgcccggcacgattaaggagaatatcatttttggagtgtcttacgacgaataccgatatagatccgtgatcaaggcctgccagctggaagaagacatctccaagtttgctgagaaagacaatatagtccttggtgagggcggcataacactctcaggcggacagagggcacgaatctcattggctcgggcagtatataaagacgcagacctctatttgctggactcacccttcgggtaccttgacgtccttacagaaaaggagatcttcgagtcgtgtgtgtgcaagctgatggcaaacaagacgaggatcctggttacctccaagatggagcacttgaaaaaggcagacaagattcttatactgcacgaaggaagctcctatttttacggaacattttctgaactccagaacttgcagccggatttcagttctaaactcatgggctgtgactcttttgatcagttcagtgctgagcgtaggaatagcatactaacagagaccttgcatagattcagtttggagggggacgctcccgtcagctggaccgagacaaaaaagcaatcattcaaacagaccggtgagttcggcgagaagcgaaaaaacagcatcctgaaccccattaactccattcgtaagttctccattgtgcagaagacgccactacagatgaatggaattgaggaagattctgacgaacccctggaacggcggttgtcattagttcctgacagcgagcaaggggaggccatcctcccccggatctccgtgatttctaccggtcccaccttgcaggctcggaggcggcagtctgttttgaacctgatgacccacagtgtaaaccaagggcagaatatccaccggaagacgacagcttcaaccagaaaggtcagcctcgcaccccaggccaacctgacggaattagatatctactcacgccgcctgtcacaagagactggcctggaaattagcgaagaaatcaacgaggaagatctgaaggagtgcttctttgacgatatggagagcattcccgcagtgaccacctggaatacttaccttcgttatattacagtccacaaaagtctgatattcgtactaatctggtgtctggtgatttttctggcagaagtcgccgcttccctggttgtcctctggttacttggcaacaccccccttcaagacaagggcaattctacacatagtagaaacaactcatatgcagtgatcatcacatccaccagtagctactacgtgttctatatctacgtgggagtcgccgacacactgctggccatgggcttttttagaggattacccttagttcacactctgattaccgtctccaagatccttcatcacaaaatgctgcactctgtcctgcaggcccctatgagcacattaaataccctaaaggccggcggcatcctgaaccgcttctccaaggacattgccatcctggatgatttgcttccattgacaatattcgattttatacagctcctactgattgtgataggcgcgattgctgtggtggctgtgcttcaaccgtatatttttgttgccacagtccctgtgatagtggcatttatcatgctgcgggcctactttcttcaaacaagtcagcaactgaagcagcttgagagtgagggaaggagccccattttcacccacttggtgacttcgctgaaaggcttgtggacgctcagagcttttgggagacaaccatacttcgaaaccctgttccacaaggctctcaacctgcatactgctaattggttcctgtatctttcgactctgcggtggtttcaaatgcgaatagaaatgatctttgtgatatttttcattgcggtgacctttatttcaatcctaaccaccggggaaggagagggaagagtcggaataattctgacgttggcaatgaacatcatgtccacgctccagtgggctgtgaattcctctatagacgtcgacagcctcatgcgaagtgtgagccgtgtgttcaaattcatcgacatgcctacggaaggtaaacccactaagagtactaaaccttacaagaacggccagctttctaaagtcatgatcattgagaactcccatgtgaaaaaagatgacatttggccgtccgggggccagatgacagtgaaggatctcaccgctaagtacaccgaaggcgggaacgcaatccttgagaatattagcttctctatttcccctggccaacgggtgggcctgctgggccgtacaggcagtgggaaaagcacgctgttgagcgcgttcctgaggttgttaaacaccgagggtgagatacagatcgatggtgtcagctgggactctatcactttacagcagtggagaaaggccttcggagtgattccgcaaaaggttttcatcttcagcggcacttttcgcaagaatctagacccgtacgaacagtggtctgatcaggagatctggaaggttgccgacgaagtggggctccggtcagtgatcgagcagtttcccgggaaactggatttcgtactcgttgacggcggctgcgtgctctcccacgggcataagcagcttatgtgcctggcaaggtcagtcctcagcaaggcaaagattctcctcctggatgagccatcagctcaccttgatccagttacctatcagatcatccggcgaactctcaaacaggctttcgcagattgcaccgtgattctgtgtgagcaccgcattgaagctatgctggaatgccagcagttccttgttatcgaagagaataaagtccggcagtacgacagcatccaaaagctgctcaacgagcggagcctttttaggcaagccatcagtccatctgacagggtcaagcttttcccccacaggaacagttcaaaatgtaagagtaagccacagatcgcggccctgaaggaggagaccgaggaggaggtgcaggatacacgactc

SEQ ID NO: 10173 - DNA, 4440 bp, synthetic construct
  misc_feature 1..4440: note = source = /note="Description of Artificial Sequence: Synthetic coding sequence"
  source 1..4440: mol_type = other DNA
atgcagcggtcaccacttgaaaaggcctcagtggtgtcgaaacttttcttctcgtggactcgaccaattctccgaaaaggatacagacaaagacttgaactctcagacatttatcagatcccctccgtcgacagcgctgataacctgtccgagaaattggaacgtgagtgggatcgggaattggcctccaagaagaatcctaagctgattaatgcacttagaagatgcttcttttggaggtttatgttttacggaattttcctgtacctgggggaggtgaccaaagcagtgcagcccttgctgctgggaagaattatcgcttcctacgatcctgataacaaggaagaacgcagcatcgcaatttaccttggaattgggctgtgtctccttttcatcgtccgaaccctgcttcttcaccccgcaatctttggtctgcatcacatcggaatgcagatgagaattgcaatgttctcgcttatctacaagaaaaccctcaagctgtcatccagggtgctggacaagattagtattggacagctggtatcccttctttcgaacaaccttaacaagtttgacgaaggcctggcgttggcacactttgtctggatcgcaccgctccaagtcgctcttctgatgggactgatttgggaacttctgcaggcaagcgcattttgtggtctgggttttctcatcgtgcttgcacttttccaggcaggtctggggagaatgatgatgaagtaccgggatcagcgagctgggaagattagcgagcgactggtgatcactagtgaaatgattgagaatattcaatcagtgaaggcatactgttgggaagaagccatggagaagatgatcgaaaacttgcgccaaaccgaactcaaacttacccgcaaggccgcatacgtgcgctactttaactcgtcggctttctttttcagtggctttttcgtggtgttcctgagcgtccttccatacgcattgattaaaggtatcattctgagaaagatctttaccactatttcattttgtattgtgctgcggatggcagtgaccaggcagtttccctgggccgtccaaacctggtacgacagcctgggtgcaattaacaagattcaagatttcctgcaaaagcaagagtacaagactctggagtacaacctcactactactgaggtggtaatggaaaatgtgaccgcattttgggaggagggatttggtgagctttttgaaaaggctaaacaaaacaacaacaaccgaaagacgtcaaacggagacgattcgcttttcttcagcaacttctcattgcttggtactcctgtgcttaaggacataaacttcaagatagagcgcggacagcttctggctgtggccggctcgacgggtgccgggaaaacgtcgcttctgatggtcatcatgggtgaacttgagccgtcagaaggaaagattaagcattcgggacgcatttcattttgctcacaattctcgtggataatgccgggcaccattaaggaaaacatcatctttggtgtgtcctacgacgaatatcgatacagaagcgttatcaaggcatgccaacttgaagaagatatttcaaagtttgcagagaaagacaatattgtgttgggagaaggtggaatcaccctctccggcggccaaagagcaagaattagcctggcccgtgcagtgtacaaggacgcggatctttaccttcttgattcgccatttggatacctcgatgtgctgactgaaaaagagatattcgaaagctgtgtctgtaaactgatggcgaataagactagaatccttgtgacttccaagatggagcacctcaaaaaagcagacaaaatacttatactccacgagggatcttcgtacttttacggaaccttttcagagctgcaaaaccttcaacctgatttcagctcgaagctgatgggttgcgacagctttgatcaattcagcgcagaacgcagaaattcgattctgaccgaaacccttcataggttctccctcgaaggcgatgcaccagtctcatggaccgagactaaaaagcaatcctttaagcagaccggtgaatttggcgaaaagcgcaagaactccatactgaatccgatcaatagcattagaaagttttcaattgtccaaaagactccgctgcagatgaacggaattgaagaggattcagacgagccacttgaacgacgtctctccctggtgccagattcggagcagggagaagcaatacttccaagaatttccgtcatttcgaccggacctaccctgcaggctaggcgacgtcagtcggtcctgaatctcatgactcattcagtcaaccaaggtcaaaacattcatagaaagactaccgcaagcaccagaaaggtgtcgctggcaccacaagcaaatttgactgaacttgacatctactctcgccgactgagccaggaaactggtctggaaatctccgaagagattaacgaagaggacctgaaggaatgtttctttgatgacatggagtccattccggcagtcactacctggaacacttatctgagatacatcactgtccacaagtccttgatttttgtgctgatatggtgtctggtgattttcctggccgaggtcgccgctagcctcgtcgtgctgtggctccttgggaatactcctcttcaagataagggaaatagcactcattcgcggaacaattcgtacgcggtgatcattacgagcacttcgtcgtactacgtgttttacatctacgtgggggtggccgacaccctgctggcaatgggattctttcggggtttgccccttgtgcataccctgataactgtgtcgaagatcctgcaccacaagatgctgcattccgtgctgcaagcccctatgagcactctgaatacgcttaaggcaggaggtattcttaacagattttcgaaggatatcgcgattctggatgacctcctcccacttactattttcgactttattcaacttcttcttattgtgataggcgcaatcgcggtggtggctgtgctccagccatacatttttgtggcaactgttccagtgattgtggcgttcatcatgcttagggcgtactttcttcagacctcgcaacagctgaagcaacttgaatcggaagggcggtcgcccattttcacgcatctggtgaccagcctcaaaggcctctggaccctgagagcatttggtagacaaccttacttcgagactctttttcataaagccctgaacctccacaccgcaaactggttcctttacctttccaccctcagatggtttcagatgaggatagagatgatctttgtgatcttctttatcgcagttaccttcatttcaattcttacgaccggagaaggggaaggcagggtggggatcatcctgaccctggcaatgaacatcatgtccactttgcaatgggcagtgaattccagcatcgatgtggactcacttatgagatccgtatcaagagtgtttaagtttatcgacatgcccactgaaggcaagcctactaagtcaaccaagccttacaagaatggccaactttcgaaggtgatgattattgaaaactcccatgtgaagaaggacgatatttggccttcaggaggtcagatgactgtgaaggatcttaccgcaaagtatacggagggtggaaatgccattctggaaaacattagcttttccatttcacctggtcagagagtggggctccttggtcgcaccggctcgggaaagtcgactctgctgtcggcatttcttagactgttgaacactgaaggtgagatacaaattgacggtgtctcctgggattccataaccctccagcaatggcgtaaggcattcggagtcatccctcaaaaagtgtttatcttctcaggtacctttagaaagaatctggacccatacgagcagtggtcagatcaggaaatctggaaagtggccgatgaggtgggattgcgcagcgtgatcgaacaattcccaggaaagctggactttgtgctggttgatggtggatgtgtgctgtcgcatggacacaagcaactgatgtgtcttgcccgttcggtgctttccaaagcaaagatactgctcctcgatgaaccgtccgcccacctggatcccgttacttaccaaatcatcagacgaaccttgaagcaagcatttgcggattgtactgtcatcctgtgtgaacatagaatcgaagcaatgctggaatgccaacaatttcttgtcattgaagaaaacaaggttagacagtacgattccattcaaaagctgctgaacgagaggtccctttttcggcaagctatctccccatcggatagagtgaaactgttcccacatagaaattcctcgaagtgtaagtcgaagccccagattgccgcccttaaggaagaaactgaggaggaggtccaggataccagactt

SEQ ID NO: 10174 - DNA, 4440 bp, synthetic construct
  misc_feature 1..4440: note = source = /note="Description of Artificial Sequence: Synthetic coding sequence"
  source 1..4440: mol_type = other DNA
atgcaaaggtcgcccctggagaaggcctcagtggtgtctaagctgttcttttcgtggacccgtccaattctccgaaagggataccgtcagagactggaactttcagacatttatcaaatcccatcggtcgattcggcggataacttgtcagaaaagctggaaagggaatgggatagggaactggcaagcaagaaaaatccaaaactcattaatgcactgaggagatgttttttctggagatttatgttttatggtatcttcctgtaccttggagaggtcacgaaggcagtgcaacccctgctgcttggtagaatcatcgcatcatacgatcctgacaataaggaggaacgatccatcgcaatctacctggggattggtctttgtctccttttcattgtgcgtacgcttcttctgcatcctgcaatcttcggactgcatcatattggtatgcaaatgcggatcgcaatgttctcattgatttacaagaaaactctgaagctgtcctccagggtccttgacaagattagcattggacagctggtgagcctgctttcgaacaacctcaacaaatttgacgagggacttgcacttgcacacttcgtgtggatagcccctcttcaggttgcactgctgatgggacttatctgggaacttctgcaagcatccgcattctgtggtcttggatttcttatagtgctggctctgtttcaggccggtctgggacggatgatgatgaagtaccgagatcagcgagcaggaaagatatcggaaaggcttgtcataacctccgagatgatcgagaacattcaaagcgttaaggcctactgctgggaagaagccatggagaagatgatcgaaaatctgcgccagaccgagttgaagctgacccggaaagcagcatacgtgaggtacttcaactcatcagcattcttcttttctggttttttcgtcgtttttctttccgtgctcccctacgcactcatcaagggtatcattctccggaagattttcactaccattagcttttgtatcgtgctccggatggcagtcacccgacagtttccctgggccgtgcaaacgtggtacgacagccttggcgcaattaacaagattcaggattttcttcaaaagcaggaatacaaaacgcttgagtacaatcttactactaccgaagtcgtgatggaaaacgtgactgccttttgggaagagggatttggtgagctgttcgaaaaggctaaacaaaacaacaataatcggaaaacgtccaatggagacgactcccttttcttctctaacttttccctgcttgggactcctgtcctcaaggacatcaatttcaagatcgagcgtgggcagctgctggctgtggcaggatcgacgggagccggtaagacctcacttctgatggtgatcatgggagaactcgaacctagcgaaggaaagattaagcattcaggccgcatctccttttgttcgcaattttcctggattatgcctggaactatcaaggagaacattatcttcggtgtgtcgtacgatgagtacagatacaggtcagtcattaaagcgtgccaactggaggaggatatctccaaatttgcagaaaaggacaatattgtgctcggagaaggtggcattactctgagcggaggacagagagcgaggattagcctggcaagagcggtctacaaggatgcagatctttacctgctcgacagcccatttggatatcttgatgtgctcactgaaaaggagatctttgagtcgtgtgtgtgcaagctcatggcgaataagactagaattcttgtcacttcgaagatggagcacctcaaaaaggccgataagatcctgattttgcatgaaggatcatcatacttctacggaaccttttcggagctgcagaacctgcaacctgacttcagctccaagctcatgggttgtgattcatttgatcagtttagcgctgaacgtcggaattcaatcctgacggaaaccctccatagattttcgttggaaggagacgcaccggtttcgtggacggaaactaaaaagcagtcatttaagcaaaccggtgaatttggggagaaacgcaagaattcaattctcaaccccatcaatagcatccgcaagttctcgatcgtgcagaaaactccactccagatgaatggtattgaagaggattcggatgaaccacttgaaagacgactgtcactggtgcccgattcagagcaaggggaggcaatccttcctcggatcagcgtcatctcaaccgggcctactctgcaggcaagacggagacaatccgtgctgaatcttatgactcatagcgtcaatcaaggacaaaacattcacagaaagactaccgcatccaccagaaaagtctcccttgcgccgcaagcgaacttgaccgaactggatatctactcgcgtcgcctctcgcaggaaactggtttggaaattagcgaagaaatcaatgaagaagatcttaaggagtgttttttcgacgatatggaatcaatccctgcagtgactacttggaacacctacctgagatacatcactgtccataagtcccttatcttcgtcctcatttggtgtcttgtgatttttctcgcagaagtggcggcttcgctggtggtgctttggctgctcggtaatactcccctgcaggacaagggaaattcgactcattcgagaaacaattcgtacgcggtgataatcacttcgacttcctcgtactacgtgttctacatttacgtgggagtcgctgatactcttcttgcgatgggcttttttcgaggactccccctggtccatactctcataaccgtctcgaagattctgcatcataagatgcttcattccgtgttgcaagcacctatgtccactcttaataccctgaaggccggcgggattctgaacagattttcgaaggatatcgctatcctcgacgatctcctcccactgaccattttcgactttattcaactgctgctgatcgtgatcggagcaattgcagtggtcgccgtgcttcaaccatatatcttcgtggccactgtgccagtgatcgtcgccttcatcatgctccgcgcatactttctccaaaccagccaacaacttaagcaacttgaaagcgaaggacgctcgccaatctttacccatcttgtgacctccctgaagggcctgtggaccctgcgggccttcggtcgccagccgtattttgaaaccctttttcacaaagctctcaacctccacactgcaaattggtttctgtacctgtcgacgctgagatggtttcagatgcgcatcgaaatgatcttcgtgattttctttatagcagtgactttcattagcatcctgactaccggggaaggggaaggtcgtgtcgggataattcttactcttgcgatgaacattatgtcgactctgcagtgggccgtcaactcgtcgattgacgttgactcccttatgagaagtgtctcacgcgtgtttaagtttatagatatgcccaccgagggaaagccaactaaatcgaccaagccctacaaaaatggccaactcagcaaggtcatgattatcgagaattcccatgtcaagaaagacgacatttggccttcaggcggtcagatgaccgtgaaggatctgaccgcaaagtacaccgagggtggcaacgcaatactcgaaaacatatcctttagcatcagcccgggccaacgcgtgggactcctgggtagaaccggatcgggcaagtcgacccttctgagcgcctttctgcgcctcctgaacaccgaaggcgagatccagatcgatggagtgtcgtgggactcgatcacccttcagcaatggcggaaggcctttggagtgattccccaaaaggtgtttatcttttcgggtacctttcgaaagaatctcgatccttacgagcaatggtccgatcaagaaatatggaaggtcgcagacgaagtcggacttcgatccgtgatagaacagtttcctggaaagctcgattttgtgttggtggatgggggctgtgtcctttcccatggtcataaacaactgatgtgtctcgcaagaagtgtgctttcgaaggccaaaattctgctgcttgatgagccttcggcgcacctggatcccgtcacttaccagatcattagacgcactctgaagcaagcctttgccgattgcaccgtgattctttgtgaacaccgtattgaagcgatgcttgaatgtcaacagtttctggtgatagaggaaaacaaggtcagacagtacgattccatccaaaaacttttgaatgagcgatcgctgttccgacaagccattagcccatcagatcgggtcaagctgtttccccatagaaattcgtccaagtgcaagagcaagccacagattgcagccctcaaggaggaaaccgaagaagaagttcaagacactaggctt

SEQ ID NO: 10175 - DNA, 4440 bp, synthetic construct
  misc_feature 1..4440: note = source = /note="Description of Artificial Sequence: Synthetic coding sequence"
  source 1..4440: mol_type = other DNA
atgcaacggtcgcctcttgaaaaagcgtcggtggtgagcaagctgtttttctcgtggactagaccaattctgaggaagggctaccgccagaggcttgagctgtccgacatctaccagataccctcggtagattcagcagacaacctctcggaaaaacttgaacgggaatgggacagagaactggcatccaaaaagaatccgaaacttatcaacgcacttagacggtgttttttctggcggttcatgttctacgggatatttctctaccttggggaagtgactaaggccgtgcaaccactgcttctcggacggattattgcatcctacgatccagacaataaggaagaaagatccattgcaatctacctgggcatcggactgtgcctgttgtttattgtgcgaactttgctcctgcatccagccatttttggactccaccatattggcatgcaaatgaggatagcaatgttctcgctgatctacaaaaagactcttaaacttagcagcagagtcctcgacaaaatctcgataggacagctggtaagccttctgtcgaataacttgaacaagtttgatgaaggacttgcccttgcccatttcgtgtggattgcgcctctgcaagtggcgctgctgatggggcttatttgggagctcctgcaagcgtccgctttttgtggacttgggtttctgatcgtgcttgctctgttccaggccggactgggcaggatgatgatgaagtacagagatcagcgggccggtaagatctcggaacgtctcgtgattacctctgaaatgattgaaaacatccagtcggtgaaggcatactgctgggaagaagcaatggaaaagatgattgagaatctgcggcaaaccgaacttaagttgacccgcaaagctgcatacgtgagatactttaacagtagcgccttctttttctcgggtttcttcgtggtgtttctttcggtgctgccatacgccctgattaaaggaatcattctccgaaagattttcaccaccatctcattttgcattgtccttagaatggctgtgactagacagtttccatgggccgtccaaacctggtatgactcccttggcgcaatcaacaagattcaagattttcttcaaaagcaggaatacaaaactcttgagtacaatcttaccactactgaagtcgtcatggaaaacgtgactgctttctgggaagaagggtttggtgagctttttgagaaggccaaacaaaacaacaataatcgcaagacgtctaacggagatgattcattgtttttctcgaactttagtttgctcggaaccccagtgctcaaagacatcaatttcaaaattgaaaggggccaacttctcgcggtcgctggaagcaccggtgcaggtaaaacttccctccttatggtgatcatgggggaactggaaccgtcggaaggaaagattaagcattcgggtaggatttccttttgttcgcagttttcatggatcatgccgggcactatcaaggagaacatcatttttggtgtgagctacgatgaatacagatacaggagcgtcattaaggcatgccaactggaagaggacattagcaaatttgccgaaaaggacaacattgtgctcggggaaggtggaatcactctcagcggtggacaaagggcaagaatctcacttgcacgggcagtgtataaagatgcagatctttacctgctcgactcgcctttcggctacctggatgtcttgactgagaaggaaatcttcgaatcctgcgtgtgcaagctgatggcaaacaagactaggatccttgtcacgtcgaagatggaacacctcaagaaagcggacaaaatactcatcctgcacgaaggatcaagctacttttacggaaccttttccgaactgcaaaatctgcaaccagatttttcgtcaaagctcatgggatgcgattcatttgatcaattctcagcggagcgccgtaattcgattctcaccgaaactctgcatcggttctccctggaaggagacgccccggtcagttggactgaaaccaagaaacagtcatttaagcagacgggtgaatttggagagaagcgcaagaatagcattctgaacccaatcaattccatccgaaagttctccatcgtgcaaaagacccccctccagatgaatggcattgaggaggattcggatgagcctctggaaaggagactgtccctggtgcctgactccgaacagggggaagcaattctgcctcgaatatcggtgatttccaccgggccaaccctgcaagcacgcaggcgtcagtccgtcctcaatctcatgactcatagcgtcaaccaaggtcaaaacattcatcgtaagaccactgcgtcgactaggaaggtcagcctggctccacaggccaatcttactgaactggacatttactcccgccggcttagccaggaaaccggactggaaataagcgaggagatcaacgaagaggatctgaaggagtgcttttttgacgatatggagtccattccagcagtgaccacttggaacacttatctgcggtacataacggtgcacaagtcccttatcttcgtgttgatctggtgcctggtgatttttctcgcagaagtggcagcgtcactcgtggtgctttggctgctgggaaacaccccactgcaggataaaggtaacagcactcatagcagaaataactcatacgcggtgattatcacgtccacctcctcctactacgtgttttacatctatgttggtgtggcggacacccttctcgcaatgggcttttttcgtggtttgcctctcgtccacacgcttataacggtttctaagattctccatcataagatgctgcatagcgtcttgcaggcacctatgtcaaccctgaacaccctgaaagcaggtgggatcctgaatcgattttccaaggatatcgcaattcttgatgacctgcttcctcttaccatttttgacttcatccaactgcttctgatcgttattggagcaattgcggtggtggcagtcctgcaaccgtacatttttgtggcaaccgtgccagtcatagtggcctttatcatgctcagggcatacttcctgcaaacctcccagcaactgaagcaactggaatcagaggggaggagccctatctttactcatctggttaccagcctcaagggactttggacccttcgtgcatttggacgccagccatactttgagactctctttcataaggcactcaaccttcacactgcaaactggttcctgtatctttccaccctgcgatggttccaaatgaggattgaaatgatcttcgtcatattcttcattgcagtgaccttcatcagcattctgactaccggagaaggcgagggaagagtcgggatcatattgacccttgctatgaacattatgtccactcttcaatgggccgtgaacagctcgatagatgtggattcgctgatgagatctgtctctagggttttcaagtttatagatatgccgaccgaaggaaaacccacgaagtcgactaagccctacaagaacggccagctttcgaaggtcatgattattgaaaactcgcatgtgaaaaaggatgatatttggccttcaggtggtcagatgaccgtgaaggatcttactgcaaagtacaccgaaggaggtaacgcgatacttgagaatatctcattctccatttcgcctggtcaaagggtgggactccttgggcgcaccggttcagggaagtcaacccttctttcagcgtttcttagactccttaataccgaaggggaaattcagattgacggagtgagctgggactcaataacgctgcaacagtggcgcaaagccttcggagtcattccacaaaaagtgttcatcttttccggaactttccgaaagaatctcgatccctatgaacaatggtctgatcaagaaatctggaaggtcgcagacgaagtcggactgcggtccgtgatcgagcaattccctggtaagctggacttcgtgctcgtggacggtggttgtgtgctttcacacggtcacaagcagctgatgtgccttgcacgatccgtgctgtccaaggcaaagattctgctccttgatgaaccttcggcgcatttggatccagtcacgtaccaaatcatcagaagaactctcaaacaggcttttgcagattgcaccgtcatcctctgcgaacacaggattgaagcaatgcttgagtgccagcaatttcttgtcatcgaggaaaacaaagtgaggcaatatgactcgatccagaagctcctgaatgaacgttcactgtttcggcaggcaatttccccctccgatagagtcaaacttttcccgcatagaaattcgtcaaaatgtaaatccaagccacaaatagcggcactgaaggaagaaaccgaagaagaagtgcaggacacccggctt

SEQ ID NO: 10176 - DNA, 4440 bp, synthetic construct
  misc_feature 1..4440: note = source = /note="Description of Artificial Sequence: Synthetic coding sequence"
  source 1..4440: mol_type = other DNA
atgcaacggagcccgctcgaaaaggcgtcggtggtgagcaaactgtttttctcctggactcgcccgatcctgcgcaagggataccgccaaaggctggaactgtcggacatctaccagatcccgtccgtggactcggcagacaacctgtcagaaaaactggagagggaatgggaccgtgagttggcatcaaagaaaaatcccaagctgattaacgccctccgacgctgctttttctggcggttcatgttttacggtatctttctctacttgggcgaagtgactaaggctgtgcagcctctcttgctcggaagaatcatcgcctcatatgaccctgacaataaggaagaacggtccattgcgatttacctgggtatcggactctgcctgctgttcattgtgcgcactctgctgcttcatccagcgatctttggactccaccacatcggcatgcaaatgagaatcgccatgttcagcctgatctacaagaaaactctgaaactttcgagcagggtgctggataagatctcaatcgggcagttggtttccctccttagcaacaacctcaacaagttcgacgagggactcgctctggcccactttgtctggattgcccctctgcaagttgctctgttgatgggcttgatttgggaattgctccaggcctcagcgttctgtggactgggattccttatcgtgcttgcactgttccaagcgggactgggacgcatgatgatgaagtacagagatcagcgcgctggtaagatctccgagagactggtcatcaccagcgaaatgattgagaacatccaatccgtcaaggcctactgttgggaagaagcaatggagaagatgatcgaaaatctccgccagacggagctcaagctgacccggaaggcagcgtacgttcggtactttaactcctcggccttctttttctccggtttcttcgtcgtgtttctgtctgtgcttccttacgcactgatcaaggggatcatcctccgcaaaatctttaccaccatctccttctgtatcgtgctgagaatggccgtgactcgccaattcccatgggccgtgcaaacctggtatgactcgctcggcgccattaacaagatccaagactttttgcagaagcaggagtacaagacgctggaatacaacctgactaccaccgaggtagtcatggaaaacgtgactgcattttgggaagagggcttcggagaactttttgagaaggccaagcagaacaacaacaaccgcaagacttcaaacggggacgactcgctctttttcagcaatttcagtcttttgggcacccccgtgctgaaggatatcaacttcaaaatagagcggggacaacttctggccgtggcgggatcgactggtgcgggaaagacctcgctgctcatggtgatcatgggagaactggagccatccgaggggaagattaaacattcaggtcgcatctcgttctgctcacagttctcatggatcatgccgggcactatcaaggaaaacatcatcttcggagtgtcatacgacgaataccggtatcgctcggtgataaaggcgtgccaactcgaagaagatatttcaaaattcgcggaaaaggataacatagtgttgggagagggagggatcactttgtcgggtggccaacgcgcccggatctccctcgcgcgcgccgtgtacaaagatgcagacctctaccttttggattctccgttcggatacctggacgtgctgaccgaaaaagaaatcttcgaaagctgcgtgtgcaaactcatggcgaataagacccgcattcttgtgacgtcgaaaatggaacatctcaagaaggcagacaagatcctgatcttgcacgagggctcctcctacttctacggaactttctcagaactgcagaatctgcaacccgactttagctcgaagttgatgggttgtgactcctttgaccagttctcggccgaacgccggaactccatcctcactgagactctgcatcggttctccctggaaggagacgcaccggtgtcatggaccgaaaccaagaagcagtcatttaagcagaccggagagtttggagaaaaacgcaagaactctattctcaatccgatcaactcgatccggaagttttcaatcgtgcaaaagaccccgcttcagatgaatggcatcgaggaggactcggacgaacctctggagcggcgcttgtcgttggtcccggactctgagcagggggaggctattctgccgcggatcagcgtgatttccactggcccgaccctgcaggcaagaagaaggcagtccgtgctcaacctcatgactcactcggtgaaccaaggccagaatatccacagaaaaaccaccgcatcgacccggaaagtgtctctggcacctcaagcaaacctcaccgaactcgacatctacagccggcgcctgtcgcaggagactggattggagatctctgaggaaatcaatgaggaagatctcaaggagtgttttttcgatgatatggaaagcatccctgcagtgaccacctggaacacgtacctccgctacattacggtgcacaagtcgttgatcttcgtcctgatttggtgcctcgtgatctttctggccgaagtggcggcctcgttggtggtgctgtggctgctcggcaacactccactgcaagataagggcaattcgacccactcaagaaataactcatacgctgtgatcatcaccagcacttcatcatactatgtgttctacatctacgtcggcgtggccgacactctgctggcaatgggcttcttccgcggattgccgctggtccatactttgatcactgtgtcgaaaatcctccatcataagatgctgcattcagtgctccaagcacctatgtcgactctgaacaccctgaaggccggaggcatcctcaacagattttcgaaggacatcgcgattctcgatgacctcctgccgctcaccattttcgacttcatccagctgctgctgatcgtcatcggagccatcgcggtcgtcgcagtgctccaaccatacatcttcgtggccactgttccggtcatcgtcgcgtttatcatgctgcgggcatacttcctgcagacctcccagcagctgaagcagctggaatccgaaggccgctccccgattttcactcatctggtgacctcgctgaagggactgtggactctgcgggcgtttggtagacaaccgtactttgaaaccctgttccataaggcactgaatttgcacacggcgaattggttcctgtacttgagcaccctccgctggttccaaatgagaattgaaatgatctttgtgatctttttcattgcggttaccttcatcagcatcttgaccactggagaaggagaaggcagggtcggaatcatcctgactctggccatgaacattatgagcaccctgcagtgggcagtgaactcatccattgacgtcgattcgctgatgaggtccgtgtcccgggtgttcaaattcatcgatatgccaacggaaggaaagccgaccaagtcgaccaagccgtacaaaaacggtcagctctcgaaggtgatgatcattgagaactcccatgtgaaaaaggatgacatctggccttccggtggtcagatgaccgtgaaagatctgaccgcaaagtacactgaaggaggcaatgccatcctcgaaaacattagcttctccatctccccgggacagcgggtgggcttgctgggtcggactggatcaggcaagtccacgctgctttcggccttcctcagactgctgaacactgagggagaaatccagatcgacggagtgagctgggattccatcaccctgcaacagtggagaaaggccttcggagtcatcccgcagaaagtgttcatcttctcgggcactttccggaagaatctggacccctacgagcagtggtctgatcaggagatctggaaagtcgctgacgaagtgggactgcggagcgtcatcgagcagtttccaggtaagctggacttcgtcctggtcgatggaggatgcgtcctctcgcatggccataagcagcttatgtgcctcgctcgctcagtcctgtccaaggcgaagattcttctgctggacgagccatccgctcacctcgaccctgtgacttaccagattatccgccgcaccttgaaacaagccttcgccgactgcactgtcatcctttgcgagcatcgcattgaagcgatgctggagtgccagcagttcctggtgatcgaagagaacaaggtgcgacagtacgactctatccagaagctgctgaacgaacgatcgctgttccgccaggcgatttcaccgtcagacagggtcaagctctttccgcatagaaacagctccaaatgtaagtcgaagcctcaaattgccgccctgaaagaagaaacggaggaggaggtgcaggacaccagactg

SEQ ID NO: 10177 - DNA, 4440 bp, synthetic construct
  misc_feature 1..4440: note = source = /note="Description of Artificial Sequence: Synthetic coding sequence"
  source 1..4440: mol_type = other DNA
atgcagcgcagtccactggaaaaggccagcgtcgtatccaagttgtttttctcttggaccaggcccatcctgcggaagggataccggcagaggctcgagttgtccgatatctatcagatccctagtgtggacagcgctgataatctgtcagagaagctggagagagaatgggatagggagttggcatccaagaagaacccaaaactgatcaatgcactcaggcggtgctttttttggaggttcatgttttacggtatcttcttatatctgggcgaggtgaccaaagcggttcagccgctcctgcttggacggattattgcatcttacgatcccgataataaagaggagcggagtattgcgatttacttggggattggcttgtgcctgctcttcatcgtgcgaactctactgctacatcctgcgatctttggcttgcaccatatcggtatgcagatgcgaatcgctatgttttctctaatctataagaaaacattgaaactcagttcgagagtgcttgacaaaatctccataggacagttagtgagtttgttgtccaataacctgaacaaattcgatgaggggttggcgcttgcccatttcgtgtggatcgcccctctccaggtcgctctcctcatgggactgatttgggaattgttgcaggcctccgcattctgcggcctcggatttctgattgtgctcgcacttttccaggcgggcctcgggagaatgatgatgaagtaccgggaccagcgcgcgggaaaaatttctgaacgccttgtaattacgtccgagatgatcgagaacattcagtccgtgaaggcctactgttgggaagaggcgatggagaagatgatcgagaatcttcgacagacagagctgaaactcacccggaaggcggcttacgtaaggtattttaactcaagtgccttcttcttttccgggttcttcgtagtgtttctctctgtgctcccttatgccctcattaaggggataatattaaggaaaatcttcaccaccataagtttctgtatcgtgttgcgcatggcagtgacccggcagttcccctgggctgtgcagacctggtatgactccctcggggccatcaacaagatccaggatttcctacagaagcaggagtataagacactggagtacaatttgactactacagaagtggtaatggagaacgtcaccgccttttgggaggaaggtttcggtgagctctttgagaaagcgaagcaaaacaacaataaccggaagacatccaatggagacgactccctgttcttcagcaatttctctctgctcggcacccctgtgttgaaggacatcaacttcaagatcgaacgcgggcagctcctcgcagtggcaggaagtaccggcgctgggaagacatccttgttaatggttattatgggcgagctggaaccatcggaaggcaagattaaacatagcgggcggatttctttttgcagccaattctcttggattatgcccggtaccattaaggagaacataatcttcggcgtttcctatgacgaatacaggtataggtctgtcataaaagcctgtcagctagaagaagatatttctaagttcgcagagaaggataacattgtcttaggcgagggcgggatcaccctaagcggtggccaacgcgctcgtatttctcttgcccgggcagtatataaggatgccgacctgtacctcttggactcacccttcggctacttggacgtcctcacagagaaggagatattcgagtcctgcgtgtgtaaactgatggccaacaagacacgcatcctagtgaccagcaaaatggaacacctgaaaaaagctgataaaatattgatactacatgaagggtcaagctacttctatgggactttttccgagttacagaacctgcagcctgatttttcttctaagctaatgggctgcgattcttttgaccagtttagcgctgagcggaggaactcaattctcaccgaaaccttgcaccggttttctctggaaggcgatgctcctgtatcatggacagagaccaaaaagcagtctttcaagcagactggcgaattcggagaaaaacgaaaaaactcaatccttaacccaattaactccatccggaagttcagcatcgtccagaaaactcccctgcaaatgaatggcattgaagaggattccgatgaaccattagaaaggaggctgtcacttgtaccagatagcgaacagggcgaggctatccttcccagaatcagcgtaatcagcactgggccgacactccaggcacgcaggaggcagtccgtgctgaacttaatgacgcactccgtgaaccagggccaaaacatccatagaaagacaactgcatccactaggaaagtttctctggctccacaggcaaacctaaccgagcttgatatctattcgcgacggctgtcccaagaaacgggattggagatcagcgaagagattaacgaggaggacctgaaggagtgtttcttcgatgacatggagagtattcctgctgtcaccacctggaatacctatctcaggtacattaccgtacataagagccttattttcgttctcatctggtgcctggtgatatttctggctgaagtagcggctagtttggtggtcctctggctactgggcaatacccctttgcaggacaagggtaactctactcacagtaggaataattcatatgcggtcattattaccagcacctcttcctattatgtcttctatatttacgttggagtcgctgacaccttgctggcaatgggtttctttcgggggctcccactggtgcataccctgatcacagtcagcaagatcctgcatcacaagatgcttcactccgtgctccaagccccgatgtcgactctaaacacactgaaggcagggggcattctgaatcgcttctcaaaagacattgccattctggatgacctcttaccgcttactatttttgatttcattcagctgctgctgatagtgattggggccatagccgtggtcgcagttctccaaccttacatctttgtcgccaccgtgcctgtgatagtagcctttatcatgcttcgcgcctatttcctccagaccagccagcagctcaagcagttggaatcagaaggcaggtcacccatttttacacatctggtgactagtttgaagggactttggactctgcgcgcgtttggccgacaaccatactttgagacactgttccacaaagctctaaacctgcataccgccaattggtttttgtatttgtccaccctccgctggttccagatgcgcatcgagatgatcttcgttattttctttattgcggtgacgttcatcagtatcctcacgaccggagagggagaaggaagagtggggattatactgacgctcgcaatgaatataatgtcgacgctgcagtgggctgtcaattctagtatcgacgtggactccctgatgcggtcagtgtcacgagtgtttaaatttatcgatatgccaaccgagggcaagccaacaaagtcaaccaaaccttacaagaatgggcagttgtctaaggtgatgatcatagaaaactcccacgtgaagaaagacgacatctggccttctggcggccagatgacagtgaaggaccttaccgcgaaatacacagaaggagggaatgctattttggaaaatatctcgttttcaatttccccaggacagagagtcggcttactcgggaggacaggctccgggaagtctaccctgctgtccgcctttctgcggttattaaataccgagggggagatacaaatcgatggcgtttcttgggacagcattaccctgcaacagtggcggaaagccttcggggtgataccacagaaggtctttattttctctggcacatttagaaagaacctggacccatatgaacagtggagcgaccaggagatctggaaggtggctgatgaggtgggactccgctcagtcatcgaacaattcccggggaaattagacttcgtgctggtcgacgggggatgcgtgctgagtcacgggcataagcaactcatgtgtctggcacggtccgtcctctcaaaagcgaaaatactgctcctggacgagccgtcagcgcacctggatcccgtgacataccagattatacgccggacactgaaacaggcttttgcagattgcactgtcattttgtgtgagcaccggattgaggcaatgttagaatgccagcagtttcttgtgatcgaggaaaacaaggtaaggcagtacgacagtatccagaaactcctcaatgagaggtccctgtttcgacaagccattagcccgtccgatcgagtcaagcttttcccccatcgcaatagctcgaagtgtaaatccaaaccacaaattgcagctctaaaagaggagacggaagaagaggtgcaggacactaggttg

SEQ ID NO: 10178 - DNA, 4440 bp, synthetic construct
  misc_feature 1..4440: note = source = /note="Description of Artificial Sequence: Synthetic coding sequence"
  source 1..4440: mol_type = other DNA
atgcagcgatcaccactcgaaaaagctagcgtagtcagtaaattgtttttttcttggacacgcccgattctgcggaagggttatcgccagagactcgaactctcagatatttatcagataccaagcgttgactctgcagacaatctcagtgagaagctggagcgggaatgggatagggaactggccagcaaaaagaacccgaagcttatcaacgcccttcgcagatgctttttctggcgcttcatgttttacggcatcttcctttacctgggggaggtcacaaaagccgttcagcccctacttctggggagaattatcgctagctacgaccccgataataaggaggagcgttccatagctatttatctcggtatcggtctctgcctcctcttcatcgttcgcaccctgctgctgcaccctgccattttcggtttacaccatatcgggatgcagatgcggatcgcaatgttctctctgatttacaaaaagacactaaaattgtcctctcgagtgttagacaagatcagcattgggcaactggtttccttgctgtcaaacaatcttaacaaatttgacgaggggctcgctttggcccattttgtctggatcgcccccctgcaggtcgccctgctgatgggcctgatttgggaattgcttcaggccagtgccttttgcggactcggattcttgattgttctagctctgtttcaggccggtctgggaagaatgatgatgaaatacagagatcagcgtgccggcaaaattagcgagcgcctggtgattacttccgaaatgatagagaatattcaatcagtgaaggcctattgctgggaagaagcaatggaaaagatgatagagaacctgagacaaacagagctgaagttgacccgaaaggctgcctacgtcagatacttcaattcgtctgcttttttctttagcggattttttgtagtttttctgagtgttttgccttacgccttgatcaaggggatcattttgcgcaagatcttcacgacaatatcattctgtattgtcctgagaatggccgtgactagacaattcccttgggctgtccagacctggtatgactcactgggagccatcaacaagatccaggattttctgcagaaacaggagtacaagactctggaatataatctgacaacaactgaagtggttatggaaaacgtgacagctttttgggaagaagggttcggagagctgtttgaaaaggctaagcagaacaacaacaaccgtaaaacctccaacggtgacgacagtcttttcttctccaatttttccctgctgggcaccccagttttaaaagacatcaacttcaaaatagagagaggtcaactcctggccgtggccggatccaccggcgcgggaaaaacaagcttgctcatggttattatgggcgaattagaacccagcgaaggaaaaattaagcactcaggcagaatatctttctgtagtcaatttagctggattatgccaggtacgatcaaggagaatattatcttcggcgtgagctacgacgagtaccgatatagatccgtgatcaaagcatgccagctggaggaggacatttcaaaatttgctgagaaggataacattgttctgggggaaggtggaattaccctttccggagggcaaagagcccggataagcctggcacgagcggtatataaagacgcggacctgtacctgctggatagcccattcgggtatctcgacgtcttgaccgaaaaggaaatatttgaaagttgtgtgtgtaagttgatggccaataagacacgaatcctcgtgacttctaaaatggagcatcttaaaaaggcagacaaaattctgatcctccacgaaggcagttcctatttctacgggacgttctcagaactgcagaatttgcagcctgacttttcctccaagttgatggggtgcgatagcttcgaccagtttagtgccgagcgccggaatagtattctgactgagaccctgcaccggttttcactcgaaggagatgccccagtgagttggaccgaaacaaagaaacagtcattcaagcagaccggagagttcggcgagaaacggaagaactccatcttgaatccgattaacagtatcaggaagttttcaatcgtgcagaaaactcctctccaaatgaatggaattgaagaggatagtgacgaacctcttgagcggcgcctcagtcttgtgcccgacagcgaacagggcgaggcaattctgcccagaataagcgtgatctccactggtcctactcttcaggctcgccgcagacagagtgttctgaatttaatgacacactccgtgaatcagggccagaatatccaccggaagaccactgcaagcacacgtaaggtgagcctcgcccctcaagcaaacctgacagagcttgacatttactccaggagactgagtcaagaaactggtctcgagatatctgaagaaattaacgaagaggacctcaaggaatgcttcttcgatgacatggaaagtatcccagctgttactacctggaatacctacctgcgctatattaccgtgcacaagtcgcttatctttgttcttatttggtgcctagtgatctttttggccgaggtagcggccagcctagtagtcctgtggttgctgggcaatacccctctgcaggacaagggcaacagcactcattcacgcaataattcttatgccgtgataatcaccagcaccagctcctattatgtgttttatatctacgtgggtgtggcagatacactgctcgcaatgggttttttccggggcctgccactagttcacaccctcattaccgtttctaaaatacttcatcacaaaatgctgcactcagtcttgcaggccccaatgagtactttgaatacgttgaaagccggaggtatcttaaaccgattcagtaaagatattgccattctggatgaccttctgcccctcaccatcttcgattttatacaacttttactaattgtgattggagcaattgctgtcgtggccgtgttgcaaccctacatctttgttgctactgtgccagttatcgtcgcttttataatgctgagagcctattttcttcaaacatcccagcagctgaagcaactggaatcggaggggcgcagccccatattcacacatctggtcacctctttgaaagggctgtggaccctccgagcctttggcaggcaaccctacttcgagacgttgttccacaaggctctgaacttacataccgccaactggttcctctacctgtcaacattgcggtggtttcagatgagaatcgaaatgatcttcgtcatcttctttatagctgttaccttcattagtattctgacgactggggagggtgaaggcagagtgggtataatactgacgctcgccatgaacattatgtcaacgctgcagtgggccgtgaacagcagcatagatgttgacagcctcatgcgatcggtctctcgtgtcttcaagttcatcgatatgccaaccgaggggaaacctacaaaaagcacgaagccatacaagaatggccaactgagcaaggtgatgattatcgagaactctcacgtgaagaaagatgatatctggccaagtgggggccagatgactgtgaaggatttgactgcaaaatataccgaaggcgggaatgcgattcttgagaatatctctttttcgatttcacccgggcaaagggttggcctcctgggacgcactgggtccggaaagagcaccttactatcagcttttctgcggttgctgaatacagagggggaaattcagatcgatggcgtttcatgggattcaattacgttacaacagtggcggaaagcctttggcgttattccccaaaaggtgttcattttttcaggaacctttagaaagaacttggacccatatgagcagtggtcggatcaggagatctggaaggtcgcagacgaagtgggcctcaggtccgtgatcgagcaattccccggaaagctggactttgtgttggtggatggcggatgtgttctttcacatggacataagcagctgatgtgtctggcaagaagtgtattatccaaggctaaaattttgcttctcgatgaaccgtctgcgcacttggaccccgtcacataccaaatcatacgccggacattgaagcaggctttcgctgattgtactgttattctgtgcgagcacaggatagaggccatgctcgaatgtcagcaatttcttgtcatagaagagaacaaggttagacagtacgacagtattcagaagcttttgaatgagagatcgctgttcagacaggctatttcaccatcagaccgggttaagctatttccccaccgcaattcttctaagtgcaagtctaagccacaaattgctgctctaaaggaggagacagaggaagaggtgcaagatacccgactt

SEQ ID NO: 10179 - DNA, 4440 bp, synthetic construct
  misc_feature 1..4440: note = source = /note="Description of Artificial Sequence: Synthetic coding sequence"
  source 1..4440: mol_type = other DNA
atgcagagatcccctttagaaaaggcaagcgtggtgagtaagctatttttcagttggactagacctatcctgagaaaggggtacaggcagcgtctcgagctgagtgatatctaccagatcccaagcgttgatagcgctgacaacctttccgaaaagctcgagcgcgagtgggatagggaactggcctctaagaaaaaccccaagcttatcaatgcgctccgtcgttgcttcttctggcggtttatgttttacgggatctttttgtatttgggtgaagttactaaggctgtgcaaccactattgctgggtcggatcattgcgtcctatgatccagataataaagaggagcgcagtattgcgatttacctcggcataggtctctgcttgctatttattgtgcgcaccctgctgctgcacccagctatctttggcctgcaccacataggaatgcagatgcggattgccatgttcagcctaatctacaaaaaaacactgaagctgagttcccgggtgttggacaagattagcatcgggcaactggtgagtctcctcagcaacaacctgaacaagtttgatgaagggctggctctggctcacttcgtctggatcgccccactgcaggttgcgttgctgatgggtctcatatgggaattgctgcaggccagcgccttttgcgggctgggctttctgatcgttctggctctgtttcaggccgggctcggccgtatgatgatgaagtaccgcgatcaacgcgcagggaaaatttcagagcggctagtcatcaccagtgaaatgatagaaaatatccaaagcgtgaaagcgtactgctgggaggaagctatggagaaaatgattgaaaaccttcgccagacagagctgaagctgactcgcaaggctgcctacgtgcgctacttcaactcatccgcttttttcttttccggtttctttgtggttttccttagtgtgctgccctacgctctgataaagggaattatcctacgcaagatctttacaaccattagcttttgtatagtgctgagaatggcagtgacccgacagtttccctgggctgtgcagacctggtatgatagtttgggagcaatcaacaagatacaggacttcctgcaaaagcaggagtataagactctggagtataaccttacaacaaccgaggtggtgatggaaaatgtcacagccttttgggaggaagggtttggggaactgtttgaaaaagccaaacagaacaacaacaacaggaagacatctaatggcgacgattcgctcttcttttccaatttctctctgcttgggactccagttctcaaagatatcaatttcaaaatagagcgcgggcagctgttggcagtcgctgggtctacaggggccggcaaaactagcctgctgatggtgattatgggggagttggagccttccgagggcaagatcaaacacagcgggcgcatcagtttttgtagccagttctcttggatcatgcccgggacgataaaagaaaacatcatatttggcgtgtcttatgacgaatatcgatatcggagtgttatcaaggcatgccagctggaagaggacatatcgaaatttgccgagaaagataatatcgttttaggagaggggggaattacattgtcgggtggccaacgggcacgaatatctttggcacgggctgtctataaagacgccgacttgtacctgctggactcccctttcgggtatttggatgttctgaccgagaaagagatctttgaatcctgcgtctgcaagcttatggccaacaagaccaggatactggtgacatcgaaaatggaacaccttaagaaggcggacaagatcctgatcctgcacgagggaagcagctatttctatgggacattcagtgaactccagaatctgcaacccgatttcagctccaagttaatggggtgtgacagtttcgaccagtttagtgctgagcgccggaatagcatcctaactgaaaccctgcacagatttagtcttgaaggtgacgcacccgtgtcctggaccgagaccaaaaagcagagcttcaaacagactggcgaattcggcgagaaaaggaaaaacagcatcctaaacccaattaatagtatccggaaattttctattgtgcagaagacacccctccagatgaatgggatcgaagaagattccgacgagccgctagaacgtagattgagccttgtccccgatagtgaacagggggaagccatactccctcgcattagcgttatatccacaggcccgacactccaggccaggcggcgccagtccgttcttaatcttatgacgcattccgtgaatcagggccagaacatccatcgcaagactacagccagtaccagaaaagtcagcttagcaccacaggcaaacttgacagaattggacatctacagccgtaggctaagccaggagacgggtctagaaatcagtgaggagatcaacgaagaggacctcaaagagtgcttctttgatgacatggagtcaatccctgctgtgacaacctggaatacctacttacgttatattaccgtgcacaagagcctgatttttgtcctaatatggtgtctcgtcatctttctagcagaagttgctgcttcactggtggtgctctggctgttaggaaacactcctcttcaggataagggcaactctacgcatagccgaaacaattcatacgccgtaattatcacttcaacgtcctcatactacgttttctatatctatgttggtgtagccgatacgcttctggccatgggcttttttcgggggcttcctctcgtacacactttaattactgtgtccaagattttacaccacaaaatgttgcactccgtgttacaggcaccaatgtctactcttaacacgctcaaggctggaggaattctcaatcgcttcagcaaggacatagctatccttgatgacctattgccactgacaatctttgatttcatccagctgctcttgattgtgattggcgcaatcgccgtagtggctgtactccagccctatatattcgttgctaccgtgcccgtgattgtagccttcatcatgctgcgagcctatttcctccagacaagtcagcagttaaagcaattagagtctgagggccggtctccgatctttacacacttagtaactagccttaagggactatggacactaagggctttcggtcgtcaaccttactttgagactttattccataaggcacttaacctgcataccgccaactggttcctctacctttccactttgcgatggtttcagatgcgcatcgagatgatttttgttatttttttcatcgccgtgactttcatctctattcttacaactggcgaaggtgaaggacgggtcggcattattttgactctggccatgaatatcatgtctaccctacagtgggcagtaaactcttcaattgatgtggattcgctgatgaggagcgtttcaagggtgttcaaatttattgacatgccaacagaaggcaagcctactaagagcaccaaaccgtataagaacggacagctgagtaaagtgatgatcatcgaaaatagccacgttaagaaagatgatatctggcctagcggcggccagatgactgtgaaggacctgaccgcaaagtatacagaaggcggaaacgccatcctggagaacattagttttagtataagcccgggacaaagggtcggactgctgggacgcacaggtagtggtaagagcacactgctgagcgcttttctccgcctgctcaacacggaaggggagatacaaattgacggtgtctcctgggattcgatcaccctgcaacagtggcgtaaagcattcggcgtcataccacaaaaggtgttcattttttcaggaacgttcaggaaaaacctggatccttatgagcagtggtctgaccaggaaatctggaaagtggcagacgaagtaggcttacgctcagtaattgagcaatttcccgggaagttggatttcgtcctggtggatggcggctgcgtcctctctcacggccacaagcaactaatgtgcttggcacgcagcgtgctttctaaagcaaagattctcttattggacgaaccctctgcgcatttagaccctgtgacctaccaaatcataaggcggacactgaagcaggcgtttgccgattgtaccgtcattctgtgcgagcaccgcattgaggccatgctggagtgccagcagttcctggtaatcgaggagaacaaagtgaggcaatacgactctatccagaagctgcttaacgagcgctccctgtttcggcaagccatttcaccttcagatagagtcaagcttttcccccaccgcaattcctccaaatgtaaatctaaaccccaaattgcagccttgaaggaggaaactgaggaggaagttcaggacacccgactg

SEQ ID NO: 10180 - DNA, 4440 bp, synthetic construct
  misc_feature 1..4440: note = source = /note="Description of Artificial Sequence: Synthetic coding sequence"
  source 1..4440: mol_type = other DNA
atgcagagatcccccttagaaaaagcctctgtggttagcaaattgttctttagttggacaaggccaatcctgaggaagggataccggcagaggttagagttgagtgatatctaccagattccaagcgtagactctgccgacaacctctccgaaaagctggagcgggaatgggacagggagctagcctccaagaagaacccaaagctgattaatgctttgcgccggtgcttcttctggagatttatgttctatggcatttttctttacctcggcgaggttaccaaggccgtacagccgctgcttctaggcagaattattgcctcctacgatcctgacaataaagaggagaggagcatagccatatatcttggcattgggttgtgcctgctgtttattgtgcgtacccttctccttcaccccgctatctttgggctgcatcacataggcatgcagatgagaattgcaatgttctctctgatctataaaaaaaccctgaaactgagttccagggtcctcgataaaatttccatcgggcaactggtgagcttgctatcgaataacctcaacaagtttgatgagggcctcgcgttagctcatttcgtgtggatcgcacccctgcaagtggccttactcatgggactgatctgggaattgctgcaggcatcagcattctgcggtctgggatttttgattgtacttgctctgttccaagccggccttggcagaatgatgatgaagtaccgggatcagagggcggggaagatttccgagaggctggttatcacatcggagatgattgaaaacatacagtcggttaaagcctattgttgggaagaagcgatggagaaaatgatcgaaaacctcaggcagacagagttaaaacttacaagaaaggcggcttacgtacgttatttcaatagctcggcttttttcttttccgggttctttgtggttttcttgtctgtactgccttacgcactgattaaaggaattattctgcggaaaattttcacgaccatatctttttgcatcgtgctccggatggctgtgaccaggcaatttccctgggccgtgcagacctggtatgattcgctcggagcaatcaacaaaatccaggacttcctgcagaagcaagagtataagactctagaatataacctgactactacggaggtggtgatggagaacgtaacagccttctgggaggagggcttcggagagctgttcgagaaggccaaacagaataataataatcgaaagacctcaaacggagatgattcacttttttttagcaatttttcccttctgggcacccccgtgctcaaggacatcaatttcaagatcgagaggggccagctccttgccgtggcaggttccacaggggcgggcaaaacaagcctactcatggtgatcatgggtgaactggagccatctgaaggtaaaatcaagcattctggtcgcatcagtttctgcagccagttctcctggatcatgcccggaacaatcaaagaaaacatcatcttcggggtgagctacgacgaatatagatatagaagcgtcatcaaggcatgccagctggaggaggacatttccaaattcgccgaaaaggacaacatagttctgggcgaggggggaattacgctctcaggcgggcaacgggcaaggatatccctggcacgtgcggtctataaagacgctgatctttacctgctggacagccctttcggatatctcgacgtgttgaccgagaaggagatcttcgagagctgcgtttgtaagctgatggctaataaaacacgaattctagtgacctctaaaatggaacacctcaaaaaggctgacaagatcctgatcctgcacgaggggagcagctacttctacgggacattcagtgaattgcaaaacttgcaacctgatttctcgtcaaagctgatgggctgcgacagctttgatcagtttagtgccgagagacgcaatagtattctaacggagactctacaccggttttctctggagggtgatgcacctgtttcttggacggagaccaaaaaacaaagctttaagcagacgggagagttcggcgagaaacggaagaacagcatattgaacccgatcaatagtatcaggaagtttagcatcgtgcagaaaacccccctgcagatgaatggcattgaagaagactccgacgagccgctggaaagacgtcttagtctggtgccggatagcgagcagggagaggccatactgccaaggattagtgtcatttccactggtcctacactccaagcccggaggcggcaatcagtgctgaatttaatgacacactccgtcaaccagggccaaaacattcataggaagaccacagcgtcaactcgcaaggtgtcacttgctcctcaagccaatttaactgagctggacatctattcccggcgacttagtcaggaaaccgggttggagatttccgaggagatcaatgaagaggacttgaaggagtgcttctttgatgacatggagtcaatcccggccgttaccacatggaacacttatctgaggtatatcaccgtgcataaatccctgatttttgtgcttatttggtgcctagtgatctttctggccgaggtggcagcctctctcgtcgtcttgtggcttctcggaaacacacccctccaggacaaaggcaattctacccacagtaggaataactcctacgctgttattattacctcaaccagttcttattatgttttctatatctatgtgggagtagccgatacattactggcaatgggatttttccgggggctccccctagtccacacgctgataaccgtctccaagatacttcaccataaaatgctacactccgtgctgcaagccccgatgtccacactgaatactctgaaagctggcggtatcctgaaccggttctctaaggacatagctatcttggacgatctactacctctgactatcttcgactttattcagcttctgctcatcgtcataggcgctatcgctgtggtcgcagtgcttcagccctatatctttgtggccactgttcccgtgatcgtcgcatttatcatgcttagagcctattttctgcagacttcccagcagcttaaacagttggaaagtgaaggacgcagccccattttcacacacctagttacaagtctgaagggcttgtggacacttcgagcgttcgggcggcagccgtacttcgagaccctgttccataaggcgttaaatttgcacacggcaaactggttcctttacctgtcaactctgagatggttccagatgaggattgaaatgatcttcgttatattcttcatagccgtgacctttatctcgatactgacaacaggggagggcgaagggcgggtgggaattattctgactctagcaatgaacattatgagcacgctgcaatgggccgtgaacagttccattgatgtagactccctgatgcgatccgtgtcgcgcgtgttcaaatttatagatatgcctactgagggtaaaccaaccaagagcactaagccttacaagaatggccagttatccaaagtaatgatcatcgagaatagtcacgtgaagaaggacgatatctggcccagcgggggtcagatgaccgttaaagacctgacagccaagtacaccgagggtgggaatgcaatcttggagaacatctcctttagtatttcacctggacaaagagtgggtctgttgggacgcactggatcagggaaatccacactgttatccgcatttctacgactcctgaatactgagggagaaatccagatcgatggcgtttcctgggactccattacactccaacagtggcgaaaggcgtttggcgtcattccccagaaggtatttattttctcaggaacctttcgaaagaatctcgacccctatgagcagtggagcgaccaggaaatctggaaagtggctgatgaagtcgggctgagatccgtaattgaacagtttccaggtaagttggatttcgtgttggtggacggcggatgcgtactttctcatggacataagcagctgatgtgtctggcgcgttccgttctgtccaaggccaaaatactgttactggacgaaccatccgcacacctggaccctgtgacgtatcagattattcggcgcaccctgaagcaggcattcgccgactgtaccgtcattttatgcgaacaccggatagaggcaatgctggaatgtcagcaatttcttgtcatagaggagaataaggtccggcagtacgattccatccaaaagttgctgaatgagcggagtctctttcggcaggccatctccccatctgatagagttaaactctttccacatagaaactcttctaagtgcaagagcaagccacaaatcgccgctcttaaggaggagacagaagaagaagtgcaggatactcgtcta

SEQ ID NO: 10181 - DNA, 4440 bp, synthetic construct
  misc_feature 1..4440: note = source = /note="Description of Artificial Sequence: Synthetic coding sequence"
  source 1..4440: mol_type = other DNA
atgcagaggtctccacttgagaaagcgtctgtcgtttctaagctttttttctcgtggacgagacccatcctcagaaagggatacaggcagaggctcgaactgtctgatatctaccagatcccgtccgtggattctgccgataacttatcagaaaagcttgagagggagtgggatcgagagctcgcatcaaagaagaatccaaaactgattaatgctctgcgccggtgttttttttggcgctttatgttctatggtattttcctttatcttggcgaggtcaccaaggccgtgcagcccctgctgctgggtaggatcattgcatcctatgatcctgataataaggaggagagatccatcgcgatatacttgggcattggcctttgccttctttttatcgttcgaaccctactgctccatcctgccatttttggtctccaccatatcggaatgcagatgcggattgctatgttcagtttaatatataagaagactctgaagttgtcatcccgcgtcttggacaagatatccattggacagctggtgtctctgttgtctaacaatctgaacaaatttgacgagggcctggcactggcccacttcgtatggattgcgcctctgcaagtagccttgctgatgggtttgatttgggagcttctgcaggcttccgcattttgcggcctcggctttctaatcgtgctggcgctctttcaggctggtttgggacgcatgatgatgaagtatagagatcaacgggccggaaagataagcgaaagattagtgattacatcagagatgatcgagaacattcagagtgtaaaggcctactgttgggaggaagccatggaaaagatgattgaaaatctccgacaaaccgaattgaagctgaccaggaaggcagcgtatgtgagatacttcaacagctccgcttttttcttctctggtttctttgtagtctttctctcagtgctgccatacgcgctgatcaaaggaatcatccttaggaaaattttcaccacaatctccttctgcattgttctgcgtatggcagtgactagacagtttccatgggccgttcagacgtggtatgactctttgggagccattaataaaattcaggacttcctgcaaaaacaggaatataagaccttggaatacaatctaacaacgacagaggtcgtgatggagaacgtgaccgcattctgggaggagggttttggggagctgtttgaaaaggccaagcagaacaataataatcgtaaaacatccaatggtgacgacagtttgttcttttccaatttctcgctgctgggcacccccgtgctgaaagatataaatttcaaaatcgagcgcggccagcttctagccgtggctggctctaccggagctgggaagacatccttgctgatggtcattatgggtgagctcgagccgtctgaggggaagatcaagcattccggcaggattagtttttgttcccagttctcatggattatgcccggcacaattaaggagaacatcatatttggagtgagctacgacgagtataggtatagatctgttatcaaagcatgccaactggaggaggatatatccaagttcgctgagaaggacaatatcgtgctcggtgagggaggcatcacgctttccggcgggcagcgggctcggatcagcttggcacgggctgtttataaggacgcggatctctaccttctcgactcaccctttggttacctcgatgtgctaaccgagaaggagatttttgagtcgtgcgtctgcaaactgatggctaacaagactcgtattctggtgacttcaaaaatggagcacctgaaaaaggccgacaagattcttatactgcacgagggaagcagttacttttacgggactttcagcgaattacaaaatttgcaaccggacttttcctcaaagctcatgggctgcgattcttttgaccagttcagtgcggagagacgcaattctattctaactgagaccctacaccgtttcagcttagagggtgacgcgcccgtgagttggactgaaacaaagaagcagtccttcaaacagactggtgaatttggagagaagcgcaagaacagcatccttaaccccatcaactcaattcgcaagttttcaatcgtgcagaagacgccgttgcagatgaatggtatagaggaggacagcgacgaacctctagaacggcggcttagtctggtgcctgattcggagcagggtgaggccattctaccccgtatttcagtcatctctacagggccaacccttcaggcccgtcggcgccagtccgtactgaatctaatgacccatagcgtgaaccagggtcagaatattcacagaaagactactgcctccaccagaaaggtaagtctggctccccaggcgaacctcactgaactggatatttatagtcgccgactgagtcaagagactggactggagattagtgaagagattaacgaggaggatctcaaagagtgtttcttcgacgatatggagagtatccccgctgtgacaacatggaatacttacctgcggtatataaccgtacataagtctttgatcttcgtcctgatctggtgccttgtcatcttcctggctgaggtggctgcctcattagtagtactttggcttctcggcaatactccactgcaggataaggggaattccacccactctcgcaacaatagttatgccgtgataattaccagtacttcatcctattatgtgttctacatctacgtgggggtggctgacaccctgttggcaatgggattttttcgcggcctccccctggtgcataccctgattaccgtgtccaaaattcttcaccacaagatgctgcatagtgtgcttcaggcgccaatgtcaactctgaacacactaaaggcaggcggcattttgaaccgcttcagcaaagacatcgcaattttggatgatttgctgccgctgactatcttcgacttcattcaactcctgctcattgtgattggagcaatcgctgtggtggctgtcttacaaccctatatctttgtagccacggtccctgtgattgtagccttcatcatgctgcgggcttatttcctccaaaccagccaacaactgaagcagttagagtccgaaggccgtagtcccatttttacccatctcgtgaccagcctcaaggggctgtggaccctgagagcctttggaaggcagccatactttgagacattgttccataaggccttgaacctgcacaccgctaactggttcctgtacctgagtaccctgaggtggttccagatgagaatagagatgattttcgttattttcttcattgctgtgaccttcatttcaatcctaaccacgggggagggggaagggcgcgtggggatcattctcaccctggccatgaatatcatgtcgaccttgcagtgggctgtgaacagctcaattgacgtggacagcctgatgaggagtgtaagcagggtgtttaagtttatagacatgcctactgaaggcaaacctactaagtctactaagccttacaagaatggccagctgtccaaggtgatgattattgagaacagccatgttaaaaaagatgacatctggcccagcggcggccagatgaccgtcaaggatctgacggcaaagtatacagaagggggtaatgccattctggagaatatcagctttagcatcagccccgggcagagggtggggctcttgggcagaaccggtagtgggaagtctaccctcctgtcagccttcctgaggctgcttaacaccgaaggagagatacagattgacggagtcagctgggattccattacacttcagcagtggaggaaggcttttggggtaatcccccaaaaagtgtttatttttagcggtacattcaggaagaacctggacccgtacgaacagtggtctgatcaggagatctggaaggtggccgatgaagttggtctgcgctccgtcatagaacaattccctggcaagctcgattttgtgttggtggacggggggtgtgtgctcagccacggacacaaacagttaatgtgtctggcccgcagtgtgctgtcaaaagccaaaatcctactgctagatgagccctcagcccacctagatcccgtgacatatcagatcatcagacggacactcaaacaggcctttgccgactgtaccgtgatcttatgtgaacaccgcattgaggccatgctcgaatgccaacagtttctggttatcgaggagaacaaggttcggcagtatgacagcatacagaaattacttaatgaaagatctctgttcagacaggccattagtcctagcgaccgagtcaaattgttccctcaccgcaatagttcaaaatgtaagtcaaaacctcagatcgctgcactgaaggaggagaccgaggaagaagtccaagatacacgcctg

SEQ ID NO: 10182 - DNA, 4440 bp, synthetic construct
  misc_feature 1..4440: note = source = /note="Description of Artificial Sequence: Synthetic coding sequence"
  source 1..4440: mol_type = other DNA
atgcagaggtcgcctcttgagaaggcctcggttgtctctaagttgttcttttcatggacgaggccaatcctccggaaggggtaccgccaaaggctggaactttcagacatttaccaaatcccttcagtggattcggcggacaacttgtcggagaagctggaaagagaatgggaccgcgaattggcttcgaagaaaaaccccaagctgatcaacgccctgcgtcgctgctttttctggcgcttcatgttctacgggatcttcctctacttgggtgaggtgaccaaggccgtccagccattgctgcttggccggattatcgcctcttacgacccggacaataaggaggagagatcgattgcgatctacctgggaatcggcctgtgtctgctcttcatcgtgcgcactctgctcctgcaccctgctatcttcgggctgcaccatattggtatgcaaatgcggatcgcgatgtttagcctgatctacaaaaagactctgaaactgtcctcaagagtgcttgacaaaatcagcatcggacaactcgtgtctctgctgtcgaacaatcttaacaagttcgatgaaggactcgcgttggctcatttcgtgtggatcgcgccgctgcaagtggctctcctgatgggactcatctgggagctcctgcaagcgtccgctttctgcggactcggtttcctgattgtcttggcgttgttccaggcgggcttggggcgaatgatgatgaagtaccgggaccagcgcgcgggcaaaatcagcgaaagactggtcatcactagtgagatgattgaaaacatccagtcggtcaaggcctactgttgggaggaggcgatggaaaagatgatcgagaatttgagacagaccgagctcaagctgactagaaaagccgcgtacgtgcgctacttcaattcctcagcgtttttcttttccggcttcttcgtcgtgtttctgtccgtgctgccttacgccttgataaagggaattatcttgcggaagatcttcaccaccatctccttctgcatcgtgctccgcatggcagtgactcgccaatttccatgggcagtgcagacttggtatgatagcttgggggctataaacaagattcaggacttcctccagaaacaggaatacaaaaccttggagtacaacctcactacgaccgaggtggtcatggagaatgtgactgctttctgggaggaaggattcggcgagctgttcgagaaggccaagcaaaacaacaataaccggaaaacctccaacggcgacgattcgctcttcttttccaatttctcactgcttggaacccctgtgctcaaagacattaacttcaaaatcgaacggggacagctgttggccgtggcagggtcaaccggggcgggaaagacctccctgcttatggtgatcatgggggaattggaaccaagcgaaggtaagatcaagcattccggccgcatctcgttctgctcgcagttcagctggatcatgccgggtaccatcaaggagaatatcattttcggggtgtcatacgacgaatatagataccggtccgtgatcaaagcctgccagcttgaggaagatatctctaagttcgccgaaaaagacaacatcgtgctgggcgaaggagggatcaccctctccggtgggcagcgggcgagaatctcactggctagagccgtgtacaaagacgcagatctgtacctcctggactcgccattcggttacctcgatgtgctcactgaaaaggaaatcttcgagagctgtgtctgcaaacttatggctaacaaaactcggatcctggtgacttcgaagatggaacatctgaagaaagcagacaagatcctgattctgcacgaagggtcctcctacttctacggaacgttttcggaactgcagaacctgcagcccgacttttcgtcaaagctcatgggctgcgacagctttgaccagttctccgctgagcgcagaaacagcatcctgactgaaaccctccatagattcagcctcgagggggatgcaccggtttcatggactgaaaccaaaaagcagagcttcaagcaaactggcgaattcggcgaaaagcggaagaattccatccttaacccaattaactccatcaggaagttctccatcgtgcaaaagacgcccctgcagatgaatgggatcgaagaggacagcgacgagccactggagcggcgcctgtccctggtgccggactccgagcagggagaagccattctgccgagaatctcagtcatttccactggccccactctccaggcccgccgccggcaatccgtgctgaacctgatgacccatagcgtgaaccagggacaaaacatccataggaaaacgactgcgtccacccggaaggtgagcctggcgccacaggccaatctcaccgaactcgatatctactcgagacgactttctcaggaaaccggcctggaaatctccgaagagatcaacgaagaggatctgaaagagtgctttttcgacgatatggaatccatcccagccgtgacgacctggaatacgtatttgaggtacattacggttcataagtccttgatcttcgtgctgatctggtgcttggtaatcttcctcgcggaagtggcagcctcattggtggtcctgtggctcctgggaaatactccgctgcaggataagggaaacagcactcactcacggaacaacagctacgcggttatcatcacttccacttcctcctactacgtcttttacatttacgtgggcgtggcggacaccttgctcgcgatgggatttttccggggtctgccattggtgcacaccctcataaccgtgtcaaaaatcctccatcataagatgctgcattcagtccttcaagcgccgatgtcgaccttgaacactctgaaggcgggcggaatcttgaacagattctcgaaggacatcgccatcctcgatgacctcctgcccctcactatcttcgactttatccaactgctcctgattgtgattggagcaattgccgtggtcgcggtgctgcaaccatacatcttcgtcgccaccgtcccagtcattgtcgcttttatcatgttgagagcatacttcctgcaaaccagccagcagctcaagcaactcgagtcagagggtcgctccccgattttcacccacctggtgacgagcctgaagggactgtggaccctcagagcctttgggcgtcagccatactttgaaactctgtttcataaggcccttaatctgcataccgcaaactggttcctttacctgagcactctgcggtggttccaaatgcggattgagatgatcttcgtgatctttttcatcgctgtcactttcattagcatcctgacgaccggtgaaggagaggggcgcgtgggaatcattctgaccctggctatgaatatcatgtcgactctgcagtgggcggtgaactcgtcgattgacgtggactcgctgatgagatcggtgtccagggtgttcaaattcattgatatgccgacggagggaaagccgactaagtcgaccaagccgtacaagaacggccaactgtcaaaggtgatgatcattgagaactcgcacgtcaaaaaggacgatatttggccgagcggaggtcagatgaccgtgaaggacctcacggctaaatacaccgaaggaggaaacgcgatcttggaaaacatctcgttctcgatctccccgggccagcgagtgggactgctcggtcggactggatccggaaagtcaacgctgctgtccgcgttcctgagactgctcaacactgaaggcgaaatacagatcgacggagtctcgtgggattcgatcaccctccaacaatggagaaaggcttttggagtcattccgcagaaagtgttcatcttctccggtactttcagaaaaaacctggacccttacgaacaatggtcggatcaagaaatctggaaggtcgccgatgaagtgggcctgcgctcagtgattgaacagttccctggcaagctggatttcgtgctcgtcgacggaggatgcgtgctcagccacggccataaacaactgatgtgtcttgcccgctcggtgctttctaaggccaagatccttctgcttgacgagccgtcagcgcacctggatccggtgacctaccaaatcatcaggcgtactctcaagcaagcgttcgccgactgcactgtcatcttgtgcgaacaccgcatcgaggcgatgcttgagtgccagcaattcctggttatcgaagagaataaggtccgtcagtacgactcgattcagaaacttctgaacgaaaggtccctctttcggcaggctatttcaccgtcagatcgggtcaaactgtttccgcaccgcaacagcagcaagtgtaaatcgaaaccgcaaatcgctgcactcaaagaggagactgaagaggaagtgcaggatactcgcctc

SEQ ID NO: 10183 - DNA, 4440 bp, synthetic construct
  misc_feature 1..4440: note = source = /note="Description of Artificial Sequence: Synthetic coding sequence"
  source 1..4440: mol_type = other DNA
atgcagaggtctcccctggaaaaggcttccgttgtcagcaaattgtttttcagctggaccaggcctatactgcgcaagggataccggcaacgcttggaactctcggacatttatcagataccatcggtggactccgccgataacctgtcggagaagctggagcgagagtgggacagggaactggcgagcaagaagaacccaaagcttattaatgcgcttaggcgttgcttcttttggcgcttcatgttttacggcatctttctgtacctcggcgaggtcacgaaagccgtccaaccactgttgttgggccgcatcatagcgagttatgatccggacaataaagaagagcgctcaatcgcgatttacctcggcatcggactttgcttactgttcatagtcaggaccctcctattgcacccggcaattttcggcctccaccatatagggatgcaaatgcgtatcgcgatgttttccctgatctataagaagaccttgaagttgtcctcccgcgttctcgacaagatctcaatcggccagctagtgagtttgctcagtaacaatctgaataaatttgatgagggtcttgccctggctcacttcgtttggatcgcgcctctccaggtggctttactgatgggactcatctgggagctattacaggcatcggccttttgtggtctgggtttcctcatcgtgctggccttatttcaggctggcctgggcagaatgatgatgaaataccgtgatcagcgagcaggtaagatctcggagcgcctggttattacgagcgagatgattgagaacatccagtccgtgaaagcctattgttgggaggaggccatggaaaagatgattgagaatctgcggcagacagagctgaaactcacaaggaaggctgcttacgtccgctattttaacagcagtgccttctttttctccggtttcttcgtggtgttcctgtccgtccttccctatgccctgatcaagggtatcatactgcgcaagatttttacgacgatttcgttctgtattgttttgcggatggccgttacgcgacagttcccatgggcagtccagacgtggtacgatagtctgggcgccatcaataagattcaggacttcctgcagaagcaggagtacaagaccctggagtataacttgacaaccacggaagtggttatggagaacgtgaccgcgttttgggaagagggatttggtgagctttttgagaaggccaaacaaaacaacaataatcggaagacaagcaacggcgacgattccttattcttctctaactttagccttttaggcacccccgtactaaaggacattaatttcaagattgagcgcggacaactgctggcggtagctggcagtaccggtgctggcaaaactagcttgctgatggtgattatgggcgaactggagccctccgagggaaagattaagcatagcggtcgcatctccttttgctctcagttcagctggataatgcccggcaccatcaaggaaaatataatttttggcgttagttacgatgaataccgctaccgctccgtgataaaagcatgccagctagaggaggacatcagtaagttcgctgagaaggataacatcgtcttaggcgagggcggaatcactctcagtggaggccagagggcccgcatctccctggcgagagcggtctacaaggacgccgacttgtacctgctagatagcccatttggttacctggacgtcctcacagaaaaggagattttcgagtcgtgcgtgtgcaaacttatggccaataaaactcgcatcctggtcacctcgaagatggagcaccttaagaaagccgacaaaatcctgatcctgcacgaaggatcctcctacttctatggcacattttccgagctgcagaaccttcagccggatttttcgtccaaactaatgggttgcgacagtttcgaccagttcagcgcagagcgccggaactcgatcttgacagagaccttgcacaggtttagtctggaaggagacgcgccggtgagctggaccgagacaaagaagcaatccttcaagcaaaccggcgagtttggagaaaagagaaaaaatagcattctcaacccgatcaattccattcgcaaattcagcatcgtccagaaaacacccctacagatgaacggaatagaagaggattctgacgagcccctggagcggcggctttcccttgtgccggatagcgaacagggagaagcaatactgccgcgcatatcagtgatcagcacgggtccaacactgcaggctcgccgacgtcagtccgtgctgaacctcatgacccattcggtgaatcagggccagaacatacatcggaaaacgaccgcttccacccgcaaggttagcctcgcgccacaggctaacctaacggaattggatatctattccaggcgcttgtcccaggaaaccggacttgaaatctccgaagaaatcaacgaagaggatcttaaagagtgcttttttgacgacatggaaagcattccagccgtaacaacttggaatacgtatcttcgatacataaccgtacacaagtcgctgattttcgtcctgatttggtgcctagtgattttcctggccgaggtggccgcatcattagtcgttctgtggcttctgggaaacactccacttcaggacaagggcaattccacgcacagtcgcaataactcctatgcggttattataacctccacgtcttcctactacgtgttctatatttatgtgggtgtggcggacaccctcctggcgatgggttttttcaggggccttccactcgttcatacgttaataaccgtatctaagatcctacatcataagatgctgcactcagttctgcaagcccccatgagcacgctcaataccctgaaggcaggcggaattctaaatcgttttagcaaggacatcgcgatcctggatgatctgttgccactgacgattttcgatttcatccaattgctgctaatcgtgatcggcgccatcgctgttgtggccgttttgcagccctatatctttgtggccacggtgccagtcatcgtggcctttattatgctgagagcctactttttgcagacctcgcaacaattgaagcagctcgagagtgaaggacgttcccccatttttacgcatctggtcacatccctgaagggactgtggacactgagggcgttcggacgacagccgtacttcgagaccttgttccacaaggccctaaacctgcacaccgccaactggtttctgtacttgtccactttgcggtggttccagatgcgaattgagatgatcttcgtcatcttcttcatcgctgtgaccttcatcagtatactgaccaccggcgagggagaaggccgcgtgggcatcatcctaacgctggccatgaatattatgtctaccctgcagtgggcggtcaattcatcgatcgatgtcgacagcctgatgcgctccgttagtcgagtgtttaagtttattgatatgcccactgagggtaagcccactaagtccacgaagccgtataagaatggccaactgtctaaagttatgattattgagaactcgcatgtgaagaaagatgacatttggccttcaggaggacaaatgactgtgaaggatctaaccgctaagtacaccgaaggcggcaatgccatcctagaaaacatttcgttctccatatcgccgggccagagggtgggactgcttggacgcaccggcagtgggaagtcaactttgttgtcagcgtttctgcggttgctgaacacagaaggtgagatccagattgacggtgtgagctgggactcgatcacgctgcagcagtggcgtaaggccttcggagtcataccgcaaaaggtattcatattctctggcacattccgcaaaaatctggacccatacgaacagtggagtgatcaggagatatggaaggtcgctgatgaagtcgggcttcgcagtgtgatcgagcaattcccagggaaactggatttcgtgctagtagacggaggttgcgttttgagtcacggacacaaacagctgatgtgtttggctcggtcggtcctctcgaaagcaaagattctactgcttgacgaaccatcagcacacctggacccagtaacatatcaaattatacgccgtacgctgaaacaagcctttgcagattgtaccgttattctctgcgaacaccgcatagaagccatgttggaatgtcagcagttcttggtgatagaggagaataaggtgcgccagtatgatagcatccagaagctgttgaacgagcgctccttgttccgtcaggctattagtccctctgatagggtgaagctcttcccacaccgaaatagctcaaagtgtaagtccaaaccgcaaatagccgctctgaaggaggaaaccgaagaagaggtgcaagacacccggctg

SEQ ID NO: 10184 - DNA, 4440 bp, synthetic construct
  misc_feature 1..4440: note = source = /note="Description of Artificial Sequence: Synthetic coding sequence"
  source 1..4440: mol_type = other DNA
atgcagcgtagcccacttgagaaggcttccgtggtgtccaagctgtttttctcctggacaaggcctattttgcgtaaagggtataggcagcgcctggaacttagcgacatatatcagattccctctgtcgatagcgccgacaacctgagtgaaaagctagagagagagtgggaccgtgagctagctagcaagaagaatcctaaactgatcaatgccctgagaagatgcttcttctggcggttcatgttctacggaatcttcctgtatctcggcgaggtcactaaggctgtccaaccactgctgttgggccggatcatcgcgtcttatgatcctgacaacaaggaagagcgtagcatcgcaatatacctaggtatcggcttatgtctgctgtttatcgtgaggactctcctgctccaccctgcaatctttgggctacatcacataggaatgcagatgagaattgccatgttctccctgatatacaaaaaaaccttgaagctgtcaagccgggtgctggataagatttctattgggcagctggtgagcctgctttccaataatcttaacaagtttgatgagggtctcgctcttgcccatttcgtgtggattgcccctttgcaggtcgccctgctcatgggcctgatatgggagctgttacaggcctccgccttttgcgggctaggatttctcatcgtgctagcactttttcaggccggtctgggccggatgatgatgaaatatcgcgaccagcgggccggaaagattagcgaacggttggtcatcaccagtgagatgatcgaaaatatacagtccgttaaggcttactgctgggaggaggccatggagaagatgatcgagaacctgcgtcagactgaacttaaactgacccggaaagccgcgtatgtgcgatactttaatagttcagccttttttttcagcggcttcttcgtcgtatttctgtccgtgttgccttacgccctaatcaagggaattatcctcaggaagatatttaccactataagcttctgtattgttttgaggatggcagtcactcgccagtttccctgggccgtgcagacttggtacgattctctcggggcaataaacaaaatccaggactttttgcaaaagcaggagtataaaaccctagaatacaatctgacaaccacagaggtagtgatggaaaatgtcactgccttctgggaagagggctttggagaactattcgagaaagccaagcagaataacaacaaccggaaaacgtccaacggggacgattccttgttcttttcaaatttttctttactggggacgcccgtcctaaaagatattaatttcaaaattgagagaggacaactccttgcagttgcaggctcaactggtgctggtaagacgagcctattgatggtgatcatgggggagttggaacccagcgagggaaaaatcaagcattctggcagaatttccttttgttcgcagttttcctggataatgcccggaacaattaaggaaaacatcatcttcggcgtgagctacgatgaatacaggtatcgaagtgtaatcaaggcatgtcagctagaggaagatatttctaaatttgcagagaaagacaacatagtgctaggggagggaggcattaccctgtcaggcggtcaacgggccaggatcagcctggcgcgagccgtttataaggacgctgatctgtacctgctcgatagcccgtttggttatctcgatgtgcttaccgagaaagaaatcttcgagtcctgtgtgtgcaaacttatggcgaataaaacccgtatcctcgtgacctcaaaaatggaacacctcaagaaagccgacaagattctcattttacacgaaggctcatcctacttctacggcaccttctccgagctgcagaatctgcagccagacttttcatctaagctgatgggttgcgacagcttcgaccagtttagtgctgaacgacgaaacagtatccttaccgaaaccctccacagattcagcttagaaggagacgccccggtatcctggaccgaaacaaagaaacagtctttcaagcagactggggagttcggcgagaagcgaaagaatagtatcctcaaccccatcaactcaatcaggaagtttagcattgtgcaaaaaaccccactgcaaatgaacggcatcgaggaggatagtgacgaacctctcgagcgaaggcttagcttggtgcctgattctgagcagggcgaggctatactcccccgaattagcgttatatctactggacctacactgcaggccagaaggcgccagagtgtgctgaacttaatgacacactccgtgaaccagggtcagaacattcacagaaaaactaccgcctccaccagaaaggtctcattggctccacaggcaaatttaaccgagctagacatttacagccgccgtctgagccaagagaccggtttagaaatcagtgaggaaatcaacgaggaagacctgaaagagtgtttctttgacgatatggagagcatccctgccgtgacaacctggaacacctatctgcgctatataaccgtccacaagagtttgatttttgtactgatctggtgtttagttatcttcctagctgaagtggccgcaagtctcgtggtgttatggcttctcggaaacacgccattgcaggataaaggtaactctacgcacagtcgcaataattcatacgcggtgattattacatcaacaagtagctactacgtcttttacatttacgtcggggtggcagacacccttctcgccatgggctttttccggggcctgcccttggttcatacgttgattaccgtgtccaagatcctccatcataagatgctccactcagtacttcaagcccctatgtctacgctgaacaccctcaaagccggaggcatacttaacagatttagcaaggatatcgctatccttgacgatctgctccctttgactattttcgatttcatccagctcctactaatcgtcattggagctatcgcagtggtcgccgtgcttcaaccctacatattcgtggccaccgtgccagttattgttgcctttatcatgctgcgagcctacttcctccagactagccagcagttgaagcagctagagtccgaggggcggagccccatttttacccacctggtgacatccctgaaagggttgtggactctccgtgcgtttggcaggcagccgtacttcgaaaccttgttccataaagccttgaatctccacacagctaactggttcctgtatctatcaacactccgatggttccagatgaggattgagatgatcttcgtcatctttttcatcgcagttacatttatatccatcctaactaccggcgaaggcgaaggacgtgtcggaatcatccttactctggcaatgaatatcatgtctacgctacaatgggcagtgaattcttctatagacgtggactccttaatgcgctcagtctctagagtttttaagttcatcgatatgcctacagaaggcaagcctacgaagtctaccaaaccatacaagaatgggcaattaagcaaagtgatgataattgagaacagtcatgttaagaaagacgacatttggccttcaggaggccagatgacagtcaaagatctaacggcaaaatatactgagggagggaatgccatactcgaaaacataagcttttccatttcccctgggcagcgggtgggtctactgggacggacaggctctggaaagagtactctgttgagcgccttcttacggctgcttaatactgagggtgagattcagattgacggggtgagctgggactcaatcactctgcagcagtggaggaaggcattcggagtaattccacagaaagtgtttatatttagcgggacatttcgcaagaatctggatccctacgaacaatggtctgaccaagagatctggaaagtcgctgacgaggtgggcctgaggagcgtgatcgaacaatttcctgggaaacttgacttcgttttggtagacggtgggtgtgttctctctcacggacataaacagctgatgtgtctcgccaggtctgtgcttagcaaggccaagatattgctgcttgatgagcctagtgcacacctggatccagtgacttaccagataattaggcggacactgaagcaggcattcgccgactgcaccgtgattctgtgcgaacaccggatcgaagccatgttggaatgccagcagtttctggtgatcgaagagaacaaagtgcgccagtacgactcaattcagaagctcttaaacgaacggtccctcttccgccaggcaatctctccaagtgaccgtgttaagctattcccccatagaaactctagtaagtgtaagtctaaacctcagattgctgccttgaaggaggagacagaggaggaagtccaggacacccggtta

SEQ ID NO: 10185 - DNA, 4440 bp, synthetic construct
  misc_feature 1..4440: note = source = /note="Description of Artificial Sequence: Synthetic coding sequence"
  source 1..4440: mol_type = other DNA
atgcaaagatcacccttggagaaagcttccgtggtgtctaaactgtttttcagttggacaaggccgattctccggaaggggtaccggcagcggctggagctgagtgacatataccagatcccatcagtcgattccgcagacaacctgagtgaaaagctcgaacgggagtgggacagggagctggcatcgaagaagaatcccaaactaatcaatgccctgagaaggtgcttcttttggcgctttatgttctacggcatctttctgtatctgggcgaggttacgaaggctgtgcaacctctgctgcttggcaggatcatcgcatcctatgacccagataacaaagaagaacgcagcattgcgatttacctggggattgggctctgcctgctgttcatcgtgaggaccctcctactccaccctgcaattttcgggctccaccacatcggaatgcagatgagaattgccatgttcagcctcatctacaagaagaccttgaagctgtcatctcgagtgctggacaagatttcaattgggcaactggtctcattactgtcgaacaatcttaataagtttgacgaggggctggcgctggcacattttgtctggatcgcgcctctgcaggtagccctcctgatgggactgatctgggaactcctacaggcctccgccttctgtgggttgggattcctgattgtgcttgcactgtttcaagcaggcctcggtcgcatgatgatgaaataccgtgatcagcgcgctggcaagatttccgaaaggttggtgataactagtgaaatgatcgaaaatattcagagcgttaaggcgtactgttgggaggaggccatggagaaaatgattgaaaacctaagacagacagaactcaagttgaccagaaaagcagcctacgttaggtactttaacagttccgctttcttcttctccggcttctttgtggtgtttctcagcgtgctgccttacgctctcatcaaaggaatcattttgcggaaaatcttcaccactatttcattttgcatcgtattaaggatggccgtcacacgacagtttccttgggccgtccagacatggtatgactccttgggggcgattaacaaaatccaggacttccttcagaagcaagagtataagacactggaatataatctaaccaccactgaagtagtgatggagaatgtaaccgctttctgggaggaggggttcggggagctcttcgagaaggcaaaacaaaacaataacaacagaaagacttccaacggcgatgactctttatttttcagcaactttagcctgctcggcactcccgtactgaaagatattaacttcaaaatagagagaggccagctgctcgctgtggctggttctaccggcgctggaaagacaagccttttgatggtgatcatgggcgagttggagccttcggagggcaagattaaacacagtgggcgcatatcattttgctcccagttttcctggatcatgcccggaacaattaaggaaaacattattttcggtgttagttacgatgagtatcgctaccgatccgtgatcaaggcatgccagctggaggaagacatctcgaagttcgccgagaaggacaacatcgtgcttggcgagggaggcatcaccctgtctggcgggcagcgagctaggatctcactggccagggcagtatacaaagacgccgatctgtacttattggattcaccttttggctatctcgatgtgctgaccgaaaaagaaatctttgaatcttgcgtatgtaaacttatggctaataaaacacggatcttagtgaccagcaaaatggagcatctcaaaaaggccgacaagatcctcatactgcatgaggggtcgtcttacttctatggcacattctccgagctccagaatttacagcctgacttcagtagtaagttgatggggtgcgactcatttgaccaattcagtgccgagaggcgaaactctattctaacggagacacttcatagattttcgctggagggggacgcgcctgtctcctggaccgagacaaaaaagcagagcttcaaacagactggggagttcggggagaagagaaaaaattctattctgaatcccataaattccatccgaaaattctccatcgtgcagaagaccccactccagatgaacggtattgaggaagacagcgacgagccactggaacggcgattatccctcgtgcctgacagtgaacagggggaggcaattttgccacgcattagtgtcataagcaccggaccaaccctgcaggctaggaggcgccaatccgtactgaatctgatgacacactccgtcaaccagggacagaatatccacaggaaaactactgcctcgactcgtaaggtctccctggcaccacaggccaacttgaccgaactcgacatttactcccgtaggctcagccaagagactggtcttgaaatctcagaggagatcaacgaggaggacctgaaagaatgcttctttgatgacatggagtctattcccgcagtaaccacatggaatacatacttgagatatatcacggtacacaaatccctgatatttgttttgatatggtgtctggtcatcttcttagccgaagtggcagccagcctggtagtgctgtggctcctcggcaacacaccactgcaagataaagggaattcgactcactcgcggaataatagctatgcggtgatcattacctctacttcatcctactatgtattttacatttatgtcggcgttgcggacacccttctggccatgggattcttccgagggcttcctctcgtgcacactctaatcacagtgtcgaaaatccttcaccacaaaatgttacactcagtactgcaagccccaatgagcaccctcaacacacttaaagctggtggcatcttgaatcgattctcaaaagatattgcaatactggacgacctgctgcccctgaccatcttcgactttattcagctgctgctgatagtgatcggcgctatcgctgttgtcgccgtgctgcaaccttacatcttcgtggccactgtgccagttatcgttgcttttataatgctccgcgcttattttttgcagacctcgcagcagcttaaacaactggagagtgaggggcgaagcccgatttttacacacttggtgacctccctaaaaggtctctggactctccgggccttcggcaggcaaccttactttgagaccctgtttcacaaggccctcaacttgcacacggctaactggttcctttatctttcaacccttaggtggtttcagatgaggatcgagatgatcttcgtgatcttttttatcgctgtaactttcatcagcattctcactacaggcgaaggagaggggagagttggaatcattctaacactggccatgaatattatgtccaccctgcaatgggccgtcaacagcagcatagatgttgatagccttatgcggtccgtgagtcgggtattcaaattcatagacatgccgaccgaaggaaagccaactaagtccacaaagccctataagaatgggcaactgagcaaagtgatgattattgaaaactcacacgttaaaaaagatgatatctggccctcagggggacagatgacggttaaagatttgaccgcaaaatacactgagggaggcaacgctattctcgagaacatcagtttttcaatcagtccaggtcaacgcgtcggactgttaggaagaactggctctgggaagagtactctgttatcggcgtttctaaggctgctaaacaccgaaggcgagatccagattgacggcgtttcgtgggacagtatcacactccaacagtggaggaaggcatttggagtgatcccccagaaggtgttcatcttctcaggcacctttcgtaagaatctagacccatacgaacagtggtccgaccaggaaatttggaaggtagcagacgaggtcgggctgcgttcagtgatcgagcagtttcccgggaagctcgacttcgttctggttgacggaggatgtgtgctctcgcatgggcataaacagctaatgtgtctagcccgctcggtactgtcaaaggctaaaatcctgctgttagatgaaccttcggctcatctagaccccgttacataccaaatcatccgacgaacactaaagcaagcattcgccgattgcaccgtcattctgtgcgagcaccggatcgaagctatgctggagtgtcagcagttccttgtcatcgaggagaataaggtgcgccagtatgacagcatccaaaagcttctcaacgagcgttccttgtttcgacaggctatctcaccgtccgaccgcgtcaagctgtttccccataggaatagcagcaaatgcaagtcaaagccccagattgccgcattgaaggaggagactgaggaagaggtgcaggatactcgactg

SEQ ID NO: 10186 - DNA, 4440 bp, synthetic construct
  misc_feature 1..4440: note = source = /note="Description of Artificial Sequence: Synthetic coding sequence"
  source 1..4440: mol_type = other DNA
atgcaaaggtcacctcttgaaaaggctagcgtggtttcgaaactgttcttcagttggaccagacctattttgcgcaagggatataggcagcgtctcgaattatccgatatttatcagattccatccgttgactccgcagataacctctcagagaagcttgagcgggaatgggatcgggaacttgcaagcaaaaagaatccaaagttaataaacgctctcagacgatgctttttttggcgatttatgttttatggaatctttttatacctcggagaagtaacaaaggccgttcaaccgctccttctcggacggattatcgcatcttatgacccagacaataaggaggagagatctatcgcaatttacctgggaattgggctatgtctgctgttcattgtgagaacgttacttcttcatccagcaatttttggattgcatcatatcggaatgcaaatgagaattgctatgttttcattgatttataaaaaaacactcaagctttcttcaagagtcctagataagatatctattggtcaactagtatctctactcagcaacaaccttaataaatttgatgagggacttgctctagctcactttgtgtggattgcaccactccaagtggccctcttgatgggactgatttgggaactgcttcaggcgtctgctttttgcggacttggattccttattgtgctagcactctttcaagccggtttgggaagaatgatgatgaaataccgagaccagagagcgggaaaaatcagtgagagattggtgatcacatcggagatgattgagaatattcagtctgttaaagcatactgttgggaagaagctatggagaagatgattgagaatctccgtcaaacagagcttaaactcacacgtaaagctgcatatgtcagatacttcaattcttctgcgttctttttcagtggcttcttcgtggtttttttgtctgtcttgccttacgctcttatcaagggaataatcctcagaaagatattcactactattagtttttgtattgtgctaaggatggcagtaactagacaatttccatgggccgtacaaacgtggtatgactcacttggtgctatcaataaaattcaagatttcctgcagaaacaagagtataagacactggaatacaatttgacaactacagaggttgttatggagaatgttacagccttctgggaagaaggtttcggagaacttttcgaaaaagctaaacagaataataataatagaaaaacttctaatggagatgattcgttatttttctcaaacttcagcctgcttggaactcccgtccttaaggatattaacttcaagatcgaacgaggacagttgctcgctgttgcaggatcaaccggtgctggtaaaacatcattacttatggttattatgggagaacttgagccgtctgaaggaaaaataaagcattcgggacgtatttcattttgctcgcaattctcctggataatgccaggaacgatcaaggaaaacatcatattcggagtgtcgtatgacgaatatcgctacagatcagtcataaaggcttgccagcttgaagaagatatttcaaagtttgcagaaaaggataatatagtattaggggaaggagggattacgcttagcggaggacaacgtgcacgaatttcgctggctcgagctgtttacaaagatgctgacctataccttctggattccccatttggctacctcgacgttctcacggaaaaggagattttcgaatcatgtgtttgtaagctcatggctaacaagacacgaatcttggtcacatcgaaaatggagcatttgaaaaaagctgataaaatactgatccttcacgagggtagttcctatttctacggaacattctcggagttgcaaaatctgcagccagatttttccagtaagcttatggggtgtgattccttcgatcaattttcagctgaacgtcgtaattctattctaacggagactcttcaccgtttctctttggaaggtgatgccccggtgtcatggacggagactaaaaaacaatcgtttaaacagactggagaatttggggagaaaagaaagaattctattctgaatcccattaattctatcagaaagttcagcattgtccaaaagactccactgcagatgaatggaatcgaggaagatagtgatgaaccattagaacgaagactatcgttggttccggatagcgaacaaggcgaggctatcttgcctcgtatatcagtaatcagtacgggacccacactccaagcccgacggcgtcaatccgttctgaatctcatgactcattcagtaaaccaaggacaaaatattcatagaaagacaaccgcaagtactagaaaagtttcactcgcaccacaggcaaatctgacagaacttgatatatatagtagaagattgtcccaggaaacgggtttggaaatctctgaagagattaacgaagaggacctgaaggaatgttttttcgatgatatggagtcaattccggcagttactacatggaatacctacttgcgttatattactgttcacaaatctctcatctttgttttaatttggtgcttggtaatattcttagctgaagtcgcagcgtcactcgttgtgctttggcttttgggaaatactccattgcaagacaaaggtaattccactcattctcggaacaatagttatgcggtcattatcacttcaacgtcgtcatactatgtcttttacatttatgtcggagttgctgatactctactggctatgggattcttccgcggattacccttggtccacaccctaattactgtttcgaagattctacaccataaaatgctccatagtgtcctccaggctccaatgagtactttaaatacactcaaagctgggggaattttaaatagattctccaaggatatcgcgattcttgacgaccttttgcctttaactatctttgattttattcaactcctccttatagtgatcggggctatagctgtcgtagctgttttgcaaccttatatctttgtggcgaccgttccagtgatcgttgcatttattatgctccgggcatatttcttgcaaacttctcagcagctcaaacaattggagtcggagggaagaagcccaatttttacccacttggtgacttctttgaagggattgtggactcttcgggcattcggcagacagccatatttcgagactttatttcataaggcactgaatcttcatactgctaactggtttctgtatttatcgacacttaggtggttccagatgagaattgaaatgatttttgttatatttttcatcgcagtcacattcatatccatacttaccacaggcgagggagaaggtcgtgttggaattatccttaccctcgctatgaacattatgtctaccttgcaatgggctgtcaattcctctatagacgtcgactctctgatgcgttctgttagcagagtcttcaaatttattgacatgcctacagaaggaaagcctaccaagtcgactaaaccatacaaaaatggacaactttcaaaagtgatgatcattgagaattcccatgttaaaaaagacgatatttggccaagtggaggacagatgacagtcaaggatttgactgcgaaatacacagaaggaggaaatgcaattctagaaaatatcagcttctcaatttcgccagggcagcgagttggtttgctcggacgcactggttcaggaaagtccactcttctctcagcgttcttaaggcttctaaacacggagggagagatccagatcgatggagtttcttgggactctattactctgcaacaatggcgtaaggcttttggtgttattcctcaaaaggtgtttatcttttcgggaaccttccgcaaaaatttagatccatatgaacaatggtccgatcaggaaatatggaaagtcgcggacgaggtgggacttagatcagttattgagcaatttccgggaaaacttgacttcgtcctggtcgacggtggatgtgttctgagtcacggacataagcaacttatgtgtctagcaagatctgttctttcaaaagcaaaaattttgctacttgatgaaccaagcgctcacctagaccctgttacctaccaaattattcgcagaactttgaagcaagcgttcgctgattgcacagtaatcctctgcgagcacagaattgaagcaatgctagagtgccagcaatttttagtcattgaggaaaataaagtgcgacaatacgatagcatacaaaagcttctgaacgaacgaagtttgtttcgacaagcaatttcgccatcggatcgggtcaaattgttcccgcacaggaacagtagtaagtgtaaatcaaaaccgcaaattgcggctcttaaagaagaaactgaagaggaagtgcaggatacacgattg

SEQ ID NO: 10187 - DNA, 4440 bp, synthetic construct
  misc_feature 1..4440: note = source = /note="Description of Artificial Sequence: Synthetic coding sequence"
  source 1..4440: mol_type = other DNA
atgcaacggtcgcccctggagaaagccagcgtggtgtccaagctgtttttctcatggactaggccaatcctgcggaagggctaccgccaaaggcttgaactgagcgacatttaccagatcccttcggtggatagtgctgataatctttcggaaaagctggaacgtgagtgggatcgcgagcttgcatccaagaagaacccgaagctgatcaacgcgctcagacgatgcttcttctggcggtttatgttctacggaattttcctctacctcggagaagtgaccaaagcagtgcagccgctccttctgggacgcatcatcgcgtcgtacgaccctgacaataaagaagagcggtcgatcgctatctacctcggaatcggactttgcctgctgttcatcgtgcgcaccttgctcctccaccccgctatctttggcttgcaccatatcgggatgcaaatgagaatagctatgttctccctcatctacaaaaagactctgaaattgtcctcccgagtcttggacaaaatctcgatcggacaactggtgagcctgctctccaataacctgaataagttcgacgaaggcctcgccctggctcacttcgtctggatcgccccgttgcaggtggccctgctcatggggcttatctgggaactgctgcaagcctcggcgttctgcgggctcgggttcctgattgtgcttgcgctctttcaggccggactgggacgcatgatgatgaaatacagggatcaaagagctggaaagatatcggaacggctggtgattactagcgaaatgatcgagaatattcagagcgtgaaggcatactgctgggaagaggccatggagaagatgatagagaacttgagacaaactgaactgaagctgacccggaaggcagcgtatgtgcgctactttaactctagtgcattcttcttctccgggttcttcgtggtttttctcagcgtgttgccatacgccctcatcaaaggaatcattctcagaaagatcttcactactatttcattttgcatcgtcctgcgcatggccgtcacccggcagtttccttgggcagtgcagacctggtacgactcgctgggtgcaattaacaaaatccaggatttcctccaaaagcaggagtacaagacgctcgaatacaatctgaccactaccgaagtcgtgatggagaacgtgaccgccttctgggaagaggggttcggggagctgtttgagaaggcgaaacagaacaacaacaatagaaagacttccaatggagatgattcgcttttcttttccaacttctccctgctgggtacgccggtcctcaaggacatcaacttcaagatcgaacgcgggcaactgctggcggtggcgggatcgacgggagccggaaagacctcactcctgatggttatcatgggcgaactcgagccgagcgaaggaaagattaaacactcgggaagaatctctttctgtagccagttcagctggataatgccgggcactatcaaggaaaacatcatttttggagtgtcgtacgatgaataccgctacaggtcagtcatcaaggcctgccaactggaggaagatatttcgaagtttgcagaaaaagacaacatcgtgctgggcgagggaggaatcactctgtctggaggacagcgagcccggatttctttggctagggcggtctacaaagacgccgacctgtacctcttggactcgcctttcggatatcttgatgtgcttaccgagaaagaaatcttcgagtcgtgtgtttgcaagctcatggccaacaagaccagaatcctggttacctccaagatggagcatctcaaaaaagcggataagatcctgatcctgcatgaaggatcgagctacttctacgggaccttctccgaactccaaaacctgcagccggatttctcatcgaaattgatgggctgcgacagctttgaccaattttctgccgagcggcgcaattcgatcttgactgaaactcttcaccgcttctcgctggagggcgatgcgccggtgtcgtggactgagactaagaagcagtcctttaagcagactggtgaattcggcgaaaagcgcaaaaactcgattcttaatcccattaactcaatccggaagttcagcatcgtgcagaaaaccccactgcaaatgaatggtatcgaagaagattccgatgagccgctggaacgtcggctgtccctcgtgcctgacagcgaacagggagaggcgatcttgccgcgcatcagcgtgatctcgactggaccaaccctgcaggcccgccgtcggcagtcagtgctcaacttgatgacccatagtgtgaatcaaggacagaatatccaccgcaagacgactgctagcacccggaaagtgtcgttggcgccgcaagccaacctgaccgaacttgatatctactcacggaggctgtcccaggagactggcctggaaatctctgaagagatcaatgaggaggacctcaaggagtgcttcttcgacgacatggagagcatcccagccgtcactacctggaatacctacctgcgctacatcacggttcacaaaagcctgatcttcgtgctgatctggtgtttggtcatcttcctggccgaggtcgccgcctcactcgtggtgctgtggctgctgggcaacactccactgcaggataagggcaactccactcattcccgaaataactcttacgccgtgatcataacctcgacctcgtcatactacgtgttctacatctacgtcggggtggcagacaccttgctcgccatgggattcttccgcggattgccgctggtccacactctgatcactgtgagcaagatcctccaccacaaaatgctgcacagcgtcctgcaagccccaatgagcactctgaacactctgaaagccggaggaatcctcaatcggttttcgaaagatattgcaatcctcgacgacctgctgcctctgaccatcttcgacttcatacagttgcttttgatcgtcatcggcgcaatcgccgtggttgctgtgctgcaaccctacatcttcgtggcgaccgtacccgtcatcgttgcgttcatcatgctgcgcgcgtacttcctgcagaccagccaacagcttaagcaactggagtcggaggggagatcaccaatcttcacccatctcgtgacctccctcaagggcctgtggactctgcgcgcattcggccggcaaccgtactttgaaaccctctttcacaaggcgctcaatctgcataccgctaactggttcctgtatctctccacgctgcgctggttccagatgcggatagaaatgatcttcgtcatctttttcatcgcagtcacgtttatcagcatcttgactaccggtgagggagagggcagagtcggaatcatcctcaccctcgcgatgaacatcatgagcaccctgcagtgggcagtcaactcatccatagacgttgacagccttatgagatcggtttccagggttttcaaattcatcgacatgccgactgaaggaaagccgacgaagtcaactaagccgtataagaacggacaactgagcaaggtcatgattattgagaattcccacgtgaagaaggacgatatatggccttcgggaggccagatgaccgtgaaggatctgacggctaagtacactgaagggggtaacgcgatccttgaaaacatctccttctccatctcaccaggccagcgggtggggttgctgggtcgcactggatcgggcaaatcaactctgctgagcgcattcttgcgcttgctgaacactgaaggagaaatccagatcgacggtgtgtcctgggactccatcaccctgcagcaatggagaaaggcctttggcgtcattccgcagaaggtgtttatcttctcgggaaccttccgcaaaaacctggatccttacgaacaatggtccgaccaagagatttggaaggtggctgacgaagtgggactgcggtcggtcattgagcagttcccgggcaagctcgacttcgtgctcgtggacggtggttgtgtcctgagccatggtcacaagcagttgatgtgtctggctagatccgtgctgtccaaagctaagatcctccttcttgacgaaccaagcgctcacttggacccagtgacctaccagataattcgccggactctcaagcaagcctttgcggattgcaccgtgatcctctgcgaacatcgtatcgaagcgatgctggaatgccagcagttcctggtaatcgaagagaacaaggtgaggcagtatgactccatccaaaagctcctcaacgaacgctccctcttcaggcaggcaatctcaccttcggaccgcgtcaagttgtttccgcatcggaatagctcaaaatgcaagtccaagccacaaattgccgccttgaaggaggaaaccgaagaggaagtgcaggatacgcggctc

SEQ ID NO: 10188 - DNA, 4440 bp, synthetic construct
  misc_feature 1..4440: note = source = /note="Description of Artificial Sequence: Synthetic coding sequence"
  source 1..4440: mol_type = other DNA
atgcaaagaagcccactggagaaggcatcggtggtgtccaaactgtttttctcctggactagacccatcctgcgtaaaggctaccgccagaggctcgaactgtcagatatctaccagatcccgagcgtggattcagcagataacctgtccgaaaagctggaaagagagtgggatcgggaactggcatcgaagaagaatcccaagctgattaatgcacttcgcagatgctttttctggaggtttatgttctacgggatttttctgtacctcggggaggtgactaaagctgttcaacctctcctccttggtcgcattattgcgtcgtacgacccggacaataaggaagaaagatcaatcgcgatttaccttggcattggactgtgtctgctgtttatcgtgcgcacccttctcctgcaccctgctatctttgggctccatcacattgggatgcaaatgagaattgcaatgttctcgcttatctacaagaaaaccctcaagctctcatcccgtgtgcttgataagatatcaatcgggcaattggtgtcgctgctgtccaacaacctgaataagtttgatgaagggctcgcactggctcactttgtgtggattgcaccgcttcaggtcgcactgctgatgggactgatctgggaactgctgcaagcctcagcattttgcgggcttggatttctcatagtcctggccttgtttcaggcaggtcttggtcgaatgatgatgaaatacagggatcagagggccggtaagattagcgaacgactggtgatcacttcggaaatgatcgaaaacatccagtcggtcaaggcctactgctgggaagaagcaatggaaaagatgatagagaatttgcgccaaaccgaattgaaactcactagaaaagcagcatacgtgaggtacttcaacagctcagcattctttttctctggctttttcgtggttttcttgtccgtccttccatatgcccttatcaagggcattatccttcggaagatctttaccacgattagcttctgcattgtccttagaatggcggtcacccgccagtttccttgggccgtgcagacctggtacgactcccttggggcaatcaataagatccaggactttctccagaagcaggaatacaaaactcttgaatacaacctcaccaccactgaggtggtcatggaaaacgtgactgcgttttgggaagagggattcggggagctcttcgagaaagcaaagcaaaacaacaataacagaaaaacctcgaatggagacgattcccttttctttagcaacttttccctcctcggtaccccagtgcttaaggacataaactttaagattgaaagaggtcaactgctcgccgtggcaggatcgactggagccggtaaaacgagccttttgatggtcattatgggagaactggaaccgtcagaaggcaagattaagcatagcggtcggatcagcttttgttcgcaatttagctggattatgccggggaccataaaagagaacatcatctttggtgtgtcatacgacgaatacagataccgcagcgtcatcaaggcctgccagcttgaggaggatatttcaaaattcgcagaaaaagataacatcgtgctcggcgaaggaggcattactctctccggtggacaaagagcccgtatctcactcgccagagctgtgtacaaggatgccgatctgtacctgctggattccccctttggatacctggatgtcctcactgagaaggagatttttgaatcgtgtgtttgcaagttgatggccaacaaaactcggattcttgtcacttcaaagatggaacacttgaaaaaagcggacaagattcttatactccacgaaggatcatcgtatttctacggaaccttctcggaacttcaaaacttgcaacctgatttctcatcgaaactgatggggtgtgattcgtttgatcagttttccgccgaacgacgcaattccatccttacggaaaccctgcatcgcttcagcctcgaaggggatgccccagtgtcctggaccgaaactaaaaagcaatcattcaaacagaccggcgaatttggagaaaaaagaaagaattcgattctgaatcccattaactccattcggaagttctcaattgtgcaaaaaacgcctcttcagatgaatgggatcgaggaagattccgacgaacctcttgagcggcgcttgtccctggtccccgattccgagcaaggtgaagccatccttccacggatttcagtcatctcaactggacccactttgcaagctcgccggcgccaaagcgtccttaatcttatgactcacagcgtgaaccagggacagaacatacatagaaaaaccaccgcctcgacccggaaagtgtcccttgcacctcaggcaaatctgactgagcttgacatctactccagacggttgtcccaagagactggtcttgaaatttcggaagagattaacgaagaagatctcaaggagtgtttctttgacgacatggagtcgattcctgcagttaccacctggaacacttatctgagatacattaccgtgcataaatccctgatcttcgtcctcatctggtgtctggtgattttcctggccgaagtggctgcttcgcttgtggtgctttggctgctcgggaacacgccgttgcaagacaagggaaactcgacccatagccgcaataactcatacgcagtgataatcacttcgacctccagctactatgtgttttacatatacgtcggagtggccgataccttgctggcaatgggtttctttagaggccttcctctcgtgcatactctgattacggtgagcaagattctgcatcataagatgctgcattctgtgctgcaggcaccgatgtcgactttgaacacccttaaggcaggtgggattctgaatcgctttagcaaggacatcgcgatccttgatgatcttctgcccttgacgatatttgactttatccagcttctgctcattgtgattggagcgatagccgttgtggcagtgcttcaaccatacatctttgtcgccactgtgccagtgattgttgcgtttatcatgcttcgagcctactttcttcaaaccagccagcagcttaagcaactcgagagcgaaggtcggtcccctattttcactcatctggtgacttccctcaagggtttgtggactctccgtgcttttggacggcagccttactttgaaactctgtttcacaaggctctgaatttgcataccgctaactggttcctttacctctcgaccctgcgttggttccaaatgaggatagagatgatcttcgtgatctttttcatcgccgtcacctttatcagcatactcactaccggagaaggagaggggagagtgggtatcattcttacgctcgccatgaacatcatgtccactttgcagtgggcagtgaatagctcaatcgatgtggatagccttatgcggtcagtctcacgtgtgtttaagtttatagacatgcctactgaaggaaagcccactaaatccacgaagccttacaagaacgggcagctgtcgaaggtcatgattattgagaactcgcatgtgaagaaagatgatatttggccgtccggagggcagatgacggtgaaggaccttaccgcaaagtacaccgagggaggaaacgccatccttgagaacatctcgtttagcatatcgccaggccagcgtgtgggactcctgggtagaaccggctcaggaaagtcaaccctcctttctgcctttcttcgccttctgaacaccgaaggagagatacagatcgacggtgtgtcgtgggactcgatcactcttcaacagtggagaaaagcattcggagtgattccacaaaaagtgtttatcttttcgggtaccttccgtaagaacctggatccatacgaacagtggtcagatcaggaaatatggaaggtggccgatgaggtgggacttcgatcggtcatcgagcagtttccgggcaaacttgactttgtgttggtggacggcggatgtgtgctgtctcatggtcacaagcaacttatgtgccttgcacgctctgtcctgtcgaaggcaaagattctgctgcttgatgaaccaagcgcgcatctggaccctgtgacctaccagataatcagaaggaccctgaagcaggcattcgccgactgtactgtcattctctgcgaacatcggattgaagcaatgcttgaatgtcaacaatttctggtcatagaagaaaacaaggtgaggcagtacgattcgattcaaaaactgctcaatgagcggtccttgttccggcaagcaataagcccatccgacagagtcaaattgttcccacaccgaaactcgagcaagtgtaagtccaaacctcaaatagcggcactgaaggaagaaaccgaggaggaggtgcaagatactaggctt

SEQ ID NO: 10189 - DNA, 4440 bp, synthetic construct
  misc_feature 1..4440: note = source = /note="Description of Artificial Sequence: Synthetic coding sequence"
  source 1..4440: mol_type = other DNA
atgcaacgttcgccgttagaaaaagcgtcggttgtatcgaaactatttttttcgtggacgcgtccgatactacgtaaaggttatcgtcaacgtttagaactatcggatatatatcaaataccgtcggtagattcggcggataatctatcggaaaaactagaacgtgaatgggatcgagaattagcgtcgaaaaaaaatccgaaattaataaatgcgttacgacgttgttttttttggcgatttatgttttatggtatatttctatatttaggtgaagtaacgaaagcggtacaaccgttactactaggtcgaataatagcgtcgtatgatccggataataaagaagaacgatcgatagcgatatatctaggtataggtttatgtttactatttatagtacgtacgttactattacatccggcgatatttggtctacatcatataggtatgcaaatgcgtatagcgatgttttcgctaatatataaaaaaacgctaaaattatcgtcgcgagttttagataaaatatcgataggtcaattagtatcgctattatcgaataatctaaataaatttgatgaaggtttagcgttagcgcattttgtttggatagcgccgctacaagttgcgctactaatgggtttaatatgggaattattacaagcgtcggcgttttgtggtttaggttttttaatagtactagcgttatttcaagcgggtctaggtcgtatgatgatgaaatatcgagatcaacgagcgggtaaaatatcggaacgattagtaataacgtcggaaatgatagaaaatatacaatcggttaaagcgtattgttgggaagaagcgatggaaaaaatgatagaaaatttacgtcaaacggaactaaaactaacgcgtaaagcggcgtatgtacgttattttaattcgtcggcgttttttttttcgggtttttttgtagtttttttatcggtattaccgtatgcgttaataaaaggtataatactacgaaaaatatttacgacgatatcgttttgtatagtattacgtatggcggttacgcgtcaatttccgtgggcggttcaaacgtggtatgattcgctaggtgcgataaataaaatacaagattttctacaaaaacaagaatataaaacgttagaatataatctaacgacgacggaagttgtaatggaaaatgttacggcgttttgggaagaaggttttggtgaattatttgaaaaagcgaaacaaaataataataatcgtaaaacgtcgaatggtgatgattcgctatttttttcgaatttttcgttattaggtacgccggttctaaaagatataaattttaaaatagaacgaggtcaattactagcggtagcgggttcgacgggtgcgggtaaaacgtcgttattaatggttataatgggtgaattagaaccgtcggaaggtaaaataaaacattcgggtcgtatatcgttttgttcgcaattttcgtggataatgccgggtacgataaaagaaaatataatatttggtgtatcgtatgatgaatatcgttatcgttcggtaataaaagcgtgtcaactagaagaagatatatcgaaatttgcggaaaaagataatatagttctaggtgaaggtggtataacgttatcgggtggtcaacgagcgcgaatatcgttagcgcgagcggtatataaagatgcggatttatatttactagattcgccgtttggttatttagatgtactaacggaaaaagaaatatttgaatcgtgtgtatgtaaattaatggcgaataaaacgcgtatactagtaacgtcgaaaatggaacatctaaaaaaagcggataaaatactaatactacatgaaggttcgtcgtatttttatggtacgttttcggaactacaaaatctacaaccggatttttcgtcgaaattaatgggttgtgattcgtttgatcaattttcggcggaacgtcgtaattcgatattaacggaaacgttacatcgattttcgctagaaggtgatgcgccggtatcgtggacggaaacgaaaaaacaatcgtttaaacaaacgggtgaatttggtgaaaaacgaaaaaattcgatattaaatccgataaattcgatacgtaaattttcgatagtacaaaaaacgccgctacaaatgaatggtatagaagaagattcggatgaaccgttagaacgtcgtttatcgctagtaccggattcggaacaaggtgaagcgatactaccgcgtatatcggtaatatcgacgggtccgacgctacaagcgcgacgtcgtcaatcggtactaaatttaatgacgcattcggttaatcaaggtcaaaatatacatcgtaaaacgacggcgtcgacgcgtaaagtttcgctagcgccgcaagcgaatttaacggaactagatatatattcgcgtcgtctatcgcaagaaacgggtttagaaatatcggaagaaataaatgaagaagatctaaaagaatgtttttttgatgatatggaatcgataccggcggtaacgacgtggaatacgtatctacgttatataacggtacataaatcgttaatatttgtattaatatggtgtctagtaatatttctagcggaagttgcggcgtcgctagttgtactatggttattaggtaatacgccgttacaagataaaggtaattcgacgcattcgcgtaataattcgtatgcggtaataataacgtcgacgtcgtcgtattatgtattttatatatatgttggtgtagcggatacgctactagcgatgggtttttttcgtggtctaccgttagtacatacgctaataacggtatcgaaaatattacatcataaaatgttacattcggtattacaagcgccgatgtcgacgttaaatacgctaaaagcgggtggtatactaaatcgtttttcgaaagatatagcgatattagatgatttattaccgctaacgatatttgattttatacaattattattaatagtaataggtgcgatagcggttgtagcggttctacaaccgtatatatttgttgcgacggttccggtaatagtagcgtttataatgctacgagcgtattttttacaaacgtcgcaacaattaaaacaattagaatcggaaggtcgttcgccgatatttacgcatctagtaacgtcgctaaaaggtttatggacgctacgtgcgtttggtcgtcaaccgtattttgaaacgctatttcataaagcgctaaatctacatacggcgaattggtttttatatttatcgacgttacgttggtttcaaatgcgtatagaaatgatatttgtaatattttttatagcggtaacgtttatatcgatattaacgacgggtgaaggtgaaggtcgtgtaggtataatattaacgttagcgatgaatataatgtcgacgctacaatgggcggttaattcgtcgatagatgttgattcgctaatgcgttcggtttcgcgtgtatttaaatttatagatatgccgacggaaggtaaaccgacgaaatcgacgaaaccgtataaaaatggtcaactatcgaaagttatgataatagaaaattcgcatgttaaaaaagatgatatatggccgtcgggtggtcaaatgacggttaaagatttaacggcgaaatatacggaaggtggtaatgcgatattagaaaatatatcgttttcgatatcgccgggtcaacgtgtaggtctactaggtcgaacgggttcgggtaaatcgacgttactatcggcgtttctacgattattaaatacggaaggtgaaatacaaatagatggtgtatcgtgggattcgataacgctacaacaatggcgaaaagcgtttggtgttataccgcaaaaagtatttatattttcgggtacgtttcgtaaaaatttagatccgtatgaacaatggtcggatcaagaaatatggaaagttgcggatgaagtaggtctacgatcggttatagaacaatttccgggtaaattagattttgttctagttgatggtggttgtgtactatcgcatggtcataaacaattaatgtgtctagcgcgatcggtattatcgaaagcgaaaatactactactagatgaaccgtcggcgcatctagatccggtaacgtatcaaataatacgacgtacgttaaaacaagcgtttgcggattgtacggtaatactatgtgaacatcgtatagaagcgatgctagaatgtcaacaatttttagtaatagaagaaaataaagttcgtcaatatgattcgatacaaaaactattaaatgaacgttcgctatttcgtcaagcgatatcgccgtcggatcgtgtaaaactatttccgcatcgaaattcgtcgaaatgtaaatcgaaaccgcaaatagcggcgttaaaagaagaaacggaagaagaagttcaagatacgcgtcta

SEQ ID NO: 10190 - DNA, 4440 bp, synthetic construct
  misc_feature 1..4440: note = source = /note="Description of Artificial Sequence: Synthetic coding sequence"
  source 1..4440: mol_type = other DNA
atgcaacgcagccctttggagaaggctagtgtggtgtcaaagctctttttctcttggacccgcccaatcctgcggaaaggctacaggcagcgcctggaactgtccgacatttaccagattccttctgttgatagtgcagacaacctaagcgagaagcttgagcgagagtgggatcgggagctggcctcaaaaaaaaatccaaaacttatcaatgcacttcgcagatgcttcttctggcgctttatgttctatggcatatttttgtaccttggggaggtgactaaggcagtgcaaccgctgctgctaggccggattatcgcttcatacgaccccgacaacaaggaagagcggagcatagctatttacctggggattggtctgtgtctcctgtttatcgtgagaacactcctgctacatccagccatttttggcctccatcatattggaatgcaaatgagaattgccatgttttccctcatctacaaaaaaacactgaaactctcatcgagagtgctagataagatttctatagggcagctggtgtccttgctttccaacaaccttaacaaattcgatgagggcttggcccttgcccacttcgtgtggatcgcgccactgcaagtcgctctgctgatgggattgatttgggagctgctgcaggcaagcgcattctgtggcctggggttcttaatagtgcttgcactgtttcaggctggactcggacgaatgatgatgaaataccgcgaccagagggctggcaagataagtgaacggctcgtgatcactagcgaaatgatcgaaaatatccagagcgtaaaagcttattgctgggaggaagctatggagaaaatgatagaaaacttgcgtcagacggagttgaagctgacccgtaaggctgcttatgttcgctacttcaattccagcgcgtttttcttctcaggcttttttgtggtatttctgtcagtcctaccttatgcccttatcaagggcattatcctgcggaagatttttacaaccatttccttctgcatagtgctgcggatggcagtaacaagacaatttccgtgggctgtgcaaacgtggtacgactccctcggcgccatcaacaagatccaggactttcttcagaagcaggaatataagacactcgagtataacctaaccactacagaagtggttatggagaatgttacagctttttgggaggagggcttcggtgagctcttcgagaaagctaagcagaacaataataaccgcaagacaagtaatggcgacgatagtctgtttttcagcaatttcagcctgctggggacacccgtgctaaaggatattaattttaagatcgagcgcggccagctgctggcggtcgctggcagtacgggggctggcaaaactagtttgctaatggtcattatgggagagctagaaccttctgagggcaaaataaaacacagcggaagaatatcattctgcagtcagttctcctggataatgcccggcacaataaaagagaacataatctttggagtctcgtacgatgaatacagatatagatcggtcattaaagcctgtcaactagaagaggatatcagtaagttcgcagaaaaagacaatatcgtgctgggcgaaggtgggattacgcttagcggcgggcagcgggcccgtatatcactggccagggctgtatataaggacgcggatctgtatctcctggactccccgttcgggtatttagatgttctaacagagaaggaaatctttgaatcctgtgtgtgcaaattaatggcaaacaagacccgcattctggtgacttccaaaatggaacatttgaagaaggccgataagatattaatcttgcacgaaggttcatcttatttttatggcactttttccgagctgcagaatctacaaccagatttttcctccaagctcatggggtgcgactcttttgatcagttcagtgccgagcggcggaatagtatcctgacggagactctgcatcgattcagcctggaaggggatgcgccagtatcgtggacagagaccaaaaagcaatcctttaagcagacaggggagttcggcgaaaaacgtaagaattctattttgaaccccataaactccatccgaaagttttcaatcgttcagaagacccccctgcagatgaacggaattgaagaggactccgacgaaccactggagcgcagactgtctctggtccctgactccgaacagggagaggcaattcttccgagaatatccgtgatctcaacgggccccacgctgcaggcccggcggagacagagtgtactcaatctgatgacccattcagtaaatcaaggacagaacatccaccgcaagaccacagcctcaaccaggaaggtctctctggccccccaggctaacctgaccgaactggatatttatagcaggagactgtcacaggaaacagggttggaaatttcagaggaaattaatgaagaggaccttaaagagtgctttttcgacgacatggagtccatacccgcagtgaccacgtggaacacatatctcagatatattactgtgcataaaagtttgatcttcgtcttaatctggtgccttgttattttcctcgccgaggtggcagcctccctggttgtgctgtggcttttggggaacacacctttacaggataaaggaaatagcacccactccagaaacaacagctacgcggtgataatcacaagtacttcatcctattacgtcttctatatttacgtcggagtcgcagatactctgctcgctatgggcttctttagggggcttccactggtgcacaccctgataaccgtttccaagatattgcatcataaaatgttacattctgtgctgcaggctcctatgagtactttgaatactctcaaagcgggtggcatactgaaccgattctcaaaggatatagcaattctcgacgacttactcccactcacaatatttgattttatacaattgcttctcatagtgatcggcgcgatagccgttgtggccgtattgcagccctacatttttgttgcaactgttcccgtgatcgtcgcttttataatgctgcgtgcctatttcctgcagacaagccagcaactcaaacagttggagagcgaggggcggagccccatctttacacatctggtcacatctttgaagggtctctggacactgagggcatttgggcgtcagccctacttcgagacactgtttcacaaagcattaaatctccatacggccaactggtttttgtacctttctacccttagatggttccagatgcgcatagagatgatctttgtcattttcttcatcgccgtaacctttatttcgatcctgactaccggagagggtgagggacgagtcggcatcattctgacacttgctatgaatatcatgtctacactgcagtgggccgtcaatagctccattgacgtggacagcctgatgcggagcgtcagccgcgtcttcaaattcattgacatgccgaccgagggcaagcccacaaaatccaccaaaccgtataagaacgggcagctgagcaaagtgatgatcatagaaaacagtcacgtaaaaaaggatgacatttggccatccggggggcagatgacagttaaagatctgacagcaaaatacacagaagggggcaatgcaattttggagaatatatcctttagcattagccccgggcagcgcgtggggctgctcggcaggacaggctccggaaaatccaccctgctgtcggccttcctgaggctgctcaatacagaaggagaaatccaaattgacggtgtgagctgggatagcatcacattacaacagtggcggaaagcctttggcgttatccctcagaaagtcttcatcttttccggaacatttaggaaaaacctggacccttacgagcagtggtctgatcaggagatctggaaggttgcggatgaagtggggttaaggtcagttatcgagcagtttcccggtaagttggactttgtcctggtggatggaggatgcgtccttagtcacggtcataagcagttgatgtgccttgctcggtcagtgctctccaaggccaaaattctgctgttggacgaaccctctgcacacctggaccccgtgacttatcaaattattcgaagaacactgaagcaggccttcgctgactgtacggttattctgtgtgagcataggatcgaagcgatgctggaatgtcagcaattcctggttattgaggagaataaagtcagacagtatgattcaatccagaagctgcttaacgagaggagtctcttccgccaggcgatcagtccttcagatcgtgtgaagctcttccctcaccgaaattctagtaaatgcaagtcaaagccccaaattgcagccctcaaagaagagacagaggaggaagtgcaagacacacgcctc

SEQ ID NO: 10191 - DNA, 4440 bp, synthetic construct
  misc_feature 1..4440: note = source = /note="Description of Artificial Sequence: Synthetic coding sequence"
  source 1..4440: mol_type = other DNA
atgcagaggtcacctcttgaaaaggcatcggtggtttcgaaattgtttttctcgtggacccgccccattcttagaaagggatacagacagcggctcgagctcagcgatatctatcagattccatccgtggatagcgcagacaatctttcggaaaagctggaacgagaatgggaccgcgagttggcgagcaagaaaaaccctaaactgattaacgctcttcggagatgcttcttttggagatttatgttctacggaattttcctctaccttggtgaggtgaccaaagcagtgcaaccattgctcctgggacgcatcattgcatcatatgacccagacaacaaggaagaacgcagcatagcaatctacctcggaattggactttgtctcctgtttatcgttcggaccctgctgctgcatcccgcaatctttggccttcatcatattggaatgcaaatgcggatagcaatgttctcgcttatctacaagaaaactttgaagctgtcgtccagagtgttggacaaaatctccatcggtcaattggtgtcgctcctgtccaataatctcaacaaatttgatgaaggtcttgccctggcacatttcgtctggatcgcacctctgcaagtggcgctgcttatgggcctcatttgggagctgctgcaagcctcggccttttgtggtctggggtttcttattgtgctggcattgttccaggccggccttgggcgcatgatgatgaagtacagagatcaaagagcaggcaagatatccgaaagacttgtgattaccagcgaaatgattgagaacattcaatccgtcaaggcatactgttgggaggaagcaatggaaaagatgatagaaaacctgcgacagaccgaactgaagctcaccagaaaggcagcatacgtcagatactttaacagctcagccttcttcttttccggattctttgtggtgttcctgtcggtgctgccttacgcactcattaaagggattattctccgcaagattttcactactatctccttttgcattgtgctccgcatggcagtgactaggcagttcccttgggcagtgcaaacgtggtacgacagcttgggagccattaacaaaattcaagatttcttgcagaagcaagagtacaagacgcttgaatacaacctcacgaccactgaggtggtgatggaaaacgtgactgcattttgggaggaaggcttcggtgagctgtttgagaaagcaaagcaaaacaacaataaccggaaaacctcaaatggggacgacagccttttcttctcaaacttttcgctcctgggcaccccagttctgaaggacataaacttcaagattgaacggggacagctgctggcagtggcgggtagcactggggccggcaagacctcgctccttatggtgataatgggcgaactggagccctcggagggaaagatcaaacattcgggcaggatctcattctgctcccagttttcgtggattatgcctgggactattaaggaaaacattatcttcggagtgagctacgatgaatacagatacaggagcgtgattaaggcgtgccaacttgaggaggacatttctaagtttgccgagaaggacaatatagtgctgggagagggaggaattaccctttctggagggcagcgtgcccgtatctccctggcaagagcggtctacaaggatgccgatctgtaccttctcgattcaccttttgggtacctcgatgtgctgacggagaaggagattttcgagtcctgtgtctgcaagctgatggcaaataagacccgaattcttgtgacctccaaaatggaacatttgaaaaaagctgataagatactgattctgcacgaagggtcctcatacttttacggaaccttttcagaactccagaatcttcagcccgatttttcctccaaactcatgggatgcgattcgttcgaccaattctcggcggaacggcgtaattccattcttaccgaaaccctccacagattttctcttgaaggcgatgcacctgtctcgtggaccgaaacgaaaaagcagtcctttaagcaaactggagaattcggtgaaaagcgcaagaattcgatccttaaccccatcaattctatcaggaagtttagcatcgtgcaaaagaccccactccagatgaacggaattgaagaggactcggatgagccacttgagcggcggctctccttggtgcctgacagcgaacagggcgaagcaattctgcctcgaatttcggtgatctcgaccggaccgacgctgcaggcaagaagaaggcaatccgtcctcaacctcatgactcattcagtgaatcaaggacaaaacattcatagaaagaccactgcatccaccaggaaggtcagcctggccccccaagcaaatcttactgagctggacatctactctcggaggctgtcccaagaaactggtcttgagatttcagaagaaatcaatgaggaggatctcaaggaatgtttctttgatgatatggaatcgatcccagccgttaccacttggaacacttatctcaggtacattaccgtgcacaaatccctcatcttcgtccttatttggtgccttgtgatttttctggccgaagtggccgcatcactggtggtcctgtggcttctgggtaacactccgctgcaagacaaaggaaactccactcacagcagaaacaatagctacgcagtgatcatcacgtccacttcctcatattacgtgttttacatctacgtcggagtggcagatacccttctggcgatgggcttttttcggggacttcctctggtgcacaccctcattactgtcagcaagattctccaccataagatgctgcattccgtgctgcaggcacctatgagcacccttaacaccctcaaggctggaggcattctgaaccggttctccaaagatatcgcgattctggatgatcttctgccactgaccatatttgacttcatccaactgctcctgatagtgataggcgccattgcagtggtcgcagtgctgcaaccttacatctttgttgcaaccgtgccagtgattgtcgccttcatcatgctcagagcctacttccttcaaacttcacagcagcttaagcaacttgaatcagagggccgatcgccaatcttcacccatctcgtgacctcgcttaagggactgtggaccttgagggcctttggcagacagccgtacttcgagactctgttccacaaggcactcaacctgcacactgctaactggtttctttacctgtcgaccctgaggtggtttcaaatgcggatcgaaatgatatttgtgatctttttcatcgctgtcactttcatcagcattttgactacgggcgaaggtgaagggagggtcggcataattcttacccttgccatgaacattatgtccacccttcaatgggcagtcaactcgtcaatcgatgtcgattcgctcatgcgtagcgtcagccgtgtgtttaagtttatcgacatgcctactgaagggaaaccaactaaatccactaagccttacaagaatgggcagctttcaaaggtcatgattatcgaaaactcccatgtgaagaaggacgacatctggccgtccgggggtcagatgaccgtcaaagatctcacggcgaagtacaccgagggtggtaacgcgatccttgaaaacatttccttttcaatctcgcctggtcagagagtgggattgctcgggcgaacgggaagcgggaagtcaacccttctttccgcatttctccggttgctcaacactgaaggagaaattcaaatcgacggcgtgagctgggattcaatcaccctccaacagtggcggaaagcatttggggtgatcccacagaaggtgttcatcttctccggtacttttcggaaaaaccttgatccctacgaacaatggtccgaccaggagatatggaaggtcgccgacgaagtgggacttaggtcggttattgaacaattcccgggcaagctggatttcgtcttggtggatggtggttgtgtgctctcgcatggacataaacagctgatgtgtctcgcgaggagcgtccttagcaaagctaagattttgcttcttgatgagcctagcgcacacttggatccagtgacctaccagattatccggcggactctcaagcaagcgttcgcagactgcacggtgatcctttgcgaacataggattgaagcaatgctggaatgccagcaatttcttgtgattgaagagaacaaagtgagacaatatgattcgattcagaaacttctgaacgaaaggtcgttgtttagacaagcaatatccccatcagacagagtcaaactttttcctcataggaattcatcgaagtgtaagtccaagccacagatcgccgcattgaaggaggaaactgaagaggaagtccaggatacccggctt

SEQ ID NO: 10192 - DNA, 4440 bp, synthetic construct
  misc_feature 1..4440: note = source = /note="Description of Artificial Sequence: Synthetic coding sequence"
  source 1..4440: mol_type = other DNA
atgcaacggagccccctggaaaaagcctcagtggtatctaagctgttcttctcctggacccggcccattctgaggaaaggttaccgacagagactggaactgtcagatatctaccagatcccgagtgttgactcggccgacaacctgtccgaaaagttggagcgggaatgggatagagagctcgcctcaaagaagaatccgaagctgattaacgcactgcgccggtgtttcttctggagattcatgttctacgggatcttcctgtacctgggagaggtcaccaaggcggtgcagccactcctcctgggcagaatcatcgcgtcctacgacccggataacaaggaggaacggtcgatcgccatctacctggggatcggactgtgccttctgttcatcgtccgcactctgctgctccacccggcgatctttggcctgcaccacatcgggatgcagatgcgcatcgctatgttttcgctgatctacaagaaaaccctcaagctcagctcaagagtgcttgacaaaatcagcatcggtcaactggtgtcgctgctctcgaataatctgaacaagttcgatgaagggttggcgctggcgcattttgtgtggatcgcgccgctgcaggttgccctgcttatgggactgatctgggagcttctgcaagcatcagccttctgcggattgggatttctcatcgtcctggccctgtttcaggccggccttggcagaatgatgatgaagtaccgcgatcagagagctggtaagatatcggagcgcttggtgattacctcggaaatgatagaaaacatccaatcggtgaaagcctactgctgggaggaggcgatggagaagatgatcgagaatctccggcagaccgaattgaaactcacccgcaaagcggcctacgtgcgctacttcaactcgtccgctttcttctttagcggattctttgtggtgttcttgagcgtgctcccctacgccttgattaagggcatcatcctccgaaaaatcttcaccactatcagcttttgcatcgtgctgcgcatggcagtgactcgacagttcccgtgggcagtgcagacctggtatgactcgctgggagcgatcaacaaaatccaagactttctgcagaagcaagagtacaaaactctggagtacaatctcactaccacggaagtggtcatggaaaatgtgaccgccttctgggaagaaggatttggagaattgttcgagaaggctaagcagaacaacaataaccgcaagaccagcaatggcgatgactcacttttctttagcaacttctccctgctggggaccccagtcttgaaggatatcaatttcaagattgaacgcggacagctgctggcagtggccgggtcaactggggccgggaaaacctccctgctgatggtgattatgggagaactcgaaccttcggaaggcaagatcaagcattccggccgcatcagcttttgttcccaattcagctggatcatgccaggaacgatcaaggaaaacatcatcttcggagtctcctacgatgaatacaggtacaggtcggtcatcaaggcatgtcagctggaagaggatatctcgaaattcgctgagaaagataacatcgtgctgggggagggtggaatcaccctctcgggaggacagcgggcccggatttcgctggctagagccgtctacaaagacgcagatctgtaccttctcgattcaccgttcggatacctcgatgtgctcaccgaaaaggagatatttgagtcttgcgtgtgcaagctgatggcgaataagacgagaatcctcgttacttccaagatggaacatctgaagaaggcagataagattttgatcctccatgagggatcatcttacttttacggaactttctcggaactccaaaacctgcagccggacttctcctccaaactgatggggtgcgacagcttcgaccagttcagcgcagaacggcgcaattcgatcctgaccgagactctgcacagattctcactcgagggagacgcgcctgtatcctggaccgagactaagaagcagtcgttcaagcagactggcgaattcggggaaaagcggaaaaactccatcctgaacccgatcaattcgattcggaagttttccatcgtccaaaagacccccctccaaatgaatggcattgaagaggactccgacgagcctctggagcggcgcctgagcctggtgccggactcggagcaaggtgaagccattttgcctcggattagcgtcatctcgaccggaccaactttgcaagcgcggaggagacaatcggtgctgaatctgatgacccactcagtgaaccaaggccagaatattcacagaaaaactaccgcctcgactcgaaaggtcagcctcgctccgcaggccaacttgaccgaactggacatttactcgcggcgactgagccaagaaaccggcctggaaatctccgaggaaatcaacgaagaagatctgaaagagtgcttcttcgatgatatggaatcgatccccgcagtgaccacttggaacacctacctgcgctacatcaccgttcacaaatccctgattttcgtgcttatctggtgcctcgtgatcttcctggccgaggtcgccgcatccctcgtcgtgctgtggctgctggggaacacccctctgcaggataagggaaactcgacccactcgcgtaacaactcgtatgcagtgatcattacctctacctcgtcctactatgtgttttacatctacgtgggagttgcggataccctcctggcgatgggatttttccgggggctcccactcgtgcacactctgatcacggtatcgaaaatcctgcaccacaaaatgctccacagcgtgctgcaagcgccgatgtccactttgaatactctgaaggcaggggggatcctgaatcgcttttcgaaggacatcgctattctggacgacctgctgccgttgaccatctttgatttcatccagctgcttctgatcgtgatcggcgcgatcgcggtggtggctgtgctgcagccgtacattttcgttgcaactgtgcctgtcattgtggcattcattatgcttagggcctacttccttcagacctcgcaacaactgaaacagctggagtcggaaggccgctccccgatcttcactcacctcgtgacttcgttgaaaggtctgtggaccctgcgggcttttggacgccaaccgtattttgagactctctttcacaaggccctgaatctgcacactgcgaactggtttctctatctgtccaccctgcggtggttccagatgagaatcgaaatgatcttcgtgatcttcttcatcgcggtgacgttcatctcaattctgacgactggagagggtgaaggccgcgtgggaataatcctgaccctggccatgaacatcatgagtactctgcagtgggccgtcaactcgagcatcgacgttgacagcctgatgcgctccgtctcgcgcgtgttcaagtttatcgacatgccaaccgagggaaagccgactaagtccaccaagccatacaagaacggacagctttccaaggtcatgattattgaaaactcccacgtcaaaaaggacgatatctggccttcgggagggcagatgaccgtgaaggatctcactgcaaagtacactgaaggaggaaacgctattttggagaatatctccttctcaatctccccaggccagcgggtgggactgctgggccgcaccgggtccggaaagtcgaccctgctttcagcctttctgcggcttctgaacaccgagggagagatccaaatcgatggagtctcctgggattccatcactctgcagcagtggcggaaggccttcggagtgatcccccagaaggtctttatcttttccggtactttccggaaaaatcttgacccatacgaacaatggtccgaccaagaaatctggaaggtggctgacgaagtcggcctccgctctgtcattgagcagttcccgggcaaactggactttgtgctggtggacggaggctgcgtgctgtcccatggacacaaacagctgatgtgtctggcccgctctgtgctctcaaaggcgaagatcctgcttctggatgaaccgtccgcgcatctggatccagtgacctatcagatcatccggcggactctgaagcaggcctttgctgactgcaccgtcatcctgtgtgaacatcggatcgaagcaatgctggaatgccaacagttcctggtgatcgaagagaacaaagtcaggcagtacgattcgatccaaaagctcctgaacgagagatcgctcttcaggcaagccattagcccaagcgaccgagtcaagctcttccctcatagaaactcgtcgaagtgcaaatcgaaaccgcagatcgccgccctgaaggaagaaactgaggaggaggtacaggacactagactc

SEQ ID NO: 10193 - DNA, 4440 bp, synthetic construct
  misc_feature 1..4440: note = source = /note="Description of Artificial Sequence: Synthetic coding sequence"
  source 1..4440: mol_type = other DNA
atgcaacggtcaccactggagaaagctagcgtcgtttccaaattgttctttagctggactagaccaattctccggaaggggtatcggcagcggctggagctttctgatatataccagattccaagtgtggattccgcagataatctcagtgaaaagctcgagcgagaatgggaccgcgaactggcctctaaaaagaatccgaagctcatcaacgcacttcggcgctgttttttctggcggttcatgttctacggaatctttctgtatctgggcgaggtcactaaggccgttcagcccctgctgcttggccggatcatcgcctcctacgaccccgataataaggaggaacgcagcatcgctatctatctgggcattgggctgtgtttattattcatcgtccggaccttgctcctgcatccagccatatttggcttacatcatatcggcatgcaaatgcggatagccatgttctccctgatctataaaaaaacccttaagctaagcagccgagtacttgacaagataagtatcggacaactcgtttctcttctgagcaataacctgaacaagtttgatgagggccttgccctggcacacttcgtgtggatcgcgccacttcaggtagccctgctaatgggcctgatctgggagctcttgcaggcttctgcgttttgcggtctcgggtttctgattgtccttgcactgttccaagctggactgggtagaatgatgatgaagtaccgtgaccaaagggctggcaagatttccgaacgactggtgattacatcggagatgatagagaatatccaaagcgtgaaagcttactgttgggaggaggccatggagaagatgatcgaaaatctcaggcagaccgaactgaagctaactagaaaggccgcttatgtgcgctactttaacagctccgctttctttttctctggttttttcgtcgtgtttcttagcgtgctgccttacgccttgatcaagggcataatcttacggaaaatctttacaaccatttctttctgcattgtgctgcggatggcagtaacacgacaattcccctgggccgtccagacatggtatgactctctgggcgctataaataagatccaggactttctgcaaaaacaggagtataagaccctggagtataatctgactactaccgaggtggttatggaaaatgtaacagcgttctgggaggagggatttggtgaactttttgagaaggctaagcagaacaacaataaccgaaagacttcaaatggcgacgactctctgttcttcagcaacttcagcctcctgggcacaccagtacttaaggatatcaacttcaaaatcgagagggggcaattactggctgtggcaggctcgactggcgcggggaagaccagtttgttaatggtgattatgggcgaacttgaaccttctgagggcaagatcaaacactccggcaggatctccttctgttcacagttctcatggatcatgccaggaacaatcaaggaaaatattatctttggtgtgtcatacgacgagtataggtatcggagcgtgatcaaggcttgccagctggaggaagacatcagcaaattcgcggaaaaggataacattgttctaggggagggtgggataaccttatctggaggccagagggcgcgcatttctcttgccagggcagtgtacaaagatgccgacctctacctcctcgacagcccattcggctacctggacgtcttaaccgaaaaagagatattcgagtcatgcgtgtgcaagctcatggcgaacaaaacccgaatactggtgacatccaaaatggaacacctgaaaaaggcggataaaatcctgattttgcacgaagggtcatcctatttttacggcacattttctgaacttcagaatctgcagcccgactttagttcgaaactgatgggttgtgatagtttcgatcaattctctgcggagcggcgaaatagcatcctcacggaaacgcttcaccggttctctttggagggagacgccccggtcagctggactgagacgaaaaaacagagcttcaagcagacgggggaattcggcgaaaagcggaagaacagtattctgaatcctattaactccattcgcaaattttcaatagtacaaaagacgcccctgcagatgaacgggatcgaagaggactcagacgagcctctcgagcggcggctgtctctggtgcctgactccgaacagggtgaggcaatccttccccgcatctctgtgatctctaccggacctacactccaggcacggagacgccaatccgtcctaaatctcatgacacactccgtcaatcagggccagaatatccacaggaaaaccactgcgtcgacgaggaaggtgtctttggcaccacaggcaaacctgaccgaattggatatctatagcaggcgtctgagccaggagacaggactcgagatctccgaagaaatcaacgaggaagatctgaaagagtgcttctttgacgacatggagtccattcctgcggtaacaacttggaacacatatcttcgctacatcacagtgcataagtctcttatctttgtcctgatttggtgtttggttatctttcttgctgaggtggccgcgtcactggtggttctatggctgctgggtaacactccactgcaggataagggcaatagtactcatagtcgtaacaatagttatgccgtcatcataacctctacaagttcatactacgtgttttatatctacgtgggagtcgccgacacactgctggctatgggcttcttccggggcctacccctggtgcatactctgatcactgtaagcaaaatcctgcaccacaaaatgctgcatagcgtcctgcaggccccaatgagtacactcaacacccttaaggccggggggatattgaaccggtttagtaaggacatcgctatcctggacgacctgctgcccttaactatcttcgattttattcaactactgttgatcgtcatcggcgccatagccgtggtggcagtgctgcaaccatatatcttcgtcgccactgttcccgttatcgtcgccttcattatgctgagagcctatttcctccagacaagccagcagcttaaacaactggaatccgaggggagatctccaatattcactcacttggtgactagcctgaaaggtctgtggactttgcgggcgttcggaagacagccttattttgagactttgtttcacaaagcactgaacctgcacacagcgaattggtttctgtacctgtccacactgcgctggttccagatgagaattgagatgatattcgtgattttcttcatcgccgtcaccttcatttctattttaacaacaggggaaggggaaggccgagtcgggattatcctgacattagccatgaacatcatgagcacattgcagtgggccgttaacagcagcatagacgtcgacagcctcatgcgctccgtcagtagggttttcaaattcatagatatgccaactgagggaaagccaacgaagagcacaaaaccttataaaaacggacaactgagtaaggtgatgatcatcgagaattctcacgtcaagaaggacgacatatggccttccggcggccaaatgactgtcaaagatctgactgcgaaatatactgagggaggcaacgccatccttgaaaacatctccttttccataagtcctgggcagcgcgtagggctgctgggccgtaccgggtccggcaagtctacgctgctgtcagcatttctgcgcctactaaatacagaaggcgagattcagatcgacggagtctcctgggactcgatcacactccagcagtggcgtaaagctttcggcgtgatcccacagaaggtttttatcttttctggaaccttcagaaagaatctggacccttacgaacagtggtctgaccaagagatttggaaggttgccgatgaggttggtctgcggtccgtcattgagcagttccccggcaagctggacttcgtgctggtagatggaggttgcgtgctgagccacggacacaagcaattgatgtgcttggccaggagcgttttgtctaaagcaaagatacttttgttagacgagccgtccgcccatctcgaccctgtcacatatcagatcatcagacggaccctcaaacaggcattcgcggactgcaccgtgatactgtgtgagcatcggatcgaggcgatgctcgaatgtcagcaattcttggttatcgaggagaacaaggttcggcaatatgattccattcagaaacttctaaatgaacgcagtctattcaggcaagccatatctccaagcgatagggttaaactgttccctcatagaaattcgtcaaagtgtaagtccaagcctcagatcgccgctttaaaggaggaaacagaggaagaagttcaagatacacggtta

SEQ ID NO: 10194 - DNA, 4440 bp, synthetic construct
  misc_feature 1..4440: note = source = /note="Description of Artificial Sequence: Synthetic coding sequence"
  source 1..4440: mol_type = other DNA
atgcaacggagccctctcgagaaggcctccgtcgtgtcaaaacttttcttcagttggactaggcccatccttagaaagggatatcgacagcggcttgaactttcggatatctatcaaatcccctcggtggactcggcagataatctgtctgaaaagctggagcgagaatgggatagagaactggccagcaagaagaacccaaagctgataaacgctcttagaagatgtttcttttggcgcttcatgttctacgggattttcctttaccttggtgaggtgaccaaggccgtgcaacctctgcttctcgggcgcatcatagcatcctacgatccagataacaaagaagaaaggtcgattgcaatctaccttggaatcggactttgtcttttgtttattgtccggaccttgcttctgcacccggccattttcggattgcatcacattggaatgcaaatgagaatcgccatgttctcgcttatctacaaaaagactctgaagttgtcgtcgcgtgtgttggataagatttccattggacaattggtatcactgctctcgaacaacctgaacaagttcgatgaaggtcttgcactggcccacttcgtctggatagcccctttgcaagtggcactgctcatggggctgatttgggaactcctccaagcatccgcgttttgcggcctcggatttcttatagttctggcattgttccaggccggtctgggtcgcatgatgatgaagtatcgcgatcagcgggcgggcaagatttcggaaaggctggtgattacgtcagagatgatcgagaatatacaatccgtgaaggcctactgttgggaagaagcgatggagaaaatgattgaaaatcttcgccagaccgaacttaagctgactaggaaggccgcatacgtgaggtactttaactcttcggcattctttttcagcgggttcttcgtcgtgtttctgtcagtgctcccttacgcacttatcaagggcatcattctcaggaagattttcaccaccattagcttttgtatcgtccttaggatggcggtgaccagacaatttccatgggcagttcaaacttggtacgattcacttggtgccattaacaaaattcaagacttcctgcaaaaacaggagtacaagaccctggaatacaaccttactaccactgaagtggtcatggaaaatgtgactgcattttgggaagagggatttggagagctgttcgagaaggcaaagcaaaacaataacaatagaaaaactagcaacggcgatgatagcctgttcttctcaaacttctcgctgctcggaactccagtgctgaaggacattaactttaagatcgaaagaggccagctcctcgcagtcgcagggagcactggtgctggtaagacttcgcttctgatggtgataatgggagaattggaaccctccgagggcaaaatcaagcattcgggcagaatctccttttgttcccagttttcatggattatgcccggtactataaaggaaaacatcatttttggagtctcctacgatgagtacaggtaccgctccgtgatcaaggcttgtcaactggaagaagatatatccaaatttgcggaaaaggataacatcgtgcttggagaaggtggcatcactctgtcgggaggtcagcgtgcacggatttccctggcacgagcagtgtacaaggacgctgacctttacttgctggattcgccttttggttacctcgatgtcctgacggaaaaggagatatttgaaagctgtgtctgtaaactcatggcaaacaagactcggatcctcgtcacttcaaaaatggagcatctgaagaaggcagacaaaatcctcatcctgcatgagggtagctcttacttttacggcaccttcagcgaacttcaaaacctgcaacctgacttcagctcgaagctcatgggttgtgactcttttgatcaattttcggcagaaagacgcaactccattctgaccgaaaccctccaccgcttttcgcttgaaggtgacgcccccgtgtcctggacggaaaccaagaagcaatcgtttaaacaaacgggtgaatttggcgagaagcgtaagaacagcatcctcaacccgattaactcaatccgtaagtttagcattgtgcaaaagactcctctgcagatgaacgggattgaagaggattccgacgaacctctcgagcggagactctcgctggtgccggattcagagcaaggtgaagcgatccttccccggatttctgtgatctcgactggaccaacgcttcaagcacggagacggcagtcggtccttaaccttatgacgcatagcgtgaatcagggacagaatattcacagaaagaccaccgcgtccacgcgcaaggtgtccctggcaccccaagccaatcttaccgagctcgatatctactcaaggcggctctcgcaagagactggacttgagatttccgaagaaatcaacgaggaggacctgaaagaatgtttctttgatgacatggagagcatccccgccgtcacgacttggaatacctatctcagatacataaccgtccataagtcgcttatctttgtgctgatttggtgcctggtgatttttctggcagaagtggcggcatcgctggtggtgctgtggctgcttggaaatactcctctgcaagataaaggaaatagcactcatagcagaaacaactcctacgcggtgatcattacttcgacctcatcctactacgtgttctatatctatgtcggagtggctgacacccttctcgctatgggattctttagaggcctccctctcgtgcatacccttattaccgtgtccaaaattctgcaccacaagatgctgcattccgtcctgcaagcacctatgtccactctgaatacgctcaaggcaggcgggattcttaaccgattttcaaaggatatcgcaattctggatgatctgctgccactcaccatctttgatttcatacaattgttgctcatcgtgatcggcgcgattgccgtggtggcagtgcttcagccatacatttttgtggcaactgtgccggtcattgtggcatttatcatgctccgggcatactttctgcagactagccaacagcttaaacaattggagagcgagggaagatcgccgattttcactcatttggtaacctcactgaagggactgtggaccctgcgcgcgtttgggagacagccctacttcgagactctttttcacaaggccctgaatcttcataccgcaaattggttcctgtacctctcgactcttcgctggtttcaaatgaggattgaaatgatctttgtcattttctttattgcagtgaccttcatttcgatcctgaccaccggagagggagaaggcagagtcggaatcatactgaccctcgcaatgaacatcatgtccaccctccaatgggctgtcaattcttctatcgacgtggactcacttatgagatcagtgtccagagtgttcaagtttattgatatgccaactgaaggcaagccaaccaagtcgaccaagccatacaagaacggtcagctctcaaaggtcatgattatcgaaaactcgcatgtgaagaaagatgatatctggccttccggcggccaaatgaccgttaaagatcttaccgcaaaatacactgaagggggtaacgcgatccttgagaacatatcgttctcaatttccccgggacagcgggtgggtctgctgggtcggacgggaagtgggaagtcgactctgttgtccgcctttcttagactgctgaatactgaaggcgaaattcagatcgatggcgtgagctgggactcaatcactcttcaacagtggagaaaggcctttggcgtgattccccagaaagtgtttatcttttcgggaaccttccggaagaatctcgatccgtacgaacagtggtcagatcaggagatctggaaagtggcggacgaagtgggattgcgctcagtgatagaacaattcccgggtaagctggattttgtgcttgtggatggtggctgcgtgctttcacatggtcataagcagctgatgtgtctggccagatcagttctctcaaaagcaaagattctcctgttggacgaaccatcggcccacctcgacccagtgacttaccaaatcatacgccggacccttaaacaagcattcgccgattgcactgtaattctttgtgaacatagaattgaggcaatgctcgaatgccaacagttcctggtgatcgaagaaaacaaagtgcgacagtatgattcaatacaaaaactgctgaatgaacgaagcctttttagacaagcgatatcaccttcggacagagtgaaactgtttccccacaggaattcgtcaaagtgtaaaagcaagccgcagattgcagcattgaaggaagaaaccgaagaagaggtgcaggatacccgtttg

SEQ ID NO: 10195 - DNA, 4440 bp, synthetic construct
  misc_feature 1..4440: note = source = /note="Description of Artificial Sequence: Synthetic coding sequence"
  source 1..4440: mol_type = other DNA
atgcaaagatcgcctcttgaaaaggcctcggtggtttctaaactgttcttttcctggactagaccgattctgcggaaggggtaccgtcaacggcttgaactgtcagacatataccaaattccttcagttgatagtgcggacaacctgtccgagaagttggaacgcgaatgggatcgggaactcgcatctaaaaagaacccgaagctgattaatgcactgagaagatgtttcttttggcgatttatgttttacgggatctttctctacctcggagaagtgactaaagccgtgcagccgctgctcttgggacgcattatagcttcgtacgatcctgataacaaagaagagaggtcaattgccatttacctgggtatcggactgtgcctcttgttcatcgtgaggaccctgttgcttcaccctgcgatttttggacttcaccatataggaatgcaaatgcggattgcaatgttcagcctgatttacaaaaagacgttgaaactgtcctcacgtgtgctcgataagatttcgatcggacaactggtgtcattgttgagcaataacttgaataagttcgatgagggattggcacttgctcattttgtgtggattgccccacttcaagtggcgttgcttatgggactgatctgggagctgcttcaggcgtcggcattttgcggactcggatttctgattgtgctggcgctgtttcaggcaggacttggcagaatgatgatgaaatacagggatcagcgagcaggcaaaatctctgagcgtctcgtcatcacgtcggaaatgattgaaaacattcaatccgtcaaggcctactgctgggaggaagcaatggagaagatgattgagaaccttcgtcagaccgaactgaaactgaccagaaaggccgcctacgtgcggtactttaactcctccgccttcttcttctccgggttttttgtggtgtttctctcggtcctcccatacgcactcattaaagggatcattcttagaaaaatcttcacgactatttccttttgtatcgtccttagaatggcagtgacgcgtcaatttccttgggcagtccaaacgtggtacgatagcctgggagctatcaacaagatacaagatttcctgcagaagcaggaatacaagactcttgaatacaatctgactactaccgaagtcgtgatggaaaacgtgaccgcgttttgggaagagggctttggtgaattgtttgaaaaggccaagcaaaacaataacaaccgaaagacctcaaacggtgacgactccctcttcttttctaatttctcgcttcttggcactcccgtgctgaaggacattaactttaagattgagcgcggtcagctcctggccgtcgcaggatcaaccggagcaggaaagacttcgctcctcatggtgataatgggtgagctggagccatcagaaggaaagattaagcattccggtaggatttcgttctgttcgcagttttcgtggattatgcctggtactattaaggaaaacatcatttttggtgtctcctatgatgaataccgctacaggtcggtcattaaggcgtgtcagctggaagaggacatctccaagtttgctgagaaggacaatatcgtgcttggagaaggagggatcaccctgtccggtggacaaagagcccgtatttctctcgcacgtgctgtgtacaaggatgcggacctgtacctccttgatagcccctttgggtatttggacgtgctcactgaaaaggagatttttgagtcgtgcgtctgtaagctgatggcaaataagaccagaattcttgtcacttcgaagatggaacatctcaaaaaggccgacaaaattctcatactgcatgaggggtcgtcctacttttacgggactttttcggaacttcaaaaccttcaaccagattttagttcgaagttgatgggttgtgacagcttcgaccaattctcggccgaacgccgcaactcaatactgacggagactctgcacaggttctcccttgaaggagatgccccggtttcatggaccgaaactaagaagcaatcgtttaagcaaactggcgaattcggagagaagagaaagaacagcatcctgaacccaatcaactccatcaggaaattctccattgtccagaaaacccctcttcaaatgaacgggattgaagaggactccgatgagcctctggagagacgactttcgttggtgccagattcagaacagggagaagcaatattgcccagaatctcggtgattagcacgggtccaaccctgcaagcacgcaggagacaaagcgtcctgaacctgatgacccactccgtgaaccaaggacagaacatccatcgtaagaccactgcctccacgcgcaaagtgagcctggcacctcaggcaaatcttaccgaactggacatctattctaggaggctctcgcaagaaactgggctcgaaatttccgaagaaatcaatgaggaagatcttaaggaatgcttctttgacgatatggagtccataccagctgtgactacctggaacacgtatctccgatacatcaccgttcataagtcattgatattcgtgctcatttggtgtctcgtcatttttctggctgaagtagcagcaagcctcgtcgttctgtggctccttggtaacacgccgcttcaggataagggcaatagtacccactcgcggaacaatagttacgcggtgatcataacctcgacctcgtcctactacgtgttctacatttacgtcggtgttgcagataccctcctggcaatggggttctttcgggggctccccctggttcataccctgataactgtctcgaagatacttcatcataagatgctgcatagcgtgctgcaagcccctatgtccactcttaatacccttaaagcgggtgggatccttaaccggttctccaaggatattgcaattctggatgatctccttcctctgactatctttgactttatacaacttctgctcatcgttattggggcaatagcagtggtggccgtattgcagccttacatatttgtggccactgtccctgtgattgttgccttcatcatgcttcgggcatactttcttcaaacctcgcagcagcttaagcagctggaatcggagggaagatcaccaattttcactcatcttgtgacctccctcaaaggtctttggacccttcgcgcattcgggcgccaaccatactttgaaaccctcttccataaggcactcaatcttcacactgcaaattggtttttgtacctgagcaccctccggtggtttcaaatgaggattgaaatgatctttgtgatcttctttatcgcagtgacctttatctcaattctcactactggcgaaggcgagggccgtgtgggaatcattcttactctggcgatgaatatcatgtcgacgctgcagtgggcagtgaactctagcatagatgtcgattcgctcatgaggagtgtgtcacgggtctttaagtttatcgacatgcccactgaaggtaaacccaccaagtcaactaagccatacaaaaacggccaactgtcaaaagtcatgattatcgaaaactcccacgtgaaaaaggatgacatttggccttcaggcggacagatgactgttaaggacctcactgcaaagtacactgagggtggtaacgcgattctggagaatatcagcttctccatctcgccaggccagagagtgggtctgctgggaagaaccggatcgggcaagagcaccttgctttcagcctttctccgacttctgaacactgaaggcgaaatacagatcgatggcgtttcctgggattcaatcaccctccagcagtggagaaaggcctttggggtgattcctcagaaagtgtttatcttttcaggaactttccgaaaaaacctcgatccttacgagcagtggtcggaccaagaaatttggaaggtggcggacgaggtgggcctgcgctcagtgatcgagcagtttcccggcaagctggatttcgtgcttgtcgatggtggatgtgtgctttcccatggacacaaacaacttatgtgcctcgcaaggtccgtgttgtccaaagcaaagatacttctcttggacgagccttcggcacacctggacccggtgacgtatcagattattcggcgtactctgaaacaggcgtttgcagactgcactgtgatcctttgcgaacaccgtattgaagccatgcttgaatgtcagcagtttctggttattgaagagaataaggtgagacaatacgattccattcaaaaacttctgaatgaaagaagccttttccggcaagcaatttccccctccgaccgggtgaaactgttcccccatcggaattcatcgaaatgcaagtcgaagccacaaattgcagcactcaaggaagaaaccgaagaggaagtccaagatacccggttg

SEQ ID NO: 10196 - DNA, 4440 bp, synthetic construct
  misc_feature 1..4440: note = source = /note="Description of Artificial Sequence: Synthetic coding sequence"
  source 1..4440: mol_type = other DNA
atgcagagaagtcctcttgaaaaagcgagcgtggtatccaaactatttttctcgtggacaaggcccatcctccgcaaaggatatagacaaaggctggagcttagcgacatctaccagatacctagcgtcgatagcgccgataacctgtcagaaaaactggaaagagagtgggacagggaactcgcatccaaaaagaacccgaagctcatcaacgcgttgaggcggtgctttttttggcgcttcatgttctacggaatcttcctgtatctcggcgaagtgacaaaggccgtccagccacttcttttgggaaggataattgccagctatgatcccgacaacaaagaggagcggagcattgccatttacctgggcatcggcctgtgcctgttgttcatagtcagaacccttcttcttcatccagcaatatttggattgcaccatatcggaatgcagatgaggatcgcaatgttttccctgatctacaagaaaaccctgaaactgtccagcagggtactcgataagatctcaatcggacagctggtgtctctgctgtcaaataaccttaataaattcgatgagggactggctctcgcccactttgtgtggatcgccccattgcaagtcgcactcctgatgggcctgatctgggaactgctgcaggcaagcgcattttgtggactgggcttcttgatcgtgttggccctatttcaggctggtcttggcagaatgatgatgaaatatcgggatcagagagcaggaaaaataagcgaaagactggtgatcacatcagaaatgattgaaaatatccagtctgtgaaggcttactgttgggaagaagcgatggaaaaaatgatcgagaatttgaggcaaaccgaactgaaattgacaaggaaggcagcctacgtcaggtactttaatagtagcgcttttttcttttctggtttcttcgtggtgttcttgagcgttctcccttacgctttaattaaggggatcatccttcgtaagatcttcacaactatctctttttgcatcgtgcttcgcatggctgtgacccgacagttcccttgggctgtgcagacatggtacgactccttgggggctattaacaaaattcaagattttctgcagaaacaagagtacaaaacactggaatacaaccttacaacaacggaagtggtgatggagaatgttacagctttctgggaggaggggttcggcgagctgttcgagaaagccaagcagaacaacaacaaccgcaaaacaagtaatggcgatgactccctgttcttctcaaactttagcctgctgggcactcctgtgctgaaggatatcaacttcaagatcgagagaggtcaactgctggcagtggctgggagcaccggcgccggcaagactagcctgctgatggtcattatgggcgaactggagccttccgagggcaagattaaacacagcggtaggatcagcttctgctctcagttcagctggattatgcctgggacaatcaaggagaatatcatttttggagtcagctatgacgaatatagatacagaagcgttataaaagcttgtcagctggaggaggatatcagtaagtttgcagaaaaagataacatcgtcctcggcgagggtggaatcactctcagcggaggacaacgcgcaagaatctcactggctagggccgtatacaaggatgccgacctttatttattggacagtccttttggataccttgatgttctgaccgagaaagagatcttcgaaagctgcgtttgcaaactgatggctaacaagaccaggattctggtaaccagtaaaatggagcacttgaagaaggccgataagatcctgatcctgcatgagggaagctcttacttctacggcacattttccgagttgcagaacctgcaacctgacttttcttcaaaactgatgggctgcgattcattcgaccagttctctgcagagcgcaggaattctattcttacagaaaccttgcacagattcagcctagagggagatgcccctgtgtcgtggaccgaaacaaaaaagcagtcgtttaagcagaccggtgaattcggtgagaaacgcaagaactccattctgaacccaataaactcaataaggaagttcagcatagttcagaagactccactccaaatgaacggtatcgaggaagactccgatgaacccctggagcgtaggctgagtttagtgcccgattcagaacaaggtgaggcaatactgcctcgaatctccgtgatatccactgggccgactctacaagcaaggaggcgtcagtcagtcctcaatcttatgactcatagcgtgaaccagggacaaaacatccaccgcaagacgacagcgagcactagaaaagtcagcctggccccacaggctaacctaaccgaactggacatatatagcaggcgcctcagccaggaaacaggcctagagatttcggaggagataaacgaggaagacctcaaggaatgtttctttgatgatatggagagtatcccagcagtgactacatggaatacctatctgcgctacattaccgtacacaaaagcctaatctttgtcctgatttggtgcttagtgatctttttagctgaggttgctgcatcacttgtcgtcctctggctgctgggaaacacccctttacaggataagggcaacagtacccactctagaaataacagctacgcagtcattataaccagcacaagctcctactacgttttctacatctacgttggcgtagccgacaccctgttggctatgggtttttttagaggccttccgctggtgcatacactgatcaccgtgtctaagatactccaccataaaatgttgcatagcgtgctccaagctccaatgtctacactaaatacattaaaagcggggggaattctgaatcgattcagcaaggacattgcaattctggacgatcttctgcctctgacaatctttgactttattcagctcctgctgattgtgataggcgccatcgctgtggtggcggttctacagccctacatattcgtcgccacggtccctgttatcgtggcattcatcatgctgagagcttactttctgcagaccagccagcaactcaagcagctggaaagcgagggcagatcccccatcttcacacatcttgtgacctctctgaaaggcctttggactcttcgcgcttttggaaggcaaccatacttcgaaaccctgtttcacaaggcgctgaacctgcatacagccaactggttcctgtatttgtcaactcttcgatggtttcagatgaggatcgagatgatcttcgttatcttttttatagccgtgaccttcatttccatcctcaccacaggtgaaggagagggacgggtgggaatcatcctgacgctggctatgaacattatgagcacactgcagtgggcagtgaatagctctatcgatgtcgatagtctgatgaggtccgttagtcgagtcttcaaattcatcgacatgcctacagaaggaaagccgaccaaatccaccaagccgtacaagaacggtcagctttccaaggtcatgataatagagaatagccatgttaagaaggatgacatttggccttccggcggccagatgacagtgaaagatctgactgcgaagtatactgagggagggaacgccatcctcgagaacatttctttctccatctccccgggccagcgagtgggccttctgggacgtacaggcagtggcaagagtacactcctgtcagcttttctcagattgcttaacactgagggcgagattcagatcgacggcgttagctgggattcaataacactgcaacagtggagaaaggcttttggggtcatcccccaaaaggtgttcatcttctccgggacatttcgcaagaacctggacccctacgagcagtggagcgatcaagaaatctggaaggttgctgacgaagtaggattgaggtccgtgatcgagcagttcccagggaaactcgacttcgtgcttgtggacggtgggtgtgtcctgagtcacgggcacaaacaactgatgtgccttgctaggtctgtgctatcaaaagctaaaatacttttactggatgagcctagcgcacacctggaccctgtcacctatcagattatcaggagaactctgaagcaggccttcgcagactgcaccgtcatcctgtgtgaacacagaatagaggcaatgctagaatgtcagcagtttctggtgatagaggaaaacaaagttaggcagtatgacagtattcagaaactcctcaatgagaggtctcttttccgtcaggccatcagtccaagcgacagggtgaagttgttccctcacagaaactcttccaagtgcaagagcaaacctcagattgctgcattgaaggaagaaacagaggaggaggtccaagatacaagactg

SEQ ID NO: 10197 - DNA, 4440 bp, synthetic construct
  misc_feature 1..4440: note = source = /note="Description of Artificial Sequence: Synthetic coding sequence"
  source 1..4440: mol_type = other DNA
atgcagcggtctccactcgagaaggcatcggttgtgtctaaactgtttttctcctggacccggccaatccttagaaagggatataggcagcgactggaactcagcgatatctatcagattccctctgtggatagtgcggataacctcagcgagaaacttgaaagggagtgggatagggagctggcttcaaaaaagaatcctaagctgatcaacgccctccgcagatgcttcttttggaggtttatgttctatggcatctttttgtacctcggagaggtgaccaaagcggtgcaacctctcctgctgggtaggatcatagctagttacgatcccgataacaaagaggaaaggtccatcgccatttatctcggaattggactgtgtcttttgttcatcgtcagaactctgctcctgcatcctgccatcttcgggttgcaccacattggtatgcagatgcggattgccatgtttagcctcatttacaagaagactcttaagctgagttctcgtgttctggacaagatctcaatcggacagctggtcagcttgcttagcaacaatcttaacaaattcgacgaggggctggcgttggcgcacttcgtctggatcgctccactccaggtcgctttgttaatgggtttgatatgggagcttctgcaagctagcgccttctgtggcctcggattcctgatcgtgctggctctcttccaggcaggattgggcaggatgatgatgaagtacagggatcaaagggctgggaaaattagcgaaagacttgtgatcactagcgagatgatcgaaaatatccagagtgttaaggcctattgctgggaggaagccatggagaagatgatagagaatcttagacaaaccgagcttaagttgaccaggaaagcagcctatgtccgctatttcaactcttctgcctttttttttagcggattcttcgtggtctttcttagcgtcctgccatacgcactgatcaaagggattatcctcagaaagatttttaccactatcagtttttgcatcgtccttaggatggccgtgacccgtcagttcccctgggctgtgcagacatggtacgactctctcggagctatcaacaagatacaggactttcttcaaaaacaagagtataagactctcgaatataacttaaccaccacagaggttgtgatggaaaatgtcaccgccttttgggaggagggcttcggagaactttttgaaaaagcaaagcagaataacaacaacaggaaaacctctaacggtgacgacagccttttcttcagcaacttttcgcttctgggcacaccagttctcaaagatatcaattttaaaatcgaacgcggtcagctcctcgccgtcgcgggaagcactggggctggaaagacaagcctgcttatggtgatcatgggcgagcttgagccttccgaaggaaaaatcaagcacagcggacgcatttcattttgctcacagttttcttggattatgcctggaacaattaaggaaaatattattttcggcgttagctatgacgagtacaggtatagaagcgtgattaaagcgtgccagcttgaggaggacattagcaaatttgctgagaaggacaatattgtcttgggtgaaggtggaattaccctgtctgggggacagcgggctcgaatctccctggccagagccgtatacaaagacgccgatctgtacctgctcgactccccattcggttacctggatgtgctcacagaaaaagaaatctttgaaagctgtgtatgcaagctgatggcgaacaaaaccaggattctcgtgacgtccaagatggaacatctgaagaaagctgataagatacttatcctgcatgagggcagttcttatttctatggtacattttctgagctgcagaatctgcaacccgactttagtagcaaactgatgggatgcgattcattcgatcaatttagcgctgaacgccggaacagcatcctgacagagactttacataggtttagcttagagggcgatgcacctgtgtcctggacggagaccaagaaacaatcatttaagcaaactggagagtttggagagaagaggaagaacagcattctcaaccctatcaactctatacgcaaatttagcattgttcagaaaaccccccttcaaatgaacggaatagaagaggattccgatgaaccactggaacgcagactgtccttggtgcccgacagcgaacaaggagaggccattcttcctcgcatcagcgtaatatctaccggtccaaccttacaggccagaaggagacagagcgtcctgaacctgatgacacatagtgtcaaccaaggtcagaatattcatcgtaagactaccgcatcaacgaggaaggtgagcctggccccacaagctaacctgaccgaattggatatctatagtaggaggctctcacaggagacaggtctcgaaattagcgaggaaataaacgaggaagatctgaaggaatgcttcttcgacgacatggagtcaatcccagccgtgactacgtggaacacataccttcgctacattacagtccataaaagtctgatatttgtccttatctggtgcctcgttatcttcctggcggaggtcgctgcatctcttgtggtcctgtggctgttgggtaatacaccacttcaggacaagggcaatagcacacactcacgcaataatagttacgctgtaatcattacgtccacttcttcatactacgttttctacatctacgtgggcgtcgcagacacactgctcgcgatggggtttttcagaggactgccactcgttcacaccctcattaccgtcagcaagattcttcatcacaagatgcttcacagcgtgctgcaggctcctatgtccaccctgaacaccctcaaagcgggaggaatcctcaacaggtttagcaaggatattgctattctggacgatcttctgccgctgactatttttgactttatacaacttcttctcattgttatcggagcaatcgctgtggtggcagtgttgcaaccgtatatctttgtagccacagtgccagtcattgtagcattcatcatgctgagagcgtattttctccagactagccagcaactgaaacaacttgagtccgaaggaagatccccgattttcacccacctggtgaccagcctcaagggactgtggaccctgcgggcttttggaaggcagccatactttgaaaccctgttccacaaggcgttgaatcttcacacagctaactggttcctgtatctgagcaccctgcgatggttccaaatgcgcatcgaaatgatattcgtgattttcttcatagccgtaacattcatctccatcctcactacaggcgaaggggagggccgtgtaggaatcatactgaccctggcaatgaacatcatgtccacactgcagtgggcagttaacagcagcatcgacgtggacagcctgatgaggtcagtatccagggtgttcaaatttatagatatgccaaccgaaggtaaaccaacaaaaagtacaaaaccgtacaagaacggtcaactctcgaaggtgatgatcatcgaaaacagtcacgtcaaaaaagacgacatttggcctagcggagggcaaatgaccgtgaaggacctcaccgcaaaatacaccgagggtggaaacgccattctggagaacatcagcttctccattagtccaggacagcgagttggcttgcttggcaggaccggctctggaaaatctacacttctcagcgcatttctcaggctgctcaacactgaaggtgagatccagatcgatggcgtaagctgggatagtattactttacagcaatggcggaaggcatttggggtgatcccccagaaagtatttatttttagcgggaccttccgaaaaaacctcgatccatacgaacagtggtctgatcaagagatctggaaagtggctgatgaggtgggcctgagaagtgttattgaacagttccctggcaagctggactttgtgttggttgatgggggctgtgtcctgagtcacgggcataaacagctcatgtgcctggctcggtctgtcttgtctaaggctaagattctgctgctcgatgaaccatcagcacacctcgatcccgtcacataccagattataagaagaacactcaaacaggccttcgcagactgcacagttatcctctgtgagcatcggatcgaagctatgctcgaatgccaacagtttcttgtgattgaagaaaataaggtgcgacaatacgactcaatccaaaaactgctcaacgaacggtcgcttttcagacaggctataagtcctagtgatagggtcaaactgttcccccatcgcaactcttcaaaatgtaagagcaagcctcagatcgccgcattaaaggaggaaaccgaagaagaagtccaggacaccagactg

SEQ ID NO: 10198 - DNA, 4440 bp, synthetic construct
  misc_feature 1..4440: note = source = /note="Description of Artificial Sequence: Synthetic coding sequence"
  source 1..4440: mol_type = other DNA
atgcagagatcccccctagaaaaagcttccgtcgtatcaaaactgtttttctcttggacacggccaatccttcgaaaagggtataggcagcgccttgaactttcagatatctatcagatcccctcagtcgattcagccgataacctctctgaaaaactcgagagagaatgggatcgggagctggcctctaagaagaaccccaagctaatcaatgctctcaggagatgttttttttggcgatttatgttttacgggatattcttgtacctgggggaagtcactaaagccgtgcagcctcttctcctcgggcgtattatagcctcgtatgatccagataacaaagaagaacgatccattgccatctacctcgggattgggctttgccttttatttatagttagaactctcctgctacatcccgctatttttgggcttcatcacataggaatgcagatgaggatagccatgttttctctgatatataaaaaaacactaaaactgtcttcacgtgtactcgataaaatatccatagggcagcttgtctctctgctctctaacaatcttaacaagtttgacgaaggattggcacttgctcatttcgtttggatcgcccctcttcaggtagcgctgcttatgggactcatttgggagttgctgcaggcctccgctttttgcgggctcgggtttctcatagtgctcgctctgttccaggctggattagggaggatgatgatgaagtaccgcgatcagagggccgggaaaatctctgaaagactggtaatcacaagtgaaatgatcgaaaacatacagtctgtcaaagcctattgctgggaagaagctatggaaaaaatgatcgagaatctaaggcagactgagttaaagctgactaggaaagccgcttatgttagatactttaattcctcagcctttttctttagtgggttttttgttgtgtttctgtccgtcttgccttacgcattaattaaaggaattatactgcgaaaaatctttactactatttctttctgcatcgtgctccggatggccgtaacacggcagttcccatgggctgttcagacgtggtatgattcactgggggctataaacaaaatacaggattttctgcagaaacaggaatataaaactcttgaatataacctcacaacgactgaagtggtaatggaaaatgtcacggcgttctgggaagagggattcggggaacttttcgaaaaagctaaacagaacaataataacagaaaaacatctaacggagatgattctctttttttttctaacttctctctccttgggactccagtactcaaagatatcaacttcaaaatagagcgggggcagttacttgctgtggcaggatctacaggagcagggaagactagtcttctgatggtgatcatgggagaactcgagccctctgaaggaaaaatcaaacattctgggcgcatctctttctgttcacagttttcatggatcatgccaggaacaatcaaagaaaatataatcttcggggtgtcttatgacgaatatcgatataggtccgtgatcaaagcatgccagctcgaagaagatatttccaaattcgctgaaaaagataacatagtcctgggagagggagggattactctatccggagggcagcgagcccgaatctcattggctcgggccgtttataaagatgcggacttatatctgctcgattctccattcgggtatcttgatgtcctcactgaaaaagaaatattcgaatcctgcgtatgcaaacttatggctaataaaactcgaattcttgtaacttcgaaaatggaacacctaaaaaaagccgataagattctcatcctgcatgaggggagtagttatttctatggaactttcagtgaattacagaacctccagcccgactttagttccaagcttatgggatgtgactccttcgatcagttcagtgccgaaaggcgcaattccatattaacagaaactcttcataggttctctttggaaggggatgctcccgtgtcctggacagagactaaaaaacagtccttcaaacagacaggagaattcggagagaaacggaaaaattctattctaaatccaatcaactcgatccggaaattctctatcgtgcagaagactccacttcagatgaacggaatcgaggaagattctgatgaaccactggagcgacgactttctctggtgccagatagtgaacagggagaggccatacttcctaggataagtgtgatttcaactggacctacactccaggcccggcgaagacagtctgtcctaaacttgatgacacattccgtcaatcaggggcagaatatccacaggaaaacaacggcttcaacacgcaaagttagtcttgcaccacaggctaatctgacagagctcgatatttatagtcgcaggctctctcaggaaactggattggagatctccgaagaaataaacgaagaagatctcaaagaatgtttttttgatgatatggaatctataccagctgtaacaacatggaacacatatctccggtatatcactgtgcataaaagtctgatcttcgtactgatatggtgtttggttatctttctggctgaagtcgccgcctcgttggtggtactatggctgctgggaaacacaccactgcaggataaggggaactcgacacacagtcgaaataactcttatgcggtcataatcacatcgacaagttcatattatgtattttatatctacgtgggagttgccgatacactgctcgccatgggattctttaggggattaccactggtgcatactctcataactgtttctaaaatcttgcaccacaaaatgctgcactcagtactacaagctccaatgtctactctcaacacactgaaagcaggaggaatcctaaaccggttttcaaaagatatcgcgatccttgatgatctcctccctctaacaatcttcgatttcatccagctcctactcatagtgataggagccatcgccgtcgtggctgtactgcagccctatatttttgtcgccactgtgcctgtcatagtggcatttattatgctccgggcatattttttacaaacatcccagcagctcaaacagcttgaatctgaaggacggtcccctatattcacgcatttggtaactagtctgaagggactctggacactgcgtgcattcggacgccagccctattttgaaacactgttccacaaagccctaaacctgcacacagccaactggttcttatatctttctactcttcgctggtttcagatgagaattgaaatgattttcgtgatttttttcatagccgttacatttatatctatccttacaacaggagaaggggaaggaagggttggaataattctgactcttgccatgaatataatgagtacactccagtgggccgtgaactcatcaatagatgttgatagtctcatgagatccgtgtccagggtctttaagtttatcgatatgcccactgaaggaaaacctacaaaatccactaaaccctataaaaatggacaactttccaaagtcatgatcatagaaaactcccatgtcaaaaaagacgatatctggccttcaggagggcagatgacagtcaaagatctgactgctaaatacacggaaggggggaacgccatcctggagaacatcagtttttcgatctccccaggacagagggtggggctgctcgggcggactgggtcaggaaaatccacacttctatccgccttcttgcgacttctcaatacagagggggaaattcaaatcgatggagtatcttgggattcaataactctccagcagtggcgcaaagcattcggagtgatccctcagaaagtcttcatcttctctgggacattccggaaaaatctcgacccatacgaacagtggtctgatcaagaaatttggaaggttgccgatgaagttgggcttcggtcagtcatagaacagttccctgggaaactagactttgttctcgtggatggagggtgtgtcctctcgcacggacataaacagttgatgtgcctggcccggtctgtgctctcgaaagctaaaatcctccttctagatgaaccatctgcccacctcgatcctgtcacatatcagatcatccggagaacactcaagcaggcctttgccgattgcacagtaatattgtgtgaacatcgcatcgaagccatgttagaatgccagcagttcctggtgatagaagaaaacaaagtgagacagtacgactccatacagaaactcctcaatgaacgttctctctttagacaagccatcagtccttcagatcgggttaaacttttccctcatcggaactcctcaaaatgcaaatccaaacctcagatagccgcccttaaagaagaaactgaagaagaagtacaggatacaagactg

SEQ ID NO: 10199 - DNA, 4440 bp, synthetic construct
  misc_feature 1..4440: note = source = /note="Description of Artificial Sequence: Synthetic coding sequence"
  source 1..4440: mol_type = other DNA
atgcagcggagcccattggagaaggctagcgtcgttagtaaactctttttttcctggacccgcccaatacttcgcaagggctaccgccagaggctggaactaagcgacatttaccagatccccagcgtcgatagtgccgacaacttgtccgaaaagctggaacgagagtgggaccgggagctggcctccaaaaagaacccaaaactgataaatgccctgcgtaggtgctttttctggagattcatgttttatggcatctttctgtatctgggcgaggtaaccaaggcagtacaaccattgcttctagggcggattattgcctcctacgaccccgacaataaagaggaaaggagcatcgctatatatctgggaattggtttgtgtctgctctttatcgttagaacactcctcttgcatcctgccatcttcgggttgcaccacatcggaatgcagatgcgcattgcgatgttcagtctgatctacaaaaagaccctgaaactctcatctagggtgctcgacaaaatctcaattgggcagctggtgagcttactctctaacaacctgaacaagtttgacgagggactcgcactggcgcacttcgtctggatcgctccgctgcaggtggctcttctgatgggtctgatatgggaattgttacaggcgagcgctttttgtggcctgggatttctaatagtgcttgcactcttccaggccggattaggccgcatgatgatgaaataccgggaccagcgggcgggaaagattagcgagagattggtcatcacatctgagatgatagaaaatatccagtctgtgaaggcctattgctgggaggaggcaatggaaaaaatgattgaaaacctgcggcagacagaactcaaactgactcgaaaggccgcttatgttaggtattttaactccagcgctttctttttttctggattcttcgtcgtctttttgtccgtactgccatacgccctgattaagggtattatcttgaggaagatcttcactacaatctccttttgtatcgtattgcggatggcagtcacccggcaattcccttgggccgtgcagacctggtatgatagtttgggagctattaataaaattcaagattttcttcagaagcaggaatacaagacccttgagtacaaccttaccaccaccgaagtcgtaatggagaatgtcaccgctttttgggaagaaggttttggagagttatttgaaaaagctaagcagaataataataaccgcaaaaccagtaacggagacgatagcctcttcttctccaattttagcctgctgggtacacccgtgctgaaagatattaactttaagatcgagaggggacaactgctcgctgtggcaggctccacaggagcaggaaaaaccagcctgcttatggtgatcatgggcgagcttgagccatcggaggggaagatcaaacattcgggaagaatctcattctgcagccaattcagctggatcatgcccggcaccatcaaggagaatatcatctttggcgtctcatatgatgagtacaggtataggtccgtcatcaaggcatgtcagttggaggaagatatctcaaaattcgccgaaaaagataatatcgtcctcggcgagggaggtattacactgagcggcgggcaacgcgcacgcatcagtctggctcgggcggtttacaaagatgccgatttgtacttgctagactccccttttgggtacctcgatgttctgactgaaaaggagatattcgaatcttgtgtgtgcaaactgatggctaataaaacgcgcattctggtgactagtaaaatggaacacctgaaaaaagccgacaaaattctgatcctgcatgagggatctagctacttctatgggactttttccgaactgcaaaaccttcagccggacttttcttccaagctgatgggatgcgatagctttgaccagttctctgccgaaagacggaactccatcttaactgagacattgcacaggttctctctggagggcgatgccccagtttcctggaccgagaccaaaaaacagagctttaagcagacaggggagttcggggagaaacgaaaaaactcaatactcaaccctatcaacagcatccggaaattttcgattgtgcaaaaaaccccactccaaatgaacggtattgaggaagactctgacgagccactcgaacgtcgtttgtctctggtgccagactcagagcagggcgaggcaattctgcccagaattagtgtcattagcacaggcccgacactccaagctcggaggcgtcagagtgtactgaatctcatgacccactcggtaaaccaaggtcagaacatccacagaaaaactacagcatccaccaggaaggtcagcttggccccacaagccaaccttaccgagctcgacatctactcccggcgcttatcacaggagaccgggcttgaaatttctgaggagatcaatgaagaagaccttaaagagtgtttcttcgatgatatggaatccatccccgccgttacaacgtggaatacttatctgagatacattacagtccataagtcgctaatattcgtgttgatatggtgcttagtgatcttcctggccgaggtggcggcttccttggtggtgctgtggctgctcgggaatacccccctgcaggacaaggggaattctactcacagccgtaataactcctacgctgtgattatcacctccaccagctcatactacgttttctacatttatgtgggggttgccgatactctgttggctatggggttttttcgcggtctcccattggtacacactctgattacagtctctaaaattctgcatcataaaatgctgcacagcgttcttcaggctcctatgtctactttgaacacactgaaagctggtggcatcctgaataggtttagcaaggacatcgcgatcctggatgatcttctgcctctcacaattttcgattttatacagctgttgctgatcgtgattggcgcgatagccgtcgtagcagtgctccagccctacattttcgtcgctaccgtgcctgtgattgtcgctttcattatgctgagggcttacttcctgcagacttctcagcagttaaagcaattagagtctgaagggcgtagccctatctttacccatctggtgacatcactgaagggcctgtggactttgcgagccttcggccgtcagccgtattttgagacactgttccacaaggctttgaatctgcacacagccaattggtttttgtacctttcaaccctccggtggtttcagatgcgtatcgagatgatcttcgtgattttttttatcgcagttacctttatctcgatcttgaccacgggcgaaggagaaggccgcgtgggaatcatattgacgctggctatgaatatcatgtctacacttcagtgggcggttaactcctccattgacgttgatagcctcatgaggagcgtaagtcgggtctttaaattcattgatatgcctaccgagggaaagcccaccaaatccacaaaaccctacaagaatggacaattgtcaaaagtgatgataattgagaatagtcacgtgaagaaagatgatatctggccaagtgggggacagatgacagtgaaggacctgaccgctaaatacacagaggggggtaacgcaatcctggagaatattagtttttctatctcacctggacagagagtgggactcctgggtaggactggttcgggcaagagtacccttctttccgccttcctgcggctattgaataccgagggtgagatccagatcgacggtgtctcatgggacagcattacgttgcagcagtggaggaaggccttcggggttattccacagaaggtatttatattctctggtaccttcaggaaaaacctggacccatatgagcagtggagcgatcaagaaatttggaaggttgcagatgaggtaggcctcaggagtgtgatcgaacagtttcctggcaaactggactttgtcctggtcgatgggggatgtgtgttatcgcacgggcacaaacagcttatgtgcctggcgagaagcgtactttcgaaagcgaaaatcctcctgctggatgagccatcagcccatttggatccggtcacttaccaaattattaggagaactctcaaacaggcatttgctgattgcacggtgatcctttgcgagcatcggatcgaggctatgctggaatgtcagcagttcttggtgatcgaagagaacaaggtcaggcaatatgattccattcagaaactgctgaacgaacggtctctgtttcgccaagcaatcagtccttctgatcgggtaaaactctttccgcacaggaatagttcaaaatgcaaaagtaagcctcagattgcagccctgaaggaagaaacagaggaagaggtccaagacactcggctg

SEQ ID NO: 10200 - DNA, 4440 bp, synthetic construct
  misc_feature 1..4440: note = source = /note="Description of Artificial Sequence: Synthetic coding sequence"
  source 1..4440: mol_type = other DNA
atgcagcgcagcccactggagaaggcctccgtggtttctaagctgttcttctcgtggacacgaccgatattaaggaagggttataggcaaagactcgaactgtccgacatatatcagattccatctgtcgattctgccgacaatttatccgagaagttggagcgagaatgggatagggagttggctagcaagaagaatcctaaactgattaatgcgcttagacggtgcttcttttggaggttcatgttctacggcatattcctctatctgggcgaagtgacaaaagccgtgcaacccctgctgcttggccgaatcattgcgagctatgatcctgacaacaaagaggagagatccattgcgatctacctaggaattggcctgtgtctccttttcattgtgcgcacattactgctgcaccccgctatatttggcctgcaccacatcgggatgcaaatgcgcatcgccatgtttagtctgatctacaaaaagaccctaaagctcagttctcgcgtattggacaagatctctataggccagctggtgtctctcctgtctaataatttgaataagttcgatgagggactggctttggcccacttcgtgtggattgcccctttgcaggttgcattgcttatgggactgatttgggagctcttacaagcctcagccttctgtggtctagggttcctcattgtgctggctctgttccaggcaggcctaggcaggatgatgatgaaatacagagatcagagagcaggcaaaatctctgagaggcttgtcataacctcagaaatgattgagaacatacagtccgtcaaggcttactgttgggaggaagccatggagaaaatgatcgaaaatttgcgccagactgagcttaagttgactagaaaagctgcgtatgtgaggtacttcaattcatcagcgttcttctttagcggcttttttgttgtattcctgagtgtgctgccttatgcattgatcaaaggcataatattgcgtaagatctttacaaccatcagcttctgtattgtgctgcgcatggccgtcactcgccaattcccttgggctgttcagacctggtacgacagtctgggtgccattaacaaaattcaggactttcttcaaaagcaggaatataagactctagagtacaatctcacaacaacagaagttgtgatggagaacgtcaccgcgttctgggaagaaggcttcggcgagctattcgaaaaagctaaacagaacaataataaccggaaaacatcaaacggcgatgattctctgttttttagtaacttcagcctgttgggcaccccagttctgaaggacatcaactttaagatcgaaaggggacagctcctagctgtggctggatcaaccggggcagggaaaacctcgttgctaatggttattatgggagaactcgagcccagtgaggggaaaattaagcattcagggcggatctctttttgctcgcagttttcctggatcatgcctgggaccatcaaagagaatatcatctttggggtgtcatacgacgaatatagataccgctcggtcattaaagcatgccaattggaggaggatatttctaagttcgccgagaaagacaacattgttctgggcgaaggcggtatcaccctgagcggtggccagcgcgcaaggatctccctagctagagccgtttacaaagacgctgatctatatctgctggattccccattcggttacctagatgtgcttaccgaaaaagaaatatttgagagctgtgtgtgcaaactgatggccaataagacacgaattcttgtgacctcaaagatggaacacttgaagaaggccgataagatcctcatcctgcacgaggggagttcttacttttatgggaccttcagcgaactgcagaatttgcaacccgactttagctccaaactcatgggatgtgactccttcgaccagttctcagccgaacgccgtaattcaattctcactgaaactttgcataggttttctctcgagggagacgcccccgtctcatggaccgaaaccaagaaacaatccttcaaacagaccggggagttcggagagaaacggaaaaattccatattgaaccctatcaacagcattcggaaattctcgattgttcaaaaaaccccacttcagatgaatggaattgaagaggacagtgatgagcccctcgaacgacggctgtctctggtacctgatagtgagcaaggcgaggctattctgccacggatcagcgtgatctccaccggccccactcttcaggccaggcggagacaatcagtattgaatttgatgacccactccgtgaaccaggggcagaatatacacagaaaaaccactgcctctacccgcaaggtgtccctagccccccaggccaaccttactgaactggatatttactctcgcagactgtcccaggaaaccgggctggaaattagtgaggaaatcaatgaggaggatttaaaagagtgctttttcgacgatatggaatcgatacctgccgtaactacatggaacacctacctgaggtacatcacagtgcacaagtccctgatcttcgtgctcatttggtgtttagtgatcttcctggcagaggtggcagcaagcctcgtagtgttgtggctcctgggaaacacaccactgcaggacaagggaaactccacccattcccgaaataattcttatgcagtgatcatcacctcgacgtcttcatactacgtgttttacatttatgtcggagtcgccgacactctgctggccatgggttttttccgcgggctcccactggtgcatacactaatcacagtgtctaaaatcctgcatcacaagatgcttcactctgtgttgcaggctcccatgtccacactaaacactctcaaggctgggggcatccttaatagatttagcaaggatatcgctatacttgacgaccttctgccgcttacgatctttgatttcattcagctcctgctgatcgtgataggtgccatcgctgtggtggctgttctgcagccctatatattcgtagccacagtacccgttatagtcgccttcattatgctgcgcgcctatttcctgcaaacttcccaacagttaaagcaactcgaaagcgaggggagatctcctatatttacacacctggtgacatcgctgaaaggtctctggacgcttagggcatttggccggcaaccatatttcgagaccttgtttcataaggcgctgaacctccatactgcaaactggtttttgtacctgagtaccctgagatggttccagatgcggatcgaaatgattttcgtgatctttttcatagcagtgacatttatctcaatcttaacgacgggtgagggcgagggcagagtgggcatcatcctgactctggcaatgaatataatgtctaccctccagtgggcagtcaattcgtctatcgatgtggactcgcttatgcgttcagtatctagagtctttaaatttatagacatgcctacagagggaaagcccaccaagagtacaaagccctataaaaatggtcagctgagtaaagtcatgattatagagaatagccacgtgaagaaagacgacatctggccgtcaggtggacagatgacagtgaaggaccttaccgccaagtatactgagggagggaacgcaatcttggagaatataagtttctcaatatcgccgggtcaacgggtgggattgctgggccggaccggctccggaaaatcaacactgctgtccgcctttctccgtctactgaatacagagggagagatacaaatagacggcgtgtcgtgggattccattacacttcagcagtggcgaaaggcgttcggggtcatcccccagaaggtttttatcttcagcgggacgttccgcaagaatcttgatccttacgagcagtggtcagatcaggagatttggaaggttgctgatgaggtgggcctaaggtcagtcatagaacaattccccgggaaactggacttcgttctggtggacggcggctgcgtgctgtcgcatggacacaaacagctgatgtgccttgctcgatcggtgctgtcgaaagcgaagatcctgctgttagatgaaccgtccgctcatttggaccccgtcacgtatcagataataagaaggactttgaagcaggcgttcgctgactgtacggtgatcctctgtgagcaccgaatcgaagctatgttagaatgtcagcagttcctggttatcgaagagaacaaggtgaggcagtacgactccattcagaagctgctgaatgaacgaagtctcttcagacaggcaatttcacctagtgatcgggtcaagttgtttcctcatcggaactcttcaaagtgcaagtccaagcctcaaatcgctgccctaaaagaggaaacagaagaggaggtgcaagacactagatta

SEQ ID NO: 10201 - DNA, 4440 bp, synthetic construct; identical to SEQ ID NO: 10140
  misc_feature 1..4440: note = source = /note="Description of Artificial Sequence: Synthetic coding sequence"
  source 1..4440: mol_type = other DNA

SEQ ID NO: 10202 - DNA, 4440 bp, synthetic construct
  misc_feature 1..4440: note = source = /note="Description of Artificial Sequence: Synthetic coding sequence"
  source 1..4440: mol_type = other DNA
atgcagcgcagccctctggagaaggcctcagtggtgagcaaattgtttttcagctggactaggccaatactgcgcaaggggtacagacaaagacttgaactctccgatatctaccagatcccgtctgtggattccgctgataacctgtcagaaaagctggagcgagaatgggatagagagttggcaagcaagaaaaacccgaaactgatcaatgcactcagaagatgcttcttttggcgcttcatgttttacggaatctttctctacctgggtgaagtcaccaaggcggttcaacctctgctgctggggcgcattattgctagttacgatccagacaacaaagaagaacggtccatagccatttacctgggcattggactttgccttctgtttatagtgagaaccctgctgctgcaccccgcaattttcggacttcatcatatcgggatgcaaatgcgtatcgcaatgttttcgctgatttacaagaaaaccctcaaactgtcctcgcgggtcctcgataagatttctattggacagctggtgagccttctgtccaacaacctgaacaagttcgacgaagggctggcacttgcacacttcgtctggattgcccccctccaagttgcacttctgatgggtctgatttgggagcttcttcaggcctcagcattctgtggtttgggatttctgatagtgctggcactgtttcaggcaggacttggtaggatgatgatgaagtaccgggaccagcgtgccggaaagatctcggaaagactggtgatcacctcagaaatgatcgaaaacatacagtcggtgaaggcctactgttgggaagaagcaatggagaagatgattgaaaatctccgtcaaaccgaattgaaactcacccgcaaggcagcatacgtgaggtactttaactcgtcagcattcttcttttccgggtttttcgtcgtgtttttgtccgtgttgccatatgctctgatcaagggaatcatccttcgtaagattttcacgaccatatcgttttgtatagttctgcgcatggcggttacgcgacagttcccgtgggctgtccagacctggtacgactccctcggggctataaacaaaattcaagattttctgcagaagcaagaatacaagactttggaatacaaccttaccactactgaggtcgtgatggaaaatgtgaccgctttctgggaagagggctttggagaacttttcgagaaggcaaagcagaacaacaacaatcggaaaacctcaaatggagatgactccctgttcttttcgaatttctcgttgctggggacccctgtgcttaaggatatcaatttcaagattgaacgggggcagctgcttgcggtggcaggttcaactggagccggcaagacctcattgttgatggtgataatgggggagcttgagccaagcgaaggcaaaatcaaacactcaggacggatatcgttttgctcgcaattctcctggattatgccagggaccatcaaggagaacatcatttttggcgtgagctacgacgaatatcgctacagaagcgttatcaaggcatgccagctggaagaggatatatcaaagttcgcagaaaaggacaatatagtgctgggtgagggtggaatcaccctttccggtgggcagcgcgcacggatctcgcttgcgagggcggtttacaaagatgcagatctttacctgctcgactcaccatttggttatcttgatgtgttgactgagaaagagattttcgaaagctgtgtgtgcaagctgatggccaacaagacgcgcatcttggtgacctccaaaatggaacacctgaagaaggcagacaaaattctcatccttcacgaaggaagctcatacttctacggtactttttcagaactccaaaacttgcagcccgatttctcatccaagctgatgggatgtgacagcttcgaccaattctccgcagagaggaggaattccattcttaccgaaacgcttcatagattttcgctggaaggcgacgcccccgtgagctggaccgaaaccaagaaacagtcatttaagcaaactggagagtttggggaaaagcgaaagaatagcattcttaacccaattaactcaattcggaagttttccatcgtgcagaaaactcctctgcagatgaatggcattgaagaagatagcgacgaacccctggaacgccgtctctcactggtgcccgactcggagcaaggtgaagcaatcctgcctagaatttctgtaatctccaccggaccaactctgcaggcgagacggagacagtcggtgctgaatctgatgacccattccgtgaaccaaggtcaaaacattcatcgaaagaccactgcctccacccgcaaggtgtcccttgcccctcaggctaatctcactgagcttgacatttactcaagacggctgtcgcaagaaacggggcttgaaatctccgaagagataaacgaggaagatctgaaagagtgtttctttgatgatatggagtccatccctgcggtcactacgtggaacacttacctccgttacatcaccgtgcacaagtcacttatcttcgtgctgatttggtgtcttgtcatttttctcgcagaagtcgcagcgtcgcttgtcgtgttgtggttgctcgggaacactccacttcaggacaaaggcaatagcacccattcgcgcaataactcctacgcggtcatcattaccagcacctcaagctactacgtgttctatatctacgtgggggtagcggatacgctgctcgctatgggcttctttagaggactgccgctcgtgcatactctcataaccgtctcgaagattctccatcacaagatgctgcattccgtgctgcaagcccctatgtctactctgaacactttgaaagcaggcggtatactgaaccgtttttccaaggatatcgcaatcctggatgatcttctgcctttgaccattttcgactttatccagctcctgcttattgttattggagccatcgcagtcgtggcggtgctgcaaccatacatctttgtagcaaccgttccagtgattgtcgcatttatcatgctgagggcttacttcctccaaacctcccaacagttgaaacaactggagtcggaaggacgctccccaatctttactcatctcgtgactagccttaaaggtctttggactctcagggcctttggacgtcaaccttactttgagactctctttcataaggcattgaatctccacaccgcgaattggtttctgtacctgtcgactctcaggtggttccagatgagaatcgaaatgatttttgtgatctttttcatcgcagtgacttttatctcaatcctgactactggcgagggagagggtcgggtgggaatcattctgactcttgcaatgaacattatgagcactctgcaatgggcagtcaactcgtcaatagatgtcgattcactgatgaggtcagttagccgggtgtttaagtttatagatatgccgaccgaaggaaagcctactaagtcaactaagccttacaagaatggacaactttcaaaggtgatgattatagagaattctcatgtgaagaaagatgatatctggcctagcggtggccagatgactgtcaaggatcttaccgctaaatacacggaaggaggaaacgcaattctcgagaacatctcgttttccatatcaccgggacagagggtgggattgctcggtagaactggtagcggcaagagcactcttctttcggcatttctgagactccttaacaccgaaggagagattcaaattgatggtgtctcgtgggactccataacgctccaacaatggagaaaggcatttggcgtgatcccacaaaaggtattcatattctcgggtacgtttagaaagaacttggatccctacgagcaatggtccgatcaggagatctggaaggtggcggatgaagtgggactccggtccgtcattgagcaattccccggcaagctcgacttcgtccttgtcgacggtggctgcgtgctgtcgcatggtcacaagcagctgatgtgtctggcaagatccgtcctctcgaaggcaaagatacttctcttggatgagccttcagcacatctggaccctgtcacttaccaaatcattcggcgtaccctgaagcaagcctttgctgattgtacggtgattctttgtgagcaccgaatcgaggcaatgcttgagtgccagcaatttctggtgattgaagaaaacaaagtgcgacaatatgattcaattcagaagctgctcaacgaacggtcgcttttccggcaggcaatttccccatcagatcgggtgaaactttttccacatcggaattccagcaagtgtaagtcaaagcctcaaatcgccgcattgaaagaagaaaccgaggaagaagtccaagacacccgcctt

SEQ ID NO: 10203 - DNA, 4440 bp, synthetic construct
  misc_feature 1..4440: note = source = /note="Description of Artificial Sequence: Synthetic coding sequence"
  source 1..4440: mol_type = other DNA
atgcaacggtctcccttagagaaagcatcagtggtgtccaaactgtttttctcctggactagaccaatactgcggaaaggatacagacagcgtctggaactcagcgatatatatcagattccctcagtggactccgctgataatctcagtgaaaagctggaacgggaatgggatcgagagctcgcctccaaaaagaaccccaaactgatcaatgcactgcggcgatgctttttctggcggttcatgttttatggtatttttctttatcttggcgaggtgaccaaagccgttcagccccttctcctcggccgaattattgcatcctatgatccagacaataaggaagaacgatctattgcaatctatctaggaataggtttgtgtttattgttcatcgtgcgaaccttgctcctgcaccccgctattttcggactacatcacattggtatgcagatgcgaattgcgatgttcagtctaatttacaaaaagaccctgaagctgtcctcacgggtgctggataagatctccattggccagctcgttagcctgttatcaaataatctgaataagttcgatgagggactggctctcgcacacttcgtgtggatagccccgctccaagtggcgctgctgatggggttgatctgggagcttttgcaggcatccgctttttgcggactgggattcctcatcgtcctagccttgttccaggccggcttgggccgcatgatgatgaagtatcgggaccagcgggctggcaagatcagcgagagactcgttattactagcgagatgatcgagaacatccagtcggtcaaagcatattgttgggaggaagctatggagaagatgattgagaatcttcgccagaccgagcttaagttaacgaggaaagctgcctacgtgagatacttcaacagttccgcttttttctttagtgggttttttgttgtgttcctgagcgttctgccgtatgcgcttataaaagggattattctgcggaagatcttcacaacgatcagcttttgcattgtgctcagaatggccgtgacgaggcagtttccttgggccgtgcagacatggtacgattctttgggcgcaatcaacaagattcaagacttcctgcagaaacaagaatataagaccctagaatacaacctgaccacaacagaggtcgtgatggaaaatgtcaccgccttctgggaggagggattcggtgaactcttcgagaaagccaaacagaacaataataaccgcaagacctcgaacggtgacgattcactgtttttcagtaacttttcactgttgggcactccagtgctaaaggatatcaattttaaaattgagcgcgggcagttgctggctgtggcaggatctacaggcgcaggcaaaacatcactccttatggttatcatgggcgaactggagccctccgagggcaaaattaagcactctggacgtatatccttctgctcacagttttcctggatcatgccaggaactattaaggagaacatcattttcggcgtcagttatgacgaataccgctaccggagcgtaattaaggcctgtcagcttgaggaagatatctcaaagtttgcggagaaagataatatcgtattgggcgagggggggataacacttagcggcggtcagagggccagaatctccctggccagagccgtgtacaaagacgcagatctgtacctgctggacagccctttcggctatctggatgtcttgaccgaaaaggaaatctttgagagttgcgtctgcaagctcatggcaaacaagactcgtattcttgtgacgtccaaaatggaacacctgaagaaggctgacaaaatactaatccttcacgaaggctcatcctacttttacgggaccttctctgaactgcagaatttgcagcctgacttttctagcaaattgatgggctgtgactcctttgatcagtttagcgctgagagaaggaactcgatcctgacagaaacgctgcatcgcttttccctcgaaggtgacgctccagtgagctggactgagacaaaaaagcagtcattcaagcagaccggtgagtttggggaaaagcgcaagaattctatcctgaatcctatcaatagcatccgaaagttctccatcgtccagaagacgcccctgcaaatgaacggaatcgaggaagatagcgacgagccgttagaacggagactcagcctcgtccccgacagcgaacaaggagaagcaattctgccccggatttcagtaatctcaaccggaccaacgctccaggcacggcgacgtcaaagcgtgctcaacctgatgacccactcagtaaaccagggccaaaacatccataggaaaactactgcgtctacacggaaagtgtccttggccccacaggccaaccttacagaactggacatctactcaagaaggctatctcaggaaacaggactggagatatccgaagagattaatgaagaggatttgaaagagtgtttctttgacgatatggagtctattcccgctgttacaacctggaacacttatctgaggtatatcactgtccacaaatcacttatctttgtgctgatctggtgcttggtgatcttcctggcagaggtggccgcctccttggtagtcctgtggctgctgggaaatacgccgcttcaagacaaaggcaatagcacccacagccggaacaacagttacgctgttatcattacatctacatcttcatactacgtgttctatatttatgtcggcgtggccgacaccctgctggcaatgggattcttccggggcctccccctggtccacactctgatcaccgtgagcaagatcctgcatcataaaatgctccatagcgtcctgcaggcgccgatgtctaccctgaacaccctaaaagccggcggtattctgaatcggtttagtaaggacatagcaattctggacgaccttttacctcttactatctttgacttcattcaactgctcttgattgttattggagctatcgctgtggtcgccgtgctgcaaccctacattttcgtggccaccgttcccgtgattgtggcctttatcatgcttagagcctactttcttcaaacaagccagcaactcaagcagcttgaatcagaagggaggtcgcctatttttacccatctcgtaactagcctcaaagggctctggacattgagggcattcgggcgacagccttacttcgagaccctgttccacaaagcccttaatctacacactgccaattggtttctctatctatctacacttagatggttccagatgcggatagagatgattttcgtcatcttttttattgctgttactttcatctccatcttgacgactggtgagggtgaaggacgcgtaggcataatactgactttagcaatgaatatcatgtctaccctgcagtgggctgtaaacagcagtatagacgtggacagccttatgcggagcgtgtcccgggtttttaaatttattgacatgccaacagagggaaagccgactaagtctaccaagccttataagaatggacagctcagcaaggtgatgataattgaaaactcccacgttaagaaggacgacatatggccttccggtggccagatgacggtgaaagacctgaccgccaaatacactgaaggtggtaacgcaatcctcgagaatatttcattcagtatatccccaggtcagcgggtaggtctgctcggccggactggctccgggaagagcaccctgctgagcgcttttctgaggctgttaaatacagagggcgagattcagatagacggagtgtcttgggacagcatcactctgcagcagtggcgaaaggccttcggagtcatccctcagaaggtgttcattttttctgggacttttaggaaaaatctcgatccatacgaacagtggtccgatcaggaaatttggaaagtagcagacgaggtcggcctgcggtcagtgatcgagcagtttccagggaagctggacttcgtactggtggacgggggctgcgtgttaagtcacggccacaaacaacttatgtgtttagctcgctccgtcctctcgaaggcgaaaattttattgctggatgaaccctctgcacatcttgatccggttacctaccagataattcggagaaccctgaagcaagcttttgccgactgtacggtgatcttgtgcgaacataggatcgaggccatgctcgaatgtcaacagttcctggttatcgaggagaacaaggtgcggcagtacgactcaatccaaaagttgctgaatgagcgttccttgttcaggcaggccatttctcctagtgacagagtgaaactgttccctcatcggaactcttcaaagtgcaagtcaaaaccccagatcgcagcccttaaggaggaaaccgaggaggaggtgcaggacacgaggctg

SEQ ID NO: 10204 - DNA, 4440 bp, synthetic construct
  misc_feature 1..4440: note = source = /note="Description of Artificial Sequence: Synthetic coding sequence"
  source 1..4440: mol_type = other DNA
atgcagaggagccctctcgagaaggcatccgttgtgagtaaattgttttttagttggacacgccctatcctgcggaaagggtacaggcagcgactggaactgtccgatatctaccaaattccttccgttgattccgctgataacctgagcgagaaactggaacgcgagtgggatagagagttggcttctaagaagaatcccaaattaataaatgctctcaggcgatgttttttttggcgattcatgttttatggaatcttcctgtaccttggtgaggtcactaaggccgtgcaacccctgctgttaggccggatcatcgctagttatgatcctgataacaaggaagaaaggagcattgccatctaccttggtatcgggctatgcctcctgttcatagtacgcacattactactgcaccccgcaatttttgggttgcatcatataggcatgcaaatgagaatcgctatgttttcgctcatctataagaaaacactaaaactcagcagtcgggtgcttgacaaaattagcatcggccagctggtgtctctcctgtcaaacaatctgaataagtttgatgaggggctcgcactcgcacacttcgtgtggattgcccctctccaggtggcattgctcatgggcctgatttgggaactgctacaagcgtctgctttttgcggactgggttttctcatagtcctcgcattattccaggccggactaggccggatgatgatgaaatatcgggaccagagggccgggaagattagtgagcgccttgtgatcacgagcgaaatgattgagaatattcagtcagtgaaggcttattgctgggaagaggcaatggaaaagatgatagaaaacctccgccagacggagctgaaattgacaaggaaggccgcctatgtgcggtatttcaattcatctgccttctttttttcggggttttttgtcgtgttcctgagcgtgttgccctatgccctcattaaagggatcattttgcgcaagatttttactacgatttccttctgtattgtgctgaggatggcggtcacccgtcagttcccctgggctgttcagacatggtacgattcacttggcgcaatcaataagatccaggactttctccagaagcaggagtataaaacacttgaatacaatttaactacaacagaggttgttatggagaacgtcaccgccttttgggaagaaggattcggggagctgtttgagaaggccaagcaaaataataataatcgaaagacatctaacggggatgattcccttttcttttcaaacttttctcttctgggtactccggtgctgaaagatatcaacttcaagatcgaaagagggcagctgctggcggttgccgggagcacgggcgccggcaaaacctcgctattgatggtgatcatgggagaactggaaccctcagaaggcaaaattaaacacagcggcaggattagtttttgttcacagttctcttggatcatgcccggcaccataaaggaaaacataatttttggggtgtcctacgatgagtaccgctacaggagtgtgatcaaggcctgtcaactcgaggaagatatctccaaattcgccgaaaaagacaacatagtgctcggcgaaggaggaatcacactgtccggaggccagagagcgaggatatctctggctagggcagtatacaaagacgccgacctgtatctcttagatagccctttcggctacttagatgtcctcaccgagaaggaaatttttgaatcctgcgtgtgtaaactcatggcgaacaagacaagaatcctcgtgaccagcaagatggaacacctgaaaaaagcggacaaaatcctgatactgcatgagggatcatcttacttttacggaactttctcagagctccaaaacctgcagcccgacttctccagtaagctgatggggtgcgatagctttgatcaattcagcgccgagcgacggaattccattctcacagagacattgcatcgcttctctttggaaggcgacgcgccagtctcctggacagagactaaaaaacagtcatttaagcagacgggagagttcggggagaagcggaagaacagtatcttgaatcctatcaattcgatccggaaattcagcatagtgcagaaaactccccttcagatgaacggaattgaggaagacagtgacgagcccctggaacgacggttatccttggtgcctgatagtgagcagggcgaggccatcctgcccagaatctctgtgatctcaacgggccctacgctacaggctcggcgaaggcagagtgtgctgaatctgatgacgcactcagtgaaccaggggcagaatatccaccggaagacgacggcgagcaccagaaaggtttctttagctccacaggcgaacttaacggagttggatatttattcgcgccgcctcagtcaagagacgggcctcgaaattagtgaagagattaatgaagaagacctgaaagaatgcttcttcgacgatatggagagtattcccgcggtgacgacgtggaatacctatttgaggtacatcaccgtgcacaaatcactcatcttcgtgctgatatggtgcctggttatctttttggccgaggtggctgcttctctggttgtgctgtggctactgggcaatacaccactacaggacaagggcaatagtactcattcccggaacaactcttacgcagtaattatcacatctacatcctcttactacgtcttttacatttatgtgggcgtggctgacacactcctcgccatgggtttcttccgggggctgcccttggtccacactctgattaccgtgtcgaagattttgcaccacaagatgcttcattcagtgctgcaggcccctatgagtaccttaaatactttgaaggctggaggcatcttgaaccgtttttcaaaggacatagcaatcctcgatgacctcctccctctgactatcttcgacttcatccagctattgctgatagtaattggggccatcgctgtagtcgccgtgctgcagccctacatcttcgttgctacagtgcctgtgatcgttgcctttattatgctcagagcgtatttcctccagacttctcagcagctgaagcagctcgaaagtgagggcaggtcccccatcttcacacacctggtcacctctcttaaaggcctctggacccttagggcttttggaaggcagccgtatttcgagacactattccataaggcattaaatctgcacaccgcgaattggtttctttatctgtcgactctgcgctggtttcagatgagaatcgagatgatctttgttattttctttatcgcagtgactttcatctctatactgaccaccggtgagggagagggccgagtgggcatcattctcaccctggctatgaacatcatgagcaccctgcagtgggcagttaacagttcgattgatgtggattctctgatgaggtcagtgagtcgagtgttcaagttcattgatatgcctaccgaaggcaaacctaccaagagcaccaaaccatataagaacggccagctgtctaaagtaatgataatcgagaattcccacgtgaagaaagatgacatttggccgtccgggggccagatgactgtgaaggacctgaccgctaagtacaccgaagggggcaacgccattctggaaaatataagtttcagtatctctcctggccaacgagtgggactgcttggaaggaccggtagcgggaagagtacactgttgagcgcgtttcttaggctgctgaatacggagggggagattcagatagacggggtgagctgggattcaattacattgcaacaatggagaaaggcatttggagttatacctcagaaagtattcatattctcgggcacgttccgcaaaaatctagatccctacgaacaatggtccgaccaagagatttggaaagtcgccgatgaggtgggccttaggtccgtaatcgagcagtttccagggaagttggattttgtcctggtggacggagggtgcgtcctgtcccacggccataagcagttgatgtgtctagcaagatctgtgctatcgaaggcaaaaatcctgttgttggacgagccaagcgcacacttagatcctgtcacttatcagataatcaggcgtactttgaaacaggcgtttgccgattgcaccgtcattttatgcgagcaccgcatcgaagctatgctagaatgccagcagttcctggtgatagaggaaaacaaagtgaggcagtatgacagcatccaaaagttgcttaacgaacgttctctgttccgccaggccatatctccgagcgatcgggttaaactgttccctcatagaaatagttctaaatgcaagtccaaaccacagatagccgccctgaaggaagagacagaagaagaggtgcaagataccaggctc

SEQ ID NO: 10205 - DNA, 4440 bp, synthetic construct
  misc_feature 1..4440: note = source = /note="Description of Artificial Sequence: Synthetic coding sequence"
  source 1..4440: mol_type = other DNA
atgcaaaggtcccccctggagaaggcgagtgttgtgtccaaacttttcttctcatggactagacctattctcaggaaaggatacaggcaaaggcttgaactttcagacatttatcaaataccctcagtggattcagccgataacctctcagaaaagctggaaagggagtgggatagggaattggcctcgaagaagaatcctaaacttatcaacgctcttcgccgttgtttcttttggaggttcatgttttacggaatcttcttgtaccttggcgaagtgaccaaggcagtccaaccacttttgctgggccgcatcatcgcatcatatgaccctgataacaaggaagagcgctcgattgctatttaccttggtattggactgtgtctcctgtttatcgtgcgcaccctgcttcttcatccagcaattttcggtctgcaccacattggtatgcaaatgcgtatcgccatgttttccctgatatacaagaaaacccttaagctgtcatcgagagtgctggacaagatttcgattggtcagcttgtgtcgctgctttcgaacaatctcaataagtttgatgaaggcctcgccctcgcccactttgtctggattgcaccccttcaggtggcacttcttatgggtcttatatgggagctccttcaggcatcagcattttgcggactggggtttctcattgtgctcgcactctttcaggcaggactgggtaggatgatgatgaagtacagagatcaaagagccgggaaaatcagcgaacggctcgtgattacctcggaaatgatagagaacatacaatccgtgaaggcatactgttgggaagaggcaatggagaagatgattgaaaacctccgccagaccgagctcaagctcactagaaaggcggcttacgtgcggtactttaacagcagcgcgtttttctttagcggatttttcgtggtgtttctgagtgtgctcccctacgccctgattaagggaatcattctgagaaagatctttacgaccatctccttttgcatcgtccttaggatggcagtgactcggcagtttccttgggcagtgcagacctggtacgattccctcggcgccatcaacaaaattcaggatttcctccaaaagcaggagtacaaaactctggaatacaatcttactaccactgaagtggtcatggaaaacgtcactgcattttgggaagaaggattcggggagctgttcgagaaggctaagcaaaacaataacaatcgtaaaacttcgaacggtgatgattcgctgtttttctcaaacttcagcctgctgggcaccccggtgctcaaagacatcaactttaagatagagcgaggacaacttctggcggtggcaggttcaaccggtgcaggcaagacgtcactgcttatggtgattatgggcgagctcgagccctcagaaggtaagattaagcattcagggaggattagcttttgtagccagttttcatggatcatgcctggcactatcaaggaaaacataatcttcggcgtgtcctacgatgagtacagatacagatccgtcatcaaggcatgtcaacttgaagaggacatctccaaattcgcagaaaaggacaatatcgtcctgggagaaggggggattaccctgtcaggcggtcagcgggcacgtatcagcctggcaagagcagtttacaaggacgccgacctgtacctcctggattcgccatttggatacctcgacgtgctcaccgaaaaggagatttttgagagctgcgtgtgcaagctcatggccaacaagactagaatcctcgtgacctcgaaaatggaacacctgaaaaaggcagataagatcctgatacttcatgagggaagctcatacttttacggaaccttctcagaacttcaaaatctgcaacctgatttctccagcaagctgatgggatgtgattcgttcgatcagttttcggcggagagaaggaactccattctgacggagactttgcataggttctcgctcgaaggcgacgcccctgtgtcttggaccgagacgaagaagcaatcttttaagcagactggcgaatttggggagaaacgcaaaaactccattctcaaccctatcaattcgattcgtaagttttcgatcgttcaaaaaactcctctccagatgaacggcattgaagaggactcggacgaaccattggaacggcggctttccctcgtccctgactccgaacaaggtgaagcaatcctgcctaggatctccgtgatttccacgggaccaactctgcaagctcgccgcagacaatccgtcctcaaccttatgactcatagcgtgaaccaggggcaaaacatccatagaaagaccactgcatcgaccagaaaagtgtcactggcacctcaagcaaatcttacggagctggacatatactccagacgactttcccaagaaacgggccttgaaatctcagaagaaatcaatgaagaagatcttaaagagtgcttttttgatgacatggaatccattcctgctgtgactacttggaacacctaccttcggtacataaccgtgcataagtccctcatctttgtgctgatatggtgcctggtgatttttctggccgaagtcgcagcctcacttgtggtgctttggcttctcggaaatactcctcttcaggataagggaaactccacccatagcagaaataactcatacgcagtgatcattacttcgacttcatcctattacgtcttttacatctacgtgggtgtggcagatactcttctggctatgggtttcttccgcggcctcccattggtgcacaccttgataaccgtgagcaagattctgcatcacaaaatgctgcattcagtgctccaagccccaatgtcaacgcttaatactcttaaagcaggaggaattctgaatcggttttcgaaggatatcgccatacttgatgacctccttccactgaccatctttgatttcattcaactgcttctgattgtcattggagccattgcagtggtggcagtgctccaaccgtatatctttgttgccaccgtgcctgttattgtcgcgtttatcatgctgcgcgcgtactttcttcaaactagccagcaactgaagcaacttgaaagcgagggccgaagcccgatctttacccatcttgttacctcactgaaaggtctttggactctgcgtgcctttggacgccaaccatacttcgaaaccctgtttcataaggcactcaacctgcacactgcaaactggttcctgtacctgtcgactcttcgctggttccagatgagaatcgaaatgatatttgtgatcttctttatcgccgtcacgttcatctcaatactgacgaccggcgagggagaaggaagagtgggaattatccttactctggcgatgaacattatgagcaccctccagtgggcagtgaactcaagcatcgacgtggactcactcatgaggtcagtgtccagggtgtttaagtttatagatatgccgactgaaggaaagccgactaagagcactaagccttacaagaacggacaactctcgaaggttatgattatcgagaactcacatgtgaagaaagatgatatctggccttcggggggccagatgacggtgaaggaccttaccgcaaagtacactgaaggaggcaacgctatccttgagaatatctcgttttcgatttcgcctggccagcgcgtgggtctgctcggacggaccggctcaggcaagtcgacccttctgtccgctttccttaggctgctcaacaccgaaggggaaatccagattgatggggtgtcctgggatagcataactctgcagcaatggagaaaggctttcggagtcattccacaaaaggtgtttatcttctcgggtacttttcgcaagaaccttgatccttatgaacaatggtcagatcaggaaatttggaaagtcgcagatgaagtgggtcttaggtccgtgattgaacagtttcctggtaaacttgactttgtccttgtggatggaggctgtgtgctttcccacggtcataagcaactgatgtgtcttgcacggagcgtgttgagcaaagcgaaaattcttctgcttgacgaaccttcggcacatctggacccggttacctaccagattatccgcagaaccctgaagcaagcattcgcagattgtactgttatcctgtgtgaacaccgcatagaagccatgctggaatgccaacagttccttgtgattgaagagaataaggtccggcagtatgactcaattcagaaattgctgaacgagagatccctgtttagacaggcaatctccccaagcgatcgagtgaagctgtttccacatcggaattcgtccaagtgtaagtcaaaaccccaaatcgcagcactcaaagaggaaactgaagaagaggtgcaggataccagactg

SEQ ID NO: 10206 - DNA, 4440 bp, synthetic construct
  misc_feature 1..4440: note = source = /note="Description of Artificial Sequence: Synthetic coding sequence"
  source 1..4440: mol_type = other DNA
atgcaaagatcgcccctggaaaaggccagcgtggtgagcaagctgttcttttcgtggacgcgccccatcctgcgcaaaggctaccgccaaagactggaattgtccgatatctaccaaattccgtcagtcgattcggctgataatctctccgaaaaacttgaacgcgaatgggaccgggagctcgcttcaaagaagaacccgaaacttatcaacgcactgcggaggtgtttcttctggcgcttcatgttttacgggattttcctctatttgggagaagtgacgaaggcggtgcagccgctgctcctgggacgcatcatcgcctcgtacgacccagacaacaaggaggagaggagcattgccatttacctggggatcggactgtgccttctgttcatcgttcgcaccctgctgctgcacccggcaatcttcggactccaccatatcgggatgcagatgcggattgcgatgttctctcttatttacaagaagaccctgaagctgtcgagccgcgtgcttgataagatctccatcgggcaactcgtgtccctgctgagcaacaacctcaacaaatttgatgaaggactggcactggcccatttcgtgtggatcgctccactccaggttgcacttctcatggggctgatctgggaacttctccaagcctccgccttctgcggactgggcttcttgatcgtgcttgccctgttccaagctgggctgggacggatgatgatgaagtatagggaccagcgggcaggaaagatttccgagaggctcgtgatcacttcggaaatgatcgaaaatatccagtcggtgaaggcgtactgctgggaggaggcaatggagaagatgatcgagaatctgcgacaaaccgagctcaaactcacccgcaaggcggcgtacgtgcggtactttaactcgagcgctttcttctttagcggatttttcgtggtgtttctctcggtgctgccgtacgcccttatcaagggcatcattctccgaaagatcttcactaccatctcgttctgtatcgtcctccgaatggctgtgactagacaattcccgtgggccgtgcagacctggtacgattcgctgggcgcaatcaacaagatccaggatttcctgcagaaacaggagtacaaaaccttggaatacaatctcactaccactgaagtcgtcatggagaacgtcaccgcgttttgggaagaaggcttcggggaactcttcgagaaggctaagcaaaacaataacaaccggaagactagcaatggggacgatagcctgttttttagcaacttctctcttctgggaaccccggtcctgaaggacatcaacttcaaaatcgagcgcggtcagctgctcgccgtggcggggtcgactggcgcgggcaagacttccctgctcatggtgatcatgggagaactggaaccatcggaaggaaagattaaacactccggacggatctcgttttgctcccagttctcgtggatcatgccgggaaccatcaaggaaaacattatcttcggagtttcctacgacgagtacagatatcggagcgtcatcaaagcatgccaactcgaggaagacatatcgaagttcgccgaaaaagataatatcgtgctgggcgagggtggaatcactctgagcggaggacagagagcaagaataagcctcgccagggcagtgtacaaggatgccgacctgtacctgctggactccccgtttggataccttgatgtgttgactgagaaggaaatcttcgaatcctgcgtgtgcaaattgatggccaataagacgagaatccttgtgacctccaagatggagcatttgaagaaggcagataagattctgatcctgcacgaggggtcctcatacttctacggaactttctcagagctccagaacctccaaccagacttctcttcaaagctgatgggctgtgactcctttgaccagttctcagcggaacgacgcaattcgatccttaccgagacgctgcaccgcttctcacttgagggagacgctccggtgtcgtggaccgaaactaagaaacagtccttcaagcaaaccggagagttcggtgaaaaacggaaaaacagcatcctgaatccgatcaactctatccggaagttttccattgtccagaaaactccccttcaaatgaacggaatcgaggaggattcagatgaaccgctcgaacggcggctgtcacttgtgccagactccgaacagggagaagcaattctgccgcgcatctcggtgatctccaccggaccgacccttcaggcccgcagacgccagtcggtgcttaacctcatgactcacagcgtcaaccaaggccaaaatatccaccgcaaaactaccgcatccacgaggaaagtctcgctggcgccgcaggccaacctgactgaactggatatctactcacggaggctttcccaggaaactggtcttgagatctccgaagaaatcaacgaggaggacctcaaggagtgcttcttcgacgatatggaatccatccccgccgtgaccacctggaacacttacctcagatacatcactgtgcacaagagcctgatcttcgtcttgatctggtgtctcgtgatttttctcgccgaggtcgcagcttctctggtcgtgctgtggctgcttggaaacacccctcttcaggacaagggcaattcaacccactcgagaaataactcgtacgccgtgattatcacttcgacttcgtcctactacgtcttctacatctacgtgggtgtcgccgacactctgctcgccatgggatttttccggggcttgccgcttgtccacactctcatcacggtgtcaaagatcctgcaccacaagatgcttcattcagtgctgcaagctcccatgtcgaccctgaatactttgaaggcaggagggatcctgaaccgcttttccaaagacatcgccatccttgatgatctgctgccactgaccatcttcgattttatccagctgctcctgatcgtgattggagccatcgccgtggtggctgtcttgcaaccctacatcttcgtggcaactgtcccggttatcgtggccttcatcatgctgcgggcctactttctgcagacctcgcagcagcttaagcagctggagagcgagggaagatccccgatctttacgcatctggtgaccagccttaagggtctgtggactttgcgcgctttcggccgccaaccctacttcgaaaccctctttcataaagcactgaatttgcacaccgctaactggttcctttacctctcgaccttgcggtggttccagatgagaatcgaaatgattttcgtcatcttcttcatcgctgtgacttttatctcgattctgaccactggagagggcgaaggaagagtcggaatcatccttactttggccatgaatatcatgtcaaccctgcaatgggccgtgaatagttcaatcgacgtcgactcgctcatgcgttccgtgtccagagttttcaagttcattgacatgccgaccgaaggaaagccaactaagtccactaagccgtacaagaatggccaactgtcaaaagtgatgatcatcgagaatagccatgtgaagaaggacgacatctggccgtcaggcggccagatgactgtgaaggacctgaccgccaaatatactgaaggaggaaacgcgatcctggagaacatctctttcagcatttccccgggacaaagagtcggactgcttggtagaactggatcaggcaagtcaaccctgctctcggccttcctccgcctgctgaacactgaaggggaaatccagatcgacggggtttcatgggactcgattacgcttcagcagtggcggaaagcattcggagtgatcccacagaaagtgttcatcttctccggaacgttcagaaagaacttggacccgtacgagcagtggtccgatcaagaaatctggaaggtggcggacgaagtgggcctcagatcggttatcgagcaattccccgggaagctcgacttcgttttggtggacggaggatgcgtgctctcccatggacataagcagctcatgtgcctcgcgcgctcggttctgtcgaaggcgaagattctcctcctggacgaaccgtcggcccacctggatccggtgacttatcagatcatccgacggaccctgaaacaagccttcgcggactgcaccgtgatcctgtgtgagcaccgcatcgaagcgatgctggaatgtcagcagttcctggtgattgaggaaaacaaggttcggcagtacgattccatccagaaactgctcaatgaacggtcactcttcagacaagcgatctccccatcggaccgcgttaagctgttcccacaccggaattcctcgaagtgcaagtcgaagccgcaaatcgcagccctcaaggaggaaaccgaggaagaagtccaagatactcggctc

SEQ ID NO: 10207 - DNA, 4440 bp, synthetic construct
  misc_feature 1..4440: note = source = /note="Description of Artificial Sequence: Synthetic coding sequence"
  source 1..4440: mol_type = other DNA
atgcaacgttcccctctggaaaaggcctcggtggtatccaagctcttcttctcgtggactcgcccaatccttcgtaaggggtaccgtcaaagattggagctgtcagatatctaccaaattccttcggttgattcggccgataacctttccgaaaagctggaacgagaatgggacagagagctcgcatcaaaaaagaaccctaaattgattaatgcactgagaagatgtttcttttggcgttttatgttctacggcattttcctgtatctgggagaagtcactaaggcagtccaaccgctgcttcttggcaggatcatcgcatcctacgatcccgataacaaagaagagaggtcaattgctatctacttgggtattggtttgtgtcttttgtttatcgtcaggacccttttgctgcaccctgccatttttggtctgcatcacatagggatgcaaatgagaattgcaatgttttcattgatttacaagaaaactcttaagctgagctccagggtccttgataagatttcaatcggacaactggtgtcgctgttgtcaaataaccttaacaaattcgacgaaggtctggctctggcgcactttgtctggattgcacctctccaagtggcgctgctgatgggtctgatttgggaactccttcaagcctcggccttctgtggactggggtttctgatcgtgcttgcattgttccaggcaggactggggcggatgatgatgaagtaccgcgatcaacgcgccggaaagatttcggaacggctcgtgatcacctctgaaatgattgaaaacatccagtcggtgaaagcatactgttgggaggaagccatggagaagatgatagaaaatctgcgtcaaactgaacttaagttgactagaaaggcagcgtacgtgcggtactttaactcgagcgctttctttttctcaggcttttttgtggtattcctctcggtccttccgtacgcacttatcaagggaattatccttcggaagattttcaccactatatccttttgtatcgtgctgagaatggcagtcactaggcaatttccttgggcagtgcagacctggtacgattcactgggagcaattaacaagattcaggactttctgcaaaagcaagaatacaagacccttgagtataacctcaccactaccgaagtcgtcatggaaaacgtgaccgcattttgggaagaaggattcggcgaactgttcgaaaaagcaaaacagaacaacaacaataggaaaactagcaatggagacgactccctgtttttcagcaactttagcctgctcgggacccctgtcctgaaagatatcaacttcaaaatagaaagaggacaacttctggcagtggcaggaagcactggcgcgggaaagacctcgcttcttatggtcatcatgggcgagctggaaccttcagaaggcaagattaaacacagcggacggatcagcttttgttcacaattttcctggattatgcctggtaccattaaggaaaacattatctttggtgtgtcctacgatgagtaccgctacaggagcgtgattaaggcatgccagttggaagaggacataagcaagtttgcagaaaaggataacattgtgcttggagaaggaggtattaccctgagcggaggtcagcgtgctcgcatttccttggcacgggctgtctataaagatgcagatctgtacctccttgatagcccatttgggtacctggatgtcctgactgagaaggaaatctttgagtcgtgcgtgtgtaagctgatggcaaataagaccagaatccttgtcacgtccaagatggagcacctcaaaaaggccgacaagatcctgattctgcatgagggatcatcgtacttctacggaacctttagtgaactgcagaacctgcaaccggattttagctcgaagctcatgggatgtgactcgtttgatcaattttccgctgagaggcgcaactcaatccttactgaaaccctgcatcgcttttccctcgagggcgatgcacccgtctcctggactgaaactaagaagcaatcctttaagcaaaccggggagttcggtgagaagcggaagaactcaattctgaatccgatcaactccataaggaagttttcgattgtccaaaaaactccacttcaaatgaatgggatagaagaggatagcgatgagccacttgaaagaaggctgagcctggttccagattcagaacagggagaagcaattctgccacgaataagcgtgatctcaaccgggcccaccctgcaggcgcggcgcaggcagtcggtgctcaatctgatgacccattcggtcaaccaagggcagaatatccatcgaaaaactactgcctccactcgcaaagtgagtctcgccccacaagcaaatcttaccgagttggacatttactcgagaaggctttcccaagaaaccggacttgaaatctcagaagaaatcaacgaagaagatctgaaagagtgttttttcgatgatatggaatccatccccgctgtgaccacctggaacacttatctgaggtacattaccgtccacaagtcgctcatttttgtgcttatttggtgtctggtgatttttctggccgaggtggccgcctccctggtggtcttgtggcttcttggtaatactcctttgcaggacaagggaaactccacccatagccgtaataactcctacgcagtcatcattacctccacttcgtcctactacgtgttttacatttacgtgggggtggcagatactctgctggccatgggttttttccgtggtctgccgcttgtgcatacgcttattaccgtgtcgaagattctgcatcacaaaatgctgcatagcgtgctgcaagcgccgatgtcaactctgaacacgttgaaggccggcggcattctcaaccggttttccaaggacatcgcaattttggatgatctgctcccactgaccattttcgatttcattcagctgcttctcattgtcatcggtgccatcgcagtggtggcggtcctgcagccttacattttcgtggcaaccgtgcccgtgattgtggcatttatcatgcttcgtgcgtacttcctccaaacttctcagcaacttaaacagctggaatcagaaggaagaagcccaatcttcacccatctcgtgacttcgcttaagggcctctggaccctcagagcctttggacgccaaccttactttgaaactctctttcacaaggcattgaaccttcacacggcaaattggtttctttacctgagcaccctccggtggtttcaaatgaggatagaaatgatctttgtgatcttcttcatcgcggtgacgttcatcagcattcttacgactggtgaaggagaaggcagagtcggaatcattctgactctcgccatgaatatcatgtccactcttcagtgggcagtgaattcctcgatagatgttgatagccttatgcggtcggtgtctcgtgtctttaagttcattgatatgccaactgaaggcaagccaactaagtcgaccaaaccctacaaaaacggacaattgagcaaggtcatgatcattgagaattcgcacgttaagaaagatgacatctggccatcgggcggacagatgaccgtgaaagatctgaccgcgaagtacactgaaggtggtaacgccattcttgaaaacatctcgtttagcatttcacctggccagcgggtcggactgctgggacggactggcagcggtaaaagcacccttctttcggcgtttcttagacttctcaatactgaaggcgaaattcaaatagacggcgtttcgtgggattcaataacgctgcaacagtggcgcaaggccttcggagtcatcccgcagaaggtgttcatcttttcgggtactttcaggaagaaccttgatccttacgaacagtggtccgatcaggaaatttggaaggttgcagatgaggtcggattgcggtccgtgattgagcaatttccagggaaactggacttcgttctggtggatggtggttgtgtgctgtcgcatggacacaagcaactgatgtgcctggcacggtcagtgcttagtaaggccaagattcttcttcttgatgaaccatccgcgcatctggaccccgtgacttaccagatcataagaaggactcttaaacaagccttcgcagattgtaccgtcattctctgcgaacatcgcattgaagccatgctcgaatgccaacaatttctggtgattgaggagaataaggtgagacagtatgacagcatccaaaagttgctcaatgagagatcactgtttaggcaagcaatctctccctccgatagagtgaaactttttccgcatcggaactcctccaaatgcaaatccaaacctcagattgccgcacttaaagaagaaactgaagaggaagtccaagataccaggctc

SEQ ID NO: 10208 - DNA, 4440 bp, synthetic construct
  misc_feature 1..4440: note = source = /note="Description of Artificial Sequence: Synthetic coding sequence"
  source 1..4440: mol_type = other DNA
atgcagaggtccccccttgagaaagcttctgttgtatccaagcttttcttttcttggactagaccaatcctccgtaaaggttatcgccaaaggctggagctgtctgacatttaccagatcccatcagtagactctgctgataatctctccgaaaaacttgaacgcgaatgggaccgcgaacttgcatccaagaagaaccctaagctgattaacgcactgcgccgctgcttcttctggagattcatgttctatggtattttcctttatctcggagaggtaaccaaggccgtccagccactgctcctgggaagaatcatcgcctcctatgatcccgacaacaaggaggaacgttctatcgccatctatctgggaatcggtctgtgcctgctcttcattgtgcgcactttgcttctgcaccctgctattttcggattgcatcacataggcatgcagatgcgcatcgctatgttttccttgatctacaagaagaccctgaagctctcatcaagggtcctggacaagatttccattggccagcttgtttccttgttgagcaataacctcaataaatttgacgagggccttgccctcgctcatttcgtctggattgctccccttcaggtggcccttttgatgggtctgatatgggagttgctccaggcttccgctttctgtggtctcggctttctcattgtactggccttgttccaagccggcctcggaaggatgatgatgaagtacagagaccaacgcgccggaaagatctctgaacgtctggtcattacctccgagatgattgaaaacatccagtcagtgaaggcctattgctgggaagaggccatggagaaaatgattgagaacctgagacaaaccgaactcaagctgactaggaaggccgcttacgtccgttacttcaattcaagtgctttcttcttctcaggatttttcgtagtgttcctctccgtcctcccttacgctcttattaagggtataatcctccgtaagatattcaccacaatctctttttgcatcgttctgagaatggctgtcacccgtcagttcccttgggcagtacagacttggtacgactctttgggcgcaattaacaagatacaagactttctgcagaagcaggaatacaagacccttgagtacaatctgaccactacagaagtagtgatggagaatgttaccgccttttgggaagagggctttggtgagttgttcgagaaggctaagcaaaataataacaatcgtaagacttccaacggcgatgattctttgtttttctccaactttagtctgctgggtacacctgtactgaaggacattaacttcaaaatagaaaggggccaactgctggccgtcgccggtagcactggtgctggcaagactagccttttgatggtaattatgggtgagcttgagccttcagagggaaagattaaacacagtggaagaatctctttttgttcccagttctcttggatcatgccaggtaccatcaaagagaacatcattttcggcgtttcctacgatgagtataggtacaggtctgtcattaaggcctgccagctcgaggaggatatttctaagtttgctgagaaagacaacatcgtactcggagaaggcggaataactttgtccggaggccaaagggcccgcatctctcttgcacgcgccgtctataaagacgcagacctgtacctgctggacagtccattcggatacctcgatgtgctgaccgagaaagaaatattcgaatcttgtgtgtgcaagctgatggctaacaagacaagaatcctcgtgacttccaagatggagcacctgaagaaagcagataaaatactgatcttgcatgaaggatccagctacttctacggcacttttagtgagctccagaacctgcaaccagatttctcaagcaagctcatgggatgcgatagcttcgaccagttttccgcagagaggagaaactcaattttgacagaaaccctgcatcgtttctctctcgagggtgacgcacctgtctcctggactgaaacaaagaagcagagcttcaagcagacaggcgagttcggcgaaaagcgtaaaaactccatcctgaacccaatcaacagcatcagaaaattctctatcgtccagaagaccccccttcaaatgaacggaatcgaagaggattccgacgagcccctggaaaggagactcagtcttgtgccagacagtgagcaaggtgaagctattctgccccgcatcagcgtgattagcaccggtcctactttgcaggctaggaggcgccagtctgtgcttaatctgatgactcacagcgtgaaccagggccagaatatccaccgcaagaccaccgccagtactagaaaggtgtctctcgcaccacaggctaacctgaccgaattggatatctactctagacgtctttcccaagagactggactggaaatcagtgaggagatcaacgaagaagacctcaaggagtgtttttttgacgatatggaaagtattcctgctgtgactacctggaacacctacctgcgttacatcactgttcataagtctctgatcttcgtcctgatctggtgccttgtcatctttcttgcagaagttgcagcatcccttgttgtcctgtggttgctgggaaataccccactgcaggacaaaggcaacagcactcattcccgtaacaactcctacgctgtcatcatcacctctacatccagctattatgtgttctacatctacgtgggagtggctgacactctccttgcaatgggtttcttccgcggtctgcctctcgttcacacattgatcactgtatctaagatcctgcaccataagatgctccactccgtcctgcaggctcctatgagtactctgaatactctgaaggcaggcggtattctgaaccgcttctcaaaggatattgctattctggatgatttgttgcccctcacaatatttgatttcattcagcttctcctgatcgtgataggcgctatcgcagtggtcgctgtgttgcagccctacatctttgtcgctactgtcccagtaatagtggcattcatcatgcttagggcctactttctccagacctcccagcagctgaagcagctcgagtccgaaggtaggagccctatcttcacccacctcgttacctcacttaaaggcctctggaccttgagagcttttggtagacagccctactttgaaactttgttccataaggccctgaacctccacaccgccaactggttcctttatctttcaacactcagatggttccaaatgcgcatcgagatgatctttgttattttctttatcgcagtcaccttcataagcattcttaccactggagaaggagagggtagagtaggcatcatcttgaccttggccatgaatatcatgtccacccttcagtgggctgtgaactcctctatcgatgtggatagtttgatgcgttctgtgagtcgtgtctttaagttcatcgacatgcccactgagggaaagccaactaagtcaactaagccctacaaaaatggccagctttctaaggttatgatcatcgagaattcacatgtcaagaaggatgatatctggcctagcggcggtcaaatgaccgtgaaagacctgacagctaaatatactgagggaggaaacgcaattctggaaaatatctccttctccattagtcctggacaaagggtcggtctgctgggtagaaccggatctggcaagagcaccctgctgtctgccttcctccgcctcctcaacactgaaggtgaaattcagattgacggagtcagctgggactctataaccttgcagcagtggagaaaggccttcggagtaatccctcaaaaggtgtttatcttcagcggcaccttcagaaagaatctcgacccttatgaacagtggtctgatcaagaaatatggaaggttgccgatgaagttggacttcgttcagttattgaacaatttcccggcaaattggatttcgtcctcgttgacggtggctgcgtgttgtctcatggccataaacaattgatgtgcctcgccaggtctgttctgagcaaggctaagatactgctcctggatgagccttcagcacacttggatccagtcacctaccagatcattcgtaggactcttaagcaggccttcgctgactgcaccgttattctctgcgagcacagaatagaggccatgcttgaatgccaacagttcctcgttattgaggagaacaaggtgaggcagtatgatagcatccagaaactgctgaacgaaaggtccctgtttaggcaagccatcagcccctctgaccgcgtcaaactcttcccccataggaattcctcaaagtgcaaaagcaagccccagattgccgctcttaaggaagagacagaagaggaggtccaggatactcgtctg

SEQ ID NO: 10209 - DNA, 4440 bp, synthetic construct
  misc_feature 1..4440: note = source = /note="Description of Artificial Sequence: Synthetic coding sequence"
  source 1..4440: mol_type = other DNA
atgcaacgcagccctctggagaaggcgtccgtggtgagcaagctgttcttctcctggaccagaccgatactgcgtaagggctacagacagcggttggagctgtcggatatctaccagatcccgtcggtggactccgctgataacctgtccgaaaagctggaacgggaatgggaccgcgagttggccagcaagaagaatccgaagctcatcaacgcactccgcaggtgcttcttttggcggttcatgttttacggaatcttcctgtacctcggggaagtgaccaaagcggtgcaaccgctgctgcttggtagaatcatcgcctcgtacgacccggataacaaagaggagagatcgatcgctatctacttggggatcggactgtgcctgttgttcattgtccggacgctgttgctccatccggcgatctttggactccatcacattggaatgcagatgaggatcgcgatgttttccctgatttacaagaaaaccctgaaactctcgagcagggtcctggataagatctcgatcggccagttggtgtcgcttctgagcaacaaccttaacaagttcgatgaaggcctcgccctggcgcacttcgtgtggatcgcgcctctgcaagtggcactgctgatgggacttatctgggaactcctgcaggcctccgccttctgtggactgggtttcttgatcgtgctcgcccttttccaggctggcctgggacggatgatgatgaagtaccgggatcagcgcgctggaaagatctccgaacggctggtgatcacgtcggagatgattgagaacatccagtccgtcaaggcctactgctgggaggaagctatggagaagatgatagagaacttgcgtcaaactgagctcaagctcaccagaaaggctgcctacgtgagatatttcaacagcagcgctttcttctttagcggattctttgtcgttttcctgtccgtcctcccgtacgcgttgatcaaggggatcatcctccgcaagatcttcaccaccatctcattttgcattgtgcttcgcatggccgtcactcggcaattcccatgggcagtgcagacttggtacgactcgctgggcgcaattaacaaaatccaggattttcttcagaagcaggaatacaagactctcgaatacaacctcaccactactgaagttgtgatggagaatgtgacggccttctgggaagaaggattcggagagcttttcgagaaggccaagcagaataacaataacagaaaaacctcgaacggggacgactcgctcttcttttccaacttttcgctcctgggaaccccggtgcttaaagatatcaacttcaagatcgagcgcggacagctgctggccgtcgcgggctccactggcgcaggcaagaccagcctgctcatggtgatcatgggagaactggaaccgagcgagggtaagatcaagcacagcggacggatctcattctgttcccaattctcgtggattatgccaggtaccatcaaggagaacatcatctttggcgtgtcctatgatgagtaccggtaccgatcggtgatcaaggcgtgccagctggaagaagatattagcaaattcgccgaaaaggataacatcgtcctcggtgagggcggaataactctttccgggggacagagggcacggatctcgctcgccagagctgtgtacaaagacgcggacctctacttgttggactcgcccttcggatacctggacgtgctgaccgaaaaggaaatcttcgaatcatgcgtgtgcaagctgatggcaaacaagacccgcattctggtgacctcgaagatggagcacctgaaaaaggcggacaaaatcctcattttgcacgagggtagctcgtacttttacggaactttctcagaactccagaacctccagccggacttcagctcaaagctcatggggtgcgactccttcgaccagttctccgctgagagaagaaactcaatcctgaccgaaaccctccaccgcttctcactcgaaggagacgctcctgtgtcgtggaccgagacgaaaaaacagagcttcaaacagaccggcgagttcggagaaaagagaaagaactcgatcctgaatccaatcaacagcatcagaaagttttcaatcgtgcagaaaactccgctccagatgaacggtatcgaagaggactcggacgagcctctggaaaggcgcctctcgctggtcccggactccgaacagggagaagccatcctgccgcgcatcagcgtcatctccactggccctaccctgcaggcacgcagacggcaatcggtgctgaacctgatgacccattccgtcaaccaaggacagaatatccaccgcaaaaccaccgcatcgaccagaaaagtgagcctcgcgccgcaagcgaacttgaccgagctcgacatctactcacgtcgtctctcgcaagaaactggactcgagatctccgaggaaatcaatgaagaggaccttaaggaatgctttttcgatgacatggagtcgattccagccgtgaccacgtggaacacctatctgcgctacatcaccgtgcacaagtcgctcatatttgtcctgatctggtgcttggtcatctttctggccgaagtggcggcctcgctggtggtgctgtggctgttgggcaacacgccactgcaggacaaggggaactcaacccatagccggaataactcgtacgcggtcatcatcaccagcacttcctcctactacgtgttctacatttatgtcggtgtggccgatacgctgctggccatggggttttttcgcggcctgccgctggtgcataccctgatcacggtgtccaagatcctgcaccacaaaatgctccactcggtgctgcaggcaccgatgtcgactcttaatactctcaaggccggaggaatcctcaaccgcttctcgaaggacatcgccatcctggacgacctcctgcctctgacgatctttgacttcatccagctgcttctcattgtgatcggagcaatcgccgtggtggccgtcctgcagccttacattttcgtggctactgtgccggtgatagtggcctttatcatgctgcgggcgtatttcctccaaacctcccagcaactgaagcagttggaaagcgaaggccggtcaccaatctttactcacctcgtcacctcgcttaagggcctgtggacgctccgcgcgttcggacggcaaccatacttcgaaaccctctttcacaaggctctgaatctgcacactgccaactggttcttgtacctgtcgaccctgaggtggtttcaaatgcggatcgaaatgatcttcgttatcttcttcattgccgtcacttttatcagcattctgactactggcgagggagaaggacgcgtgggaatcattctcaccttggcgatgaacatcatgtccaccctgcagtgggccgtgaattcctccatcgatgtggactcgctcatgcgctcagtcagcagagtgttcaaattcatcgacatgccgaccgagggaaagccgaccaaatccactaagccctacaaaaatgggcaactctccaaggtcatgatcatcgagaatagtcacgtcaagaaagatgacatctggccgagcggtggccaaatgaccgtgaaggaccttaccgccaaatacaccgaaggaggaaacgcgattctggagaacatctcatttagcatctcccctgggcaaagggtcggattgctcggtcgcactggatccggaaaatcaactctgctgagcgccttcctgaggttgcttaacaccgaaggcgagattcagatcgacggagtgtcatgggactcaattaccctgcagcaatggaggaaggcattcggggtgatacctcagaaggtgttcatcttttcagggaccttcagaaaaaacctggacccgtacgaacaatggagcgatcaggaaatctggaaggtggcggacgaagtgggtctgcggagcgtgatcgaacaattccctgggaaacttgattttgtcttggtggatggcggctgcgtgctgtcacacggccacaaacaactgatgtgcttggcccgctcggtcctgtccaaggctaagatcctgctgctggatgaaccgtcggcgcacctggaccctgtgacctaccagatcatccggcggaccctgaagcaagcattcgccgattgtactgtgatcctgtgtgaacatagaatcgaagcgatgctggaatgtcaacagttcctggtgatcgaagagaacaaggtgagacagtacgacagcatccaaaagctgctgaatgagcgaagcctttttagacaggccatctcgccgtctgaccgggtgaagctcttcccgcatcgcaatagctccaagtgcaaatcgaagcctcaaatcgccgccctcaaggaggagactgaggaagaagtgcaagacactcggctg

SEQ ID NO: 10210 - DNA, 4440 bp, synthetic construct
  misc_feature 1..4440: note = source = /note="Description of Artificial Sequence: Synthetic coding sequence"
  source 1..4440: mol_type = other DNA
atgcagcgctccccacttgagaaggcgagcgtggtgagcaagctcttcttttcctggaccagaccgattctgagaaaaggttacagacagagacttgaactctcggatatctaccaaattccgagcgtggactccgccgataacctgtccgagaaacttgaaagggagtgggaccgggaattggcctcaaagaagaatccaaagctgatcaatgcactccgtaggtgcttcttctggcgatttatgttttacggaattttcctctatctgggagaggtcaccaaagctgtccagccgctgctcctggggcgcatcatcgcgtcctacgaccccgacaataaggaggagcggagcatcgcgatctacctggggatcggactgtgtctgctgttcatcgtgcggactctcctgctgcaccccgcgatcttcggtctgcatcacatcggaatgcaaatgcggatcgcaatgttctcgcttatctacaaaaagacccttaaacttagctcaagagtgctggacaagattagcatcggtcagctggtgagccttctctcaaataacctgaacaagttcgacgagggactggccctggcccatttcgtgtggatcgccccactccaggtggcactcctcatgggactgatctgggagttgttgcaagcgagcgccttctgtggattgggcttcctgatagttctcgcactgttccaggcgggcttggggcggatgatgatgaagtaccgggaccagcgcgcgggaaagatttcagagcgcctcgtcatcacttcggaaatgatagagaatattcagtccgtcaaagcctactgctgggaggaagccatggagaaaatgatagaaaacctgcgccaaactgagctcaagttgactaggaaggccgcatacgtgagatacttcaacagctcggcattcttcttcagcggatttttcgtggtattcctctctgtactgccgtacgccctgatcaaaggaatcatcctgaggaagatcttcaccaccatctcattctgtattgtcttgcgcatggcggtgacgagacagttcccatgggcggttcaaacttggtacgactcattgggagcaatcaacaaaatccaggactttctccagaaacaagagtacaagactctggaatacaacttgaccactactgaagtggtgatggagaatgtcactgcattttgggaagagggcttcggagagcttttcgagaaggcaaagcagaataacaataatcggaaaacctcaaacggagacgacagcctctttttctcgaacttctcgctcctgggaactccggtcctcaaagatatcaacttcaagatcgagcggggccagcttcttgcagtagccggaagcaccggagcaggcaagacctccctgctgatggtcatcatgggagagttggaaccgtcggaaggaaagatcaaacattcgggacggatcagcttttgctctcaattctcatggattatgcccggcaccatcaaagagaacatcatcttcggagtgtcgtacgatgagtaccgctacagatccgtgatcaaggcctgccagttggaagaggacatctcgaagttcgcggaaaaggacaatatagtactgggtgaagggggaatcaccttgtccggcggccagagagcccgtatctcgctggcacgcgctgtctacaaggatgcggatctgtacctcctcgattcaccgttcggctatctcgacgttcttacggagaaggagatctttgaatcgtgcgtctgcaaactgatggctaacaaaacccggattctggtcacgagcaaaatggagcacctgaagaaagccgataagatcctgatcctgcatgaaggatcatcatatttctacggaactttctccgaactgcaaaacctgcagcccgacttctcgtcgaagctgatgggatgcgattcgttcgatcaattctcggctgaacgacgcaactcaatcctcaccgaaacgcttcataggttctcgctggaaggtgacgccccagtcagttggaccgaaaccaagaagcaatcatttaagcaaactggtgaattcggagaaaagcgaaagaactcgatccttaacccgatcaactcaatcagaaagttctcgatcgtccagaaaactccactgcaaatgaacggaatcgaagaggacagcgatgagccgctggagaggagactgtcattggtcccggactccgagcagggcgaagccattctgcccagaatttccgtgatctccacgggaccgaccctccaggcgaggcggcggcaatcggtgctgaacctgatgacccattccgtgaaccagggccagaatatccatcgcaaaactaccgcttctaccagaaaggtcagcctggctcctcaggcaaatctgactgagctcgacatttactcccgcagattgtcccaggaaaccggactggaaatttcagaggagatcaatgaagaggacctgaaggagtgcttctttgacgacatggaatccatccctgcggtgaccacttggaacacctacctgcgctacatcactgtgcacaaatcactgatctttgtcctgatctggtgcctggtgatcttcctcgcagaagtagccgcctccctggtcgtgctctggctcctgggaaatactccacttcaagacaaggggaacagtactcactcgcgcaacaattcgtacgcagtgatcatcacgtctaccagcagttactacgtattctacatctatgtcggtgtggcggacaccctgttggctatggggtttttccgggggcttccgctggtgcacaccctcattaccgtgtccaagatcctgcatcacaagatgcttcacagcgtgctgcaggccccaatgagcaccctcaacaccctgaaggccggcggaatcctcaatcggttctccaaggacatcgctatcctcgatgatttgctgcctctcactatcttcgacttcatccaactcctgctgatcgtcattggggccatagccgtggtggctgtgctgcagccgtacattttcgtggctacggtgcctgtgatcgtggcctttatcatgctgcgggcctacttcctccagacttcccagcagttgaaacaactggagagcgagggtcgctcgccaatctttacccacctggtgacttcgctgaaggggctctggaccctgagggccttcggcaggcaaccctacttcgaaaccctgtttcataaagccctgaacttgcacaccgccaactggtttctttacttgtccactctgcggtggttccagatgcgcatcgaaatgattttcgttatctttttcatcgcggtgacctttatctctatcctcactaccggagagggcgaaggccgcgtcggtatcattctgactctcgcgatgaatatcatgtccaccctccagtgggcagtgaattctagcatcgacgtggactcactcatgcgcagcgtctcccgggtgttcaagttcatcgacatgccgacggaaggcaagccgaccaagagcactaagccttacaagaacggccaactctccaaggtcatgatcatcgaaaactcccatgtgaaaaaggatgatatttggccttccgggggccaaatgactgtgaaagacctcaccgctaaatacaccgaaggagggaacgccatcctcgaaaacatctcttttagtatctcgccgggccaacgggttggacttctcggacgcactggttccggaaaatccacgctgctttcagcctttctccgactcctcaacactgaaggagaaatccaaatcgacggcgtgtcctgggattccataaccctgcaacaatggcgaaaggcgttcggcgtgataccacaaaaggtgtttatcttctccggaactttccgcaagaatttggatccttacgaacagtggagcgatcaggaaatctggaaggtggccgatgaagtggggctccgctcagtcattgagcaatttccaggtaagctggatttcgtccttgtcgacggagggtgcgtgctgtcgcacgggcacaagcagcttatgtgtctggcgcgctcggtgctgagcaaagctaagatcctgctgctggatgaaccgtcggctcacctggaccctgtgacctatcagatcattcgccggactttgaagcaggcttttgctgactgtaccgtcatcctttgcgaacaccgcattgaagcaatgctggaatgccagcagttccttgtgatcgaggaaaacaaggtcagacagtacgattcaattcagaagttgctcaatgagcgctcgctctttcggcaggccatctcgccgtccgacagagtgaagttgttcccacaccggaactcgtcaaaatgcaagtcaaagccgcagatcgccgccctgaaggaagaaacggaagaggaggtgcaggatactcggctc

SEQ ID NO: 10211 - DNA, 4440 bp, synthetic construct
  misc_feature 1..4440: note = source = /note="Description of Artificial Sequence: Synthetic coding sequence"
  source 1..4440: mol_type = other DNA
atgcaaaggtccccgctggagaaggccagtgtcgtgagtaagctcttcttcagttggacccgccctatactgcgaaaggggtacagacagagattggagctgtccgatatctaccaaattccatcagtggactccgccgataacttgtctgagaaacttgaaagagaatgggacagggagctggcctctaaaaagaaccccaaactgataaacgccctccgacgatgctttttctggagattcatgttctatggcatctttctgtatctcggagaagtcaccaaagccgtgcagccactgctgctgggcaggatcatcgccagctacgacccagacaataaagaggagcgttcgatcgctatctatctgggcatcggcttatgtctgctgttcatcgtgagaactttgctactgcatcctgctattttcggccttcaccacattgggatgcaaatgaggattgcaatgttctcgttgatttacaagaagaccttaaaactgagctcccgagtactggataagattagcatcggtcagctggtgtcactgttgtccaacaatctaaacaagttcgacgaaggtctggccctggcacacttcgtgtggatcgcccccctccaggtcgctttactaatgggcctaatttgggaattactgcaggcttctgccttctgcggtctggggttcctcatcgtgctcgccctgtttcaagctggcctcggaagaatgatgatgaagtatcgggaccaaagagctggaaaaattagcgaaagacttgtaattactagcgagatgattgagaatattcagtccgtcaaagcctactgttgggaagaggctatggaaaagatgatcgaaaatcttcgacaaaccgaactgaagcttactcgaaaggcagcttatgtgcgatatttcaacagtagcgctttcttcttctccggtttttttgttgtgttcttgtccgtcctaccttacgcgttgatcaagggcattatcctgcgaaagatattcaccaccataagtttttgtatcgttctcaggatggctgtcacacgacaatttccttgggccgtccaaacatggtatgattctctaggagcaattaataagatccaggatttcctgcagaagcaggaatacaagacactcgaatacaatctgactaccactgaagtagtgatggaaaacgtgaccgccttttgggaagagggatttggagaactgttcgagaaagccaagcagaacaacaataataggaaaacttcaaacggggatgattccctattctttagtaacttttcgctgcttgggacacctgtactgaaggatataaacttcaagattgagagaggacagctgctggcagtagcaggctctaccggagccggtaaaacaagcctgttgatggtgatcatgggagaactggaacctagcgaggggaagataaagcactccgggagaatttctttttgctcacagttttcctggattatgcccggcaccattaaggaaaatataatctttggggttagctacgacgagtatcgttacaggagtgtgatcaaagcctgtcagctggaagaggatattagcaagttcgctgaaaaagataacattgtcctgggtgaaggcggaataactttgtccggagggcagcgggcgagaatttccctggcacgtgccgtctacaaggacgcagatctctacctcctggattcccctttcggctatctcgatgtgttgaccgagaaggaaatatttgagtcttgcgtgtgtaagctcatggcaaacaaaacaagaattttggtaaccagcaaaatggagcatttgaaaaaagccgataagatacttatactacacgaaggctcttcctacttctacgggacctttagcgagctgcagaacctacaacccgatttttctagcaaactgatgggctgtgacagttttgatcagtttagtgcggaaaggaggaatagcatacttacagaaaccttacaccggttcagcctagagggagacgctcctgtgtcttggactgagactaaaaagcagtccttcaaacagaccggcgaattcggggaaaagaggaagaattccatcctcaatcctataaacagcattcggaaattctctattgtgcagaaaacgccgctgcaaatgaatggcatcgaagaagatagcgacgaacctcttgagagaaggttgtcccttgttcccgacagtgagcagggcgaggccatattgccgcgaatttcagtgatcagcaccggtcctacgttgcaagcgcgaagaagacagtccgtgctgaatctcatgacgcattctgtcaaccaaggtcagaacattcatcgaaaaaccacagcttctacaagaaaagtctctctggcgccacaagccaatcttaccgagctggacatatatagtcgtcgcctgagccaggagaccggtctcgagatatccgaagagataaatgaagaagacctcaaggagtgcttttttgatgacatggagtccattcctgcggtaaccacatggaacacttacttgagatacataacagtgcataagagcctcatattcgtccttatctggtgtctggtcatcttcctcgccgaagtggcagcctccttggtggtcctctggctcctgggaaatacaccactgcaggacaagggtaacagtacccatagccgaaataactcatacgccgtgattataacctctacttcttcatattatgtgttctatatttacgttggggtcgcagataccctgctggctatgggcttttttcgagggttgccactggtccacaccctcatcacagtttccaagatcctgcaccacaaaatgctccattctgtactacaggcccccatgagcactcttaacacgttgaaagctggaggtatcttgaaccgattcagcaaggacatcgctattctggacgacttgcttccgcttacaatttttgatttcatacagctgttactgattgtgatcggcgccattgcggttgttgccgtcttgcagccatatatctttgtggcaaccgtgccggtgatcgtggctttcatcatgctgagagcgtatttcctgcagacgtcccagcagttgaagcagctggaaagtgagggtcgttccccgatttttacgcacttggtgacaagcctgaaaggcctgtggaccctgagggcgtttggacgacagccctacttcgagacacttttccacaaggctcttaatctgcacacagcgaattggttcttgtatctgagtacacttaggtggtttcagatgagaatcgagatgatatttgtcatctttttcatcgcggtcaccttcatttctatcttgacgacaggagagggtgaaggaagagtagggatcattctgaccttggctatgaatatcatgagtaccctccagtgggcagtgaattcaagtattgatgtggactcactcatgcgtagtgtgagtagagttttcaaatttattgacatgcccaccgaggggaagcctactaaaagcacaaaaccatataaaaacggccagttatccaaggtaatgatcatagaaaacagccatgtgaagaaagatgatatctggccaagcggaggacagatgactgtgaaagacctgaccgccaagtatactgagggtggaaacgccatcctggaaaacatctccttctctatatccccgggtcagagagtgggccttttaggtcgtacaggatctggaaaatctaccctcttgagcgcattcttaagactgctcaataccgaaggcgagatccagatcgatggcgtttcctgggacagtattactctgcagcagtggaggaaagcttttggagtgatcccacaaaaggtgttcattttctccggcacttttaggaaaaatctggacccttatgagcagtggagtgaccaggaaatctggaaggttgcagacgaagtcgggctgcgatcggtgattgagcagttccccggcaaactggattttgtgctggttgatggcggctgcgtcctcagccacggccacaagcagctgatgtgcctcgctcggtctgtccttagtaaagctaagatcctactgttagatgaaccctctgcccatctggacccagtcacctaccaaatcatccgaagaacccttaagcaggccttcgccgattgtactgtgatcttgtgcgagcacaggatagaagccatgttagagtgtcagcaattcctggtgattgaagaaaataaggttcgacagtacgacagtatacagaagcttctgaatgagagaagtctgttcagacaggccattagcccttccgaccgagtgaaacttttccctcaccgcaatagctcgaagtgcaaatccaagccacagatcgccgcattgaaggaggaaaccgaagaggaggtgcaggacaccagactg

SEQ ID NO: 10212 - DNA, 4440 bp, synthetic construct
  misc_feature 1..4440: note = source = /note="Description of Artificial Sequence: Synthetic coding sequence"
  source 1..4440: mol_type = other DNA
atgcagagaagcccgctcgagaaggctagcgtcgtgtccaaactgttttttagctggaccagaccgatcctgagaaagggttaccggcagcgcctcgagctgtcggacatctaccagataccgagcgtcgattccgctgacaacctgtcagaaaagctggaacgggaatgggatcgagagcttgcaagtaagaaaaacccaaagctcatcaacgcacttagacggtgcttcttctggcgcttcatgttctacggaattttcctgtacctgggtgaggtcactaaagccgtgcaaccgctgctcctgggacgcatcatcgcatcatacgatccggataataaggaagaacggagcatcgcgatttacttggggattggactttgccttctgttcatcgtcagaactcttctgctccatcccgccatcttcggtttgcaccacatcgggatgcagatgcggatcgcgatgttctcgctcatctataagaaaactctcaaactgtccagccgggtcttggataaaatctcaatcggtcaactggtcagcctgctgtccaacaatctgaacaagtttgacgaaggccttgcactggcgcatttcgtgtggatcgcccccctgcaagtggccttgctgatgggactgatctgggaactgttgcaggcatcggcgttctgcggattggggttcctcatcgtactggctctgttccaggctggactcggaagaatgatgatgaagtaccgcgaccaacgcgcaggaaagatctcagagcgcctcgtcatcacgtccgaaatgattgagaatatccagtccgtcaaggcgtactgttgggaggaagcgatggagaagatgatcgaaaatctccgccaaaccgagctcaaactcactcgcaaggccgcctacgtgcggtactttaactcgtccgcctttttctttagcggattctttgtggtgttcttgtccgtgctcccatacgcgctgatcaagggaatcatcctgcggaagatttttactaccatcagtttttgcattgtcctgcgcatggccgtgactaggcagtttccgtgggctgtgcaaacgtggtacgactcactgggcgccatcaataagatccaggatttccttcaaaagcaggaatacaagaccctggagtacaacctcaccaccactgaagtagtgatggaaaacgtgaccgccttctgggaagaggggttcggagagttgtttgaaaaggcgaaacagaacaacaacaaccggaaaacttccaacggggatgacagcttgttcttctccaacttctccctcctcggcactccggtgctgaaggacatcaatttcaagatcgaaagaggtcagctgctcgccgtggccggatcgactggagccggtaaaacctccctgctgatggtgatcatgggggagctggagccatcagagggaaaaatcaaacactccggtcggatctccttttgcagccagttctcctggatcatgccaggcactatcaaggagaacattatcttcggcgtgagctacgacgaatacagatatcgcagcgttatcaaggcgtgtcagctggaggaggatatttccaagttcgccgagaaggacaacattgtgctcggagaaggaggcatcaccctgtcgggaggccagcgggcgcgcatctcgctggcacgggcagtgtataaggacgcagacctctatctgctcgactccccgtttggatacctggacgtgctcactgagaaggagatcttcgagtcgtgcgtgtgcaagctcatggccaacaagaccagaatcttggtcacctcgaagatggaacacctcaagaaggctgacaagatcctgatcctgcacgagggatcgtcgtacttctacggtaccttctcagaactgcagaatctgcagccagatttctcgagtaagttgatggggtgcgactccttcgaccaattctccgccgaaagacgcaactcaatcctcactgaaactctccacaggttttcactggaaggcgatgcacctgtgagctggactgagactaagaagcaatcgttcaagcaaacgggggaattcggggagaagagaaagaactcgatcctgaatccgatcaacagcatccgtaaattcagcatcgtccaaaagactcccttgcagatgaacggaatcgaagaggattccgatgaaccgcttgaacggcggctgtcgctcgtgcccgattccgaacagggagaggctattctgcctaggatctcagtcatctccacgggacctactctccaggcccgccgccgccagagcgtgctgaacctgatgacccattcagtgaaccagggccagaatatacaccgcaaaactaccgcctctactagaaaggtgtcactcgctccacaggcgaatttgaccgagctcgacatttactcgcggaggctgtcacaagaaactggactcgagatttctgaggaaatcaacgaggaggacctgaaagaatgcttcttcgacgacatggagtcgatcccagccgtgaccacctggaatacctacctgcgctatatcacggtgcacaaatcgcttatcttcgtgctgatctggtgcctggtcatcttcctcgcggaagtcgccgcgtccctggtggtgctgtggctccttggaaacaccccattgcaggacaagggaaattcaacccactcgaggaacaactcgtacgcggtcattatcaccagcaccagctcctactacgtgttctacatctacgtcggcgttgcagacaccctccttgctatgggcttttttagaggactgccgctcgtgcatactctgatcactgtctccaaaatactgcatcataaaatgctccatagtgttttgcaagcccctatgtccaccttgaacaccctcaaggccgggggcattctgaaccgtttcagcaaagacatcgccatcctggatgacctgctcccgcttactatctttgacttcattcagctgctgctgatcgtcatcggagccatcgctgtggtggccgtgctgcagccgtacatcttcgtggcaacggtgccggtcatcgtggcattcatcatgctgcgggcgtacttcctgcagacctcccagcagctcaagcagctggaatcggagggtcgctcaccgatcttcacccatctcgtgacctccctcaagggcctgtggactctgcgggcctttggacgccaaccgtactttgaaacgctgttccataaggccctcaatcttcacaccgctaactggttcctgtacttgtcgaccctcagatggttccagatgagaatagaaatgatcttcgtcatcttcttcatcgcggtgaccttcattagcatccttactacgggcgaaggggaaggacgcgtgggcatcatcctgactcttgcgatgaatatcatgtccacgctccaatgggccgtgaattcgtcgattgacgtggattctctgatgcggtcggtgagccgcgtgttcaaattcatcgacatgccgactgaaggcaagcccaccaaatctactaagccgtacaaaaatggacagctctcaaaggtcatgatcatcgaaaactcacacgtcaaaaaagatgacatttggccatcaggcggacagatgacggttaaggatctgaccgcaaagtacaccgaaggcggcaatgcaatcctggagaatatcagcttctctattagccctggccaaagggtgggactgctgggtaggaccggttccggaaagtcgaccttgctgagcgcctttctccggctgctgaataccgaaggagaaatccagatcgacggagtgtcgtgggattcgattaccctgcagcagtggcgcaaggcgttcggagtcatccctcaaaaggtgtttatcttttcaggcactttccgaaagaatctggatccatacgagcaatggtcagaccaagagatctggaaggtggctgatgaggtcggacttcgatcagtgatcgaacaattccctggaaagttggacttcgtcctggttgacggaggatgtgtgctgagccacgggcacaaacaactgatgtgcctcgctagatcggtcctgtcaaaagcaaaaatcctgctccttgatgagccatcggcgcacttggatcctgtgacttaccagatcattcggcggaccctcaagcaggccttcgcagactgtactgtcatcctgtgtgaacatcgcatcgaagccatgctcgaatgccaacagtttctggtgatcgaagagaacaaggtgaggcaatacgacagcattcagaaactgctgaacgaacgcagcctctttcgccaagccatctccccgtcggaccgggttaagctgttccctcaccgcaactcgtccaaatgcaagtcgaagccccaaattgccgctctgaaggaagaaactgaggaagaggtgcaggataccaggctt

SEQ ID NO: 10213 - DNA, 4440 bp, synthetic construct
  misc_feature 1..4440: note = source = /note="Description of Artificial Sequence: Synthetic coding sequence"
  source 1..4440: mol_type = other DNA
atgcagagatcgccactagaaaaggcctctgtggtgtccaaattattctttagctggacacgccccatcctacggaaagggtacagacagcgtctggagttgtctgacatctaccagatcccctccgtcgatagcgccgataatctctcggaaaaactcgagcgtgaatgggaccgcgagttggcctccaaaaagaaccccaagctgatcaatgccttgcgcagatgttttttttggagattcatgttttacggcatttttttgtacctaggcgaggtcaccaaggctgttcagcctttgctcctcggacggatcatcgcctcttatgacccagacaacaaggaagagaggtctatagctatctatctgggcatcggcctgtgcctactgtttatcgtgcggactctgctcctgcatccagctatcttcggcctgcaccatattgggatgcagatgcgcattgcaatgttcagccttatttataaaaaaacgctcaaattgagtagccgcgtacttgacaaaatctcaattggccagctcgttagcctgctttccaataacctgaataagtttgacgagggtctggctctcgctcattttgtgtggattgctccccttcaggtcgccctcctgatgggcctgatatgggaactgctgcaggctagcgctttttgcggcctcgggttcctgattgttctggctcttttccaggccggactggggaggatgatgatgaaatatcgtgaccaaagggcggggaaaatctctgagcgcctggtgataacgagcgagatgatcgaaaacattcaaagcgtgaaggcctactgctgggaggaagccatggaaaaaatgattgagaaccttcggcagacagaactgaaacttactcgcaaggctgcctatgttagatactttaattcatcggccttttttttcagcggatttttcgtggtgtttctgtctgtccttccatatgcccttattaagggcattattttacgcaagatctttacgacaatcagtttctgcattgtcctgagaatggccgttacccgacagttcccctgggcagtgcagacctggtacgactcactgggggctattaataagattcaggactttctacagaagcaggagtacaaaacactggagtacaacctgactaccactgaggtggtcatggagaacgtgaccgcattctgggaagagggcttcggcgaactattcgaaaaggcgaagcagaacaacaataatcgtaagacatcgaacggtgatgatagtttattcttctccaacttttcactgcttgggaccccagtgctcaaggacatcaacttcaagattgagcgaggccagttgctggcagtagccgggtccacaggggctgggaagacctcactactgatggtgatcatgggcgagctcgagccatccgagggtaagattaagcacagcggccggattagcttttgcagccaattctcctggattatgccgggaaccataaaggaaaatatcatcttcggggtgtcctatgacgagtaccggtataggagcgtaattaaggcatgccaactggaagaagatatatctaaattcgccgagaaagacaatatagtgctaggcgaggggggtataactttatccggtggtcaaagagctcggatctccctggctagagccgtttataaagatgccgacctttacctgctcgattctccctttggttatctcgatgtactgacagagaaagagatcttcgagtcttgcgtgtgtaagctgatggccaataagacccgtatcctggtgacatcaaagatggagcacctgaagaaagcagacaaaatccttatcctgcacgaaggctcatcgtacttttacggaacattctcggaacttcagaacctgcagcccgatttttccagcaagctgatgggctgcgactccttcgaccaattttcagctgaaaggcgcaactccatcctgactgaaacattgcatagatttagcctggagggagacgcaccagttagctggaccgaaacaaagaaacaatcgtttaagcaaactggcgagtttggcgagaaacgaaagaattccatcctcaatccaatcaacagtatcagaaagttctcgattgttcagaagacacccttacagatgaacgggatagaggaagattcagatgagccactagaacgaaggctttccttggtcccagacagtgaacaaggagaagctatcctgcctaggatcagcgtcatctctacgggaccaaccctacaggctaggcgcagacagtccgtgctcaacctaatgacccatagtgtgaatcagggccaaaacatccataggaaaaccaccgcttccactcgtaaggttagcttggctccccaggcgaatctgaccgaactggatatctacagtaggagattgtcgcaagaaactggattggagatcagtgaggagattaatgaggaggatctgaaagaatgtttttttgatgatatggaaagcattcctgctgtgacaacctggaacacctatctccggtacataacagttcataaaagtctaattttcgtgctgatatggtgcctggtaattttcctggccgaagtggctgcttctctggtcgtcctgtggctcctgggcaacaccccactacaggataaggggaattccacccatagtagaaataattcttatgctgtcatcattacatctacatctagctattatgtcttttacatttacgtgggcgtggctgacacattgctggcaatggggtttttcagggggctccctctagtccacacactgattaccgtctcgaaaattttacaccacaaaatgctgcactccgtgctccaggcccctatgagtacactgaatacactgaaagccggtgggattctgaaccgattctctaaagacatagcaatactggacgatttgttgccgctaaccattttcgattttatacagttattactaatcgtcattggtgcaatcgccgtcgtggcggttttgcagccctacatctttgtcgctactgtaccggtcattgtggcttttataatgctgcgagcttatttcttgcagacctctcaacagcttaagcagcttgagtctgagggcaggtctccgattttcacacacttggtgacctcgctcaaggggctttggaccttacgggccttcggcaggcagccttatttcgaaaccctgttccacaaggcccttaatcttcacacggcgaactggttcctctatttaagtaccctccggtggttccaaatgagaattgagatgatattcgttatcttttttatagccgtgacgttcattagcatccttaccacgggcgaaggtgaaggacgagtcggcataattctgactttagccatgaacataatgtccaccttgcaatgggctgtgaatagcagcatcgacgtggattccttgatgcggtcggtgagtagagtctttaaattcattgatatgccgacagaggggaaacccacaaagtctaccaaaccctataaaaacgggcagctgtcaaaggtgatgatcatcgagaatagtcacgtaaaaaaggatgacatctggccctcaggaggacaaatgaccgtgaaagatctgaccgccaagtataccgagggggggaatgccattctggagaatatctcctttagcattagccctggccagcgggttggtctcctgggccgaaccggatccggcaaatctaccctcctgtctgcctttctgcggctgcttaacacagaaggagaaatccaaatcgatggagtctcgtgggacagcataactcttcaacagtggaggaaggcctttggcgtgatcccccagaaagtcttcatattctcgggaacgttcagaaagaatcttgacccgtacgaacagtggtcagatcaagagatttggaaggtggccgatgaggtggggttgcgcagcgtgatcgagcaattcccaggcaagctggacttcgtcctggtggacggaggctgcgtgctgtcacacgggcataagcagctcatgtgcctggcccgcagtgtgcttagtaaagccaaaatccttctcctcgacgagcctagcgcccacctggaccctgtgacataccagattatccgacgcacccttaaacaggcctttgcagattgcactgtgatactgtgtgaacaccggatcgaggccatgttagaatgtcagcaatttcttgtcattgaagaaaacaaggtgcgacagtatgacagcattcagaaacttctcaatgagaggagcttgtttcgccaggccatcagtccttcggaccgtgtgaaactttttccacatagaaactccagtaaatgcaagtctaagcctcagatcgctgcattgaaagaagagaccgaagaagaggtccaagacacacgttta

SEQ ID NO: 10214 - DNA, 4440 bp, synthetic construct
  misc_feature 1..4440: note = source = /note="Description of Artificial Sequence: Synthetic coding sequence"
  source 1..4440: mol_type = other DNA
atgcaacgcagccctctggaaaaggcttcggtggtgtccaaactgtttttctcatggactcgcccaatactgcggaaaggctatcgccagagactcgaactgtccgatatctaccaaatcccaagcgtggattcagcggacaacctcagcgaaaagctcgagcgggagtgggatagggagttggcttcgaagaaaaatccgaagctgatcaatgccttgcggcggtgcttcttctggcgtttcatgttttacggaatcttcctgtatctgggggaggtgaccaaggccgttcaacccttgttgttgggccggatcatcgcgtcgtacgacccagataacaaggaagagaggtccatcgccatctatctggggattggactttgtctgctgttcatcgtccgcaccctgttgctccaccccgccatttttgggctgcatcacatcggtatgcaaatgcggatcgcgatgttctccctgatctacaaaaagactctgaagctgtcctcgcgggtgctcgacaaaatctcgattggacaattggtgtccctgctttcgaacaatctcaataagttcgatgagggcctcgctctggcccactttgtctggattgcgccgcttcaggtggcactcttgatgggactgatctgggagctgttgcaggcatctgccttctgcgggctcgggttcctgatcgtcttggcattgttccaggctggcctgggacggatgatgatgaagtaccgcgaccagagagctggtaaaatctccgaaagactcgtcatcactagcgaaatgattgagaacatccagagcgtgaaggcatactgctgggaagaagcaatggaaaagatgatagagaacctcagacaaacggaactgaagctcacccgcaaagccgcttatgtcaggtactttaactcaagcgccttcttcttctcgggttttttcgtggtgttcctgtcggtgctcccgtacgccctgatcaaggggattatccttcgaaagatcttcacgaccatcagcttctgcatcgtgctgcggatggccgtcaccagacagtttccttgggccgtgcagacttggtacgactctctgggagccattaacaaaatccaggacttcctccaaaagcaagaatacaagaccctcgagtacaacctcaccacgactgaggtggtcatggaaaacgtcacggcattctgggaagagggattcggagaactttttgaaaaagccaaacagaacaataacaacaggaaaacctcgaatggagacgattcactgttcttttcgaactttagcctgctcggtactccggtgttgaaagatatcaacttcaaaatcgaacgcggtcaactgcttgcagtcgctggaagcaccggagcaggcaaaacctcgctgcttatggtgatcatgggtgaactcgaaccgtccgaaggaaagattaagcattccggccggatctccttttgctctcaattctcgtggattatgccgggaactatcaaggaaaacattatcttcggggttagctacgacgagtacaggtacagaagcgtcattaaggcctgccagctggaggaggacatctccaagttcgcagaaaaggacaacattgttcttggtgaggggggcatcaccttgagcggaggacagagagcccggatctcactggcgcgggctgtgtacaaggatgcagacctctacctcttggactcgccattcgggtaccttgatgtgttgactgagaaagagatttttgagtcatgtgtctgcaagctcatggctaataagacgcgcatcctggtgacttcgaaaatggagcatcttaagaaggccgacaaaatcctgattctgcatgaaggctcctcctacttctacggtactttttcggaactgcagaatctgcagccggatttctcatcaaaactgatggggtgcgatagcttcgaccagttttcggcggaaagacgcaactcaattcttaccgagactctccaccgcttcagccttgagggagatgcacccgtgtcgtggactgaaaccaaaaagcagtcattcaagcagaccggagagtttggggagaagcgcaagaactcgattctgaatccgatcaattccattcggaagttctccatcgtgcaaaaaacgccgctccagatgaacggcatcgaagaagatagcgatgaaccgctggaacggcggttgtccctcgttccagactccgagcaaggtgaggcaattctgcctcgcatctcggtgatctccactggacctacgctgcaggctcgccgccggcagtccgtcctgaacctgatgactcactcggtcaatcagggacagaacatccaccgaaaaaccactgctagcacccgcaaggtcagcctggcgcctcaagccaatctcactgaactggatatctatagccgccgccttagccaagaaaccgggctcgagatttccgaggaaatcaatgaggaagatctcaaggaatgctttttcgatgacatggagtcaatcccagccgtgactacctggaatacttatctcagatacatcaccgtgcataagtcactcatcttcgtgttgatctggtgcctggtgatcttcctcgctgaggtcgccgccagcctcgtggtcctgtggctcctgggcaacactccgctccaggacaagggtaacagcactcactcgagaaacaattcctacgccgtgattatcacttcgaccagctcatactatgtgttttacatctacgtcggcgtggcggacactttgttggcgatgggattcttccgcggactgccactggtgcacactctcatcactgtgtcgaagatcctgcatcacaaaatgctccactccgttcttcaagcaccgatgtcaactctgaatactctgaaggcgggaggcatcctgaacaggttctcaaaggacatcgcaattctggacgacttgctgccgctcactatattcgacttcatccagcttcttttgattgtgatcggagcgatcgcggtggttgccgtgcttcaaccctacatcttcgtggcaacggtgccggtcatcgtcgcgtttatcatgctccgggcgtacttcctccagacttcgcaacagctgaagcagctggaatcggagggacggtccccaatctttacgcatctggtcacttctctgaagggactgtggacgctgcgggctttcgggcggcagccgtacttcgaaaccctgttccataaggctctgaatctgcacactgccaactggttcctctacctctcgaccctccgctggttccagatgagaattgaaatgatttttgtgatcttcttcatcgctgtcaccttcatctcgatcttgactaccggagaaggagagggtcgcgtgggaatcatacttactctcgccatgaacattatgagcaccctgcagtgggctgtgaactcatccatcgacgtggattcgctgatgaggtccgtctctcgcgtctttaagtttatcgacatgccgactgaaggtaagccaactaagtcaaccaaaccgtacaaaaatggccaactgtccaaagtgatgatcatagagaactcccacgtgaagaaagacgatatctggccgagcggcgggcagatgactgtgaaagatctgactgccaaatacaccgaaggaggcaatgccatcttggaaaacatctcgttcagcatctcaccgggacaaagagtgggactcctggggcggactggctcgggaaagtccacgctgctctcggcattcctgcgactgttgaataccgaaggtgagatccaaatcgatggcgtgtcttgggactcaatcaccttgcaacagtggcggaaggcgtttggcgtgattccacagaaggtgttcatcttctcgggaacttttaggaagaacctggacccctacgaacagtggtctgatcaggagatctggaaggtggcggacgaagtgggcctccgatctgtgatcgaacagtttcctggtaagctcgacttcgtgcttgttgacggtggatgtgtgctgtcgcacggtcacaagcaactgatgtgcctcgccaggtctgttctgagcaaggcaaagatcctcctgctcgacgaaccgtcggctcacctggaccctgtcacgtatcagatcatccgccggaccctgaaacaggcgttcgccgattgcaccgtgatcctgtgcgagcataggatcgaagcgatgctggagtgtcagcagttccttgtcatcgaggagaacaaggtgagacaatacgactcgatccaaaagctgctcaacgagaggtcactgtttagacaggcgatctccccttcggatcgcgtgaaactctttccgcacaggaactcgtcgaagtgtaagagcaaaccacagatcgcagcgctcaaggaagaaactgaggaagaagtgcaggatacccgcttg

SEQ ID NO: 10215 - DNA, 4440 bp, synthetic construct
  misc_feature 1..4440: note = source = /note="Description of Artificial Sequence: Synthetic coding sequence"
  source 1..4440: mol_type = other DNA
atgcagcgctcgcctttggagaaggcatccgttgtgagcaaactgtttttctcatggacccggccgatcctgcgtaagggatacaggcaacgactggaactcagcgacatttaccaaatcccttcggtcgatagcgcagataacctctccgaaaagctcgaaagagaatgggacagagaactggcatcaaagaagaaccctaaacttatcaacgcacttcgaagatgttttttctggagatttatgttttacggtattttcctgtacctgggagaagtgaccaaggctgtccaacctctgcttctcggaaggataattgcctcctacgatcctgataacaaggaagaacgcagcattgcaatttacctgggaatcggactgtgtctgttgtttatcgtgcgcactcttcttctccacccagccatattcggactgcaccatatcgggatgcaaatgcgaattgctatgttttccctgatatacaagaaaactcttaagctcagctccagagtcctcgataagatatcaataggtcaactggtgtcactgctctcgaataatctgaacaagttcgatgagggtcttgccctggctcattttgtctggattgcaccactccaagtcgcacttctgatgggacttatttgggaactgcttcaggcctctgccttctgtgggcttgggtttctcatcgtgctggcactttttcaagccggactcgggaggatgatgatgaagtaccgggatcaacgcgcagggaagatctcggaacgactggtgattacttcggagatgatcgagaatattcagagcgtgaaggcctattgctgggaagaagctatggagaagatgatcgaaaatcttcgtcagaccgagctgaagctcaccagaaaagcagcatacgtccgctactttaacagctccgcgttcttctttagtggattctttgtggtgtttctttcagtgctcccgtatgctctgattaagggcattattctgcggaagatcttcactaccatcagcttctgcattgtcctcagaatggcagtgaccagacagtttccctgggctgtgcagacctggtacgactcgctgggcgcaatcaataagatccaggacttccttcagaagcaagagtacaagaccctggaatacaacctgaccaccactgaagtggtcatggaaaacgtgacggcattttgggaagaaggattcggggaactttttgagaaagcaaaacagaacaataacaacagaaagacctccaatggtgatgattcactgttcttctcgaacttttcccttcttggtactccagtgctcaaggacatcaatttcaagattgaacggggacaactcctcgcggtggcagggtcaaccggagccggtaaaacttccctgctgatggtcatcatgggtgaacttgaaccctccgagggcaagatcaaacattccggccgcatttcgttttgttcacagttctcgtggatcatgcccggcaccattaaagagaatatcatattcggagtctcgtatgacgaatatcggtacagatcggtcatcaaggcctgtcagcttgaagaagatatttcgaagttcgccgaaaaggacaatatagtgctgggtgagggagggattactctttctggaggacagagggcccgcatatcgctggcaagagcagtgtacaaagacgcggacctgtatctgctggattccccatttgggtaccttgatgtgcttaccgaaaaggagatttttgaatcctgcgtgtgtaagctgatggcgaataagactcgtattttggtgacctccaaaatggaacatcttaagaaggccgataagatacttatcttgcacgaaggttcgagctacttctacggaaccttttcagaacttcaaaatctgcagcctgatttctcatctaagctgatgggatgcgattcctttgatcagttctcggcagagaggagaaactcgatacttaccgaaaccttgcaccgcttctcgcttgaaggtgacgcacccgtgtcttggactgaaactaagaaacagtcttttaagcagaccggagagttcggagaaaaacggaagaattccatcctgaacccaattaactcgattcgcaagtttagcatagtccaaaagaccccactgcagatgaatggaatcgaagaggatagcgatgaacctcttgaaaggcgactttcactggtgccggactccgaacagggagaagcaattcttcctcgcattagcgtgatttcgactggtcctactctgcaggcacgccgcaggcagtcggtccttaaccttatgacgcatagcgtgaaccaaggacagaatattcatagaaagaccaccgcatcaacccggaaagtgtcgcttgcacctcaggcaaacttgaccgaactggatatctactcacggagactttcccaagagactggtctggagatttccgaagagatcaacgaagaagatctgaaagagtgcttctttgacgacatggaatccatccctgcggtcactacctggaacacctacctgcggtacatcaccgtgcacaaaagccttatctttgtgctcatttggtgtctggtgatttttcttgcagaggtggcggcctctcttgtcgtgctgtggctcctgggcaacactcccctccaggataagggtaactccactcattctcgtaacaattcgtacgcagtgatcataacctcgacctccagttactacgtgttctatatctacgtcggagtggcagataccctgctggcgatgggtttctttcgtggacttcccctcgtgcatacccttatcaccgtgtcgaagatcctccaccataagatgctgcatagcgtgttgcaggcccccatgagcaccttgaacaccctcaaggcaggtggcatcttgaaccggttttcgaaggatatagcaattcttgatgatctgcttccactgactattttcgatttcatccagcttctccttattgtgattggagccatcgcagtggtggcagtgcttcagccttacatctttgtggcaacggtgcctgtgattgtggcgtttatcatgctcagagcgtacttcctccaaacctcgcagcagctgaaacaactggagtctgagggccgaagccctatctttacgcatctggtgacctccttgaaggggctgtggactcttcgcgcctttggtagacagccttactttgaaaccctttttcataaggcactcaaccttcatactgcaaactggtttctgtacctttccacgctgcgctggtttcaaatgcgcattgaaatgattttcgtgattttcttcattgcagtgacgttcattagcatccttactaccggtgagggtgaaggcagagtcggcataatcttgactctggcaatgaatatcatgtcaacgcttcaatgggcagtgaacagctctatcgatgtcgactcactgatgaggtccgtgagccgggtgttcaaattcatcgacatgcccaccgaggggaaacctaccaagagcactaagccttacaaaaacggacagttgagcaaagtgatgataatcgagaattcccacgtgaagaaggatgacatttggccatcaggaggacaaatgactgtgaaggatcttaccgcaaagtacactgaaggcgggaacgcgatactggaaaacatctcattttcgattagccccggacaacgcgtgggactgctcggtagaaccggcagcggcaagtcaactcttctctcagcattcttgagactgcttaatactgaaggggagatccagattgatggagtctcctgggactcgatcacgctgcaacagtggagaaaggcatttggagtgataccccagaaagtgtttatcttctcgggcacttttagaaagaacttggacccttacgaacagtggtcggaccaggaaatttggaaggtggcagatgaagtgggactcagatcagtgatcgaacaatttccaggtaaactggactttgtgcttgtggatggaggatgcgtcctgtcacatggccacaagcaactcatgtgtttggctcgatcggtgctctccaaggctaagatcctgcttcttgatgaaccttcagcacacctggatcctgttacctatcagattatcagacgcactttgaagcaagcattcgccgactgcaccgtgatcctctgtgaacaccgcatcgaggctatgctggaatgccaacagtttctggtgattgaggagaataaggtgagacaatacgactcgatccaaaagctcctcaacgagagaagtttgtttaggcaggccatctccccgagcgatcgcgtcaagctctttccacatagaaatagcagcaagtgcaagtcgaagcctcaaattgcagccctcaaagaagagacggaagaagaggtccaagacactagactg

SEQ ID NO: 10216 - DNA, 4440 bp, synthetic construct
  misc_feature 1..4440: note = source = /note="Description of Artificial Sequence: Synthetic coding sequence"
  source 1..4440: mol_type = other DNA
atgcagcgctcccctcttgagaaagcttcagtagtttccaagctgttcttcagctggactagaccaatcctcagaaaaggatataggcagagactggagctctcagacatctaccagatccctagcgtggatagcgcagacaacctgtcagaaaaactggaacgcgagtgggatcgcgagctggccagcaaaaagaacccgaagctgattaacgcactgagacggtgctttttctggaggtttatgttctacggaatcttcctatacttgggggaagtaacgaaagctgtacagccactcctgcttgggcggattatcgcctcgtacgatcctgacaataaagaggagcgatcaattgcaatctacctagggatcggactgtgcctgctgtttatcgttcgtaccctcctgctgcaccccgcaatttttggcctgcatcatattgggatgcaaatgagaatcgccatgttctcattgatttacaagaagacattaaaactcagctcacgggtgctcgataaaattagcatcgggcagctggtaagcttgcttagcaataatctcaacaagttcgatgaagggctggctctcgcacattttgtgtggatcgccccactgcaagtagctctcctgatggggctcatctgggaactccttcaggcatcagctttctgtggccttggattcctcattgtgttggccctgtttcaagctgggttgggtaggatgatgatgaagtatcgcgaccagcgtgctggaaagatcagtgagcgcctggtcattaccagcgagatgatagaaaacatccagtccgtaaaagcttattgctgggaggaggcgatggaaaaaatgatcgagaacttacggcagacagaactcaaactgaccaggaaagccgcgtacgtgagatatttcaatagtagcgcattcttcttttccggcttcttcgtcgttttcttgagtgtgctcccctacgcactcataaaaggtatcattctccgaaaaatttttacaaccatatccttctgtatagtgctgagaatggcagtgacgcgccagtttccctgggccgtgcagacttggtacgacagcctgggcgccatcaacaaaatccaggactttcttcaaaaacaagagtataaaacactggaatacaatttaacaaccaccgaagtcgttatggagaacgtgacggccttctgggaggagggtttcggggaattgtttgagaaagctaagcagaataataataacagaaaaacctctaatggcgacgattccttgttcttttcgaatttttctctgctggggacgcctgtgctcaaggatatcaacttcaagatcgaaaggggtcagctcctagcagtggcagggagcacaggcgctggtaagacctcactgctgatggtgatcatgggggaactagagccttccgagggcaagataaaacattcgggacgcatcagcttctgtagtcaattcagctggatcatgcccggaaccatcaaagaaaacatcatcttcggagtgtcttacgacgaataccgctaccggtctgtgattaaggcgtgccagctagaagaggatatttcaaagttcgctgagaaggataatattgtgttgggcgaaggcgggatcaccttgtctggcgggcaacgcgctagaatttccctcgccagggcagtctataaggatgctgacctctacctcctggactccccttttggctacttggacgttcttaccgaaaaggaaatattcgagagctgcgtgtgtaagctcatggccaacaagacacggatattggtgacatccaaaatggagcacctcaagaaggcggacaagattctgattctgcacgaaggatcctcatatttttacgggacattcagcgagctacagaacctccagcccgacttcagtagcaagctcatggggtgtgactcattcgatcagttctccgccgaaaggagaaactccattttgacagaaacattgcatcgcttttccctggagggggacgctccagtttcctggacagagactaaaaaacagtcatttaaacagactggagagttcggcgaaaaacgcaaaaactctatactcaacccaatcaattctatcaggaagtttagtatcgtgcagaagacccctctccagatgaatggaatagaggaagactcggatgagccacttgaacgccgtctgtccttggttcctgattccgagcagggcgaggccatcctcccccgcattagcgtaatatctaccgggcccactttgcaagcccggcgccgccaaagtgtcttgaatctgatgacacattctgtgaatcaaggccagaatattcacagaaaaacaaccgcctccacccgcaaagtcagcctggctccccaagcaaacctcacggagttagacatctattcacggcgattgtctcaggagactggtctcgagatatcagaggaaatcaatgaggaggatctgaaagagtgctttttcgacgacatggagtcaattcccgcagtgacgacgtggaatacatatttacgatacatcaccgtccataagtccctcattttcgtgctgatctggtgtctggtgatatttttggccgaagtagcagcttctcttgtagtgctctggttattagggaacacgcctttgcaggacaagggaaatagcacccactcccgtaacaactcctatgccgtcataattacctccacctctagctattatgtcttctacatatatgtcggcgtagctgatactctcctggcaatgggctttttcagaggacttcctttggtacataccttgattacagttagcaaaattttacatcataaaatgctgcatagcgttctgcaggcccccatgtccaccttgaatacactgaaggcgggcgggatcctcaacagatttagcaaggacatcgctattctggatgatctgctcccgctcactatcttcgacttcattcagttgctgctgatcgttattggcgcaatcgctgtggtggcagtcttgcagccatacatttttgtcgctaccgtgcccgtaattgtggccttcatcatgctgcgggcatatttccttcaaacttcccagcagctgaagcaactcgaaagtgaggggcggtcgccgatatttactcacttagtcacttcattgaagggcctttggacccttcgcgcattcggccgacagccctattttgagaccctgtttcataaggccctcaacttgcatacagcgaattggtttctgtacctcagcacgttacggtggtttcaaatgcgaattgagatgattttcgtaattttcttcatcgccgtgaccttcataagtatactgacaacaggcgagggggagggtagagtggggataattttaactctggccatgaacataatgtccacactgcagtgggcagtcaattcttcaatcgatgttgattccctgatgcgttccgttagcagagtgttcaaattcatcgacatgcccacagaggggaagccgacaaagagcactaaaccctacaagaacggccagctgtccaaggtgatgatcatcgaaaactcccatgtgaagaaagacgacatttggcccagcggcggacagatgacagtcaaggatctcaccgctaagtacacggaaggaggtaatgccattctggagaacatatcattttccataagcccaggtcagagggtcgggctgctcgggaggaccggtagtggtaagagcaccctcctaagcgcttttctgaggctccttaacactgaaggcgaaatccaaatcgacggcgtttcctgggactctatcacccttcaacaatggcgaaaggcgttcggggtgattcctcagaaggtgtttatcttcagcggcacctttcgtaagaacctcgatccatatgagcaatggagcgatcaggaaatttggaaggtagctgatgaagtggggctcaggagcgtaatagagcagttccccggcaagctggacttcgttctggtcgatggcgggtgcgtattgtcacacggacataagcagctgatgtgtctggcccgatccgtgttaagcaaggctaaaatcttgcttctcgatgaacccagtgcccatctggacccagttacttatcagatcatccgtagaaccctaaagcaggcttttgccgattgtaccgttattttatgcgaacatcgaattgaggctatgctcgaatgccaacagttcctcgtcatcgaggaaaataaagtgcggcagtatgacagcatccaaaaactccttaacgagaggtctctgttcagacaggccatatccccctctgaccgggttaagctgttcccccaccgcaacagctctaagtgcaagtcaaaaccccagattgctgccctcaaggaggagaccgaggaagaggttcaggacacccgcttg

SEQ ID NO: 10217 - DNA, 1101 bp, synthetic construct
  misc_feature 1..1101: note = source = /note="Description of Artificial Sequence: Synthetic coding sequence"
  source 1..1101: mol_type = other DNA
atgataaggaattggctcacaatctttattctttttcctttaaagctagtcgaaaaatgcgagtcaagcgtctcactgacagtgccacccgtcgtcaaactagagaatggatcaagcaccaacgtatccctcacgttacgtccaccattgaatgccaccctcgtcatcacattcgagattaccttcagatctaagaacattactatactcgaactacctgatgaagtcgtggtccctcccggcgtcaccaatagtagtttccaggttactagtcagaatgtgggccagctcactgtgtatctccacgggaatcattcaaatcagaccggaccccgcattagattcctcgtgattcgctcgtccgccatatcaattatcaaccaggtgataggatggatatattttgtcgcctggtcaattagcttctacccgcaggtgatcatgaattggcggagaaagtcggtcatcgggctgagtttcgactttgtcgctctgaacctgactggttttgttgcttattctgttttcaatataggacttctgtgggtgccctacattaaggagcagttcctgctgaaatatccaaatggggtaaatcctgtcaattccaatgatgtgtttttctccctccatgcagtggtgctgacgctgattataattgtccagtgctgtctgtacgagagaggggggcaaagggtctcgtggcccgcaattgggtttctggtgttagcatggctttttgcctttgtgacaatgattgtggccgctgtaggcgtaaccacatggttgcagtttttgttctgcttctcttatattaagcttgctgtgactttagtgaagtacttccctcaggcctatatgaatttctactacaagagcaccgagggatggagcataggaaacgtcctcctggacttcaccggtggaagcttctcacttttacagatgttcttacagtcgtataacaacgatcagtggactctgattttcggtgacccgacaaaatttgggctgggagtcttctcaatcgtgttcgatgtcgtgttcttcatccagcacttctgcctgtaccggaagaggccaggctatgaccagctaaat

SEQ ID NO: 10218 - DNA, 1101 bp, synthetic construct
  misc_feature 1..1101: note = source = /note="Description of Artificial Sequence: Synthetic coding sequence"
  source 1..1101: mol_type = other DNA
atgatccgcaattggctcaccatattcattctcttcccgcttaagctcgtcgaaaagtgcgaatcctcggtgagcctgaccgtccctccggtggtgaagctggagaatggttccagcaccaacgtgtcgctgacgctgcggccaccacttaatgcaacgctcgtgatcactttcgagataacctttcgctccaagaatatcactattcttgaacttcccgatgaagtcgtggttccacctggtgtcactaattcctcgtttcaggtgacctcccaaaacgtgggccaactcactgtctaccttcacgggaaccattcgaaccaaacgggtccacgcattcgttttctggtcattaggagctcggcaatctcaatcatcaaccaagtgattggctggatctacttcgtggcatggtccatatcgttttaccctcaagtaatcatgaactggcgcaggaagtccgtcataggactgtcttttgattttgtggccctgaacctcactggatttgtcgcctacagcgtgttcaatattgggcttctttgggtgccatacatcaaagagcagtttctgctgaagtaccccaacggagtcaacccggtcaattcaaacgatgtctttttctccctgcatgcagtggtgcttactcttatcattattgtgcagtgttgtctgtacgaacgcggtggacagagagtttcctggccggcaattggattcctcgtcctggcatggctgtttgccttcgtcaccatgattgtcgcggctgtgggagtgactacctggctccagtttcttttttgtttttcctacataaagctcgccgtgactctggtgaagtacttccctcaggcttacatgaacttctactacaaatcgactgaaggttggtcgatagggaacgtgctcctcgatttcaccggcggatcgttttcgctgcttcaaatgtttctgcaaagctacaacaacgatcagtggaccctcattttcggagatcccaccaagtttggactgggagtgttttccatcgtgtttgatgtggtgttcttcattcaacatttttgtctttaccgtaaaaggccaggttacgatcaactgaac

SEQ ID NO: 10219 - DNA, 1101 bp, synthetic construct
  misc_feature 1..1101: note = source = /note="Description of Artificial Sequence: Synthetic coding sequence"
  source 1..1101: mol_type = other DNA
atgattagaaattggcttactatctttatactgttccccttgaaactcgtagagaaatgtgagtcttctgtgtcactcacagttccacctgtggtcaagctggaaaatggttcttccaccaatgtgagcttgacccttagaccacctttgaacgctactctggtcattacttttgaaatcactttccgtagcaagaacatcacaattctcgagttgccagatgaggtcgtggtgcccccaggagtaaccaattctagcttccaggtgacatcacagaacgtcggccagcttactgtgtacctgcatggcaaccactccaaccaaacaggcccacgtattagattcctcgttatccgcagctccgctatcagtatcatcaaccaagtcatcggatggatttacttcgtcgcctggtctattagtttttaccctcaagttatcatgaattggaggcgtaaatctgtgatcggactgtctttcgatttcgtggccttgaacctgacaggtttcgtcgcttacagtgtcttcaacatcggacttctgtgggtgccatatatcaaggagcagttcctgcttaaataccccaacggtgtcaatcccgtgaattccaacgatgtctttttctctctgcacgctgtcgtacttactctcatcattatcgtccagtgctgtctgtatgagcgcggcggacaaagagtctcctggcctgctataggctttctggtactcgcttggctgtttgccttcgtgactatgatcgtggccgctgtgggcgtaactacttggttgcagttcctcttctgtttctcatacatcaagctcgctgtgaccctcgtgaagtacttcccccaggcatatatgaacttctattacaaatctaccgagggctggtccatcggcaatgtcctcctggacttcaccggtggttctttttcattgctgcaaatgttcctccagagctacaacaatgaccagtggacattgatattcggagaccccaccaagttcggactgggtgtgttcagcatcgtgttcgatgttgtatttttcatccagcatttctgcctctacagaaagagacccggctacgatcaattgaac

SEQ ID NO: 10220 - DNA, 1101 bp, synthetic construct
  misc_feature 1..1101: note = source = /note="Description of Artificial Sequence: Synthetic coding sequence"
  source 1..1101: mol_type = other DNA
atgatcaggaactggctcaccatcttcattctgttcccgctgaagctggtggagaaatgtgagagctccgtgtcgctcactgtgcccccagtcgtgaagttggaaaatggatcgagcaccaatgtctcattgactttgcgcccacctctcaacgcaaccctcgttatcacttttgaaattaccttcagatcgaaaaacatcactatcctggaacttccggacgaggttgtggtgccaccgggagtcactaattcctcgttccaggtgacttcacaaaatgtggggcaactcactgtctacttgcacggaaaccactcaaaccaaactggacccagaatcagattcctggtcatcagatcgtcggccatcagcatcattaatcaagtgatcgggtggatttacttcgtggcttggtcaatcagcttctacccgcaggtgatcatgaactggcgccgcaagtccgtgattggcttgtcattcgacttcgtggcactcaacttgactggattcgtggcctactccgtgttcaatatcggactgttgtgggtgccgtacatcaaggaacagttcctgctgaaataccccaacggggtaaatcctgtcaattcgaatgatgtgtttttcagcctgcacgcggtggtgctgaccctgattatcatcgtgcaatgctgcctgtacgagcgcggcggacagcgggtgtcatggccagcgatcggctttctggtcctggcgtggctgttcgcgttcgtgaccatgatcgtcgccgcggtgggagtgaccacctggctgcagttcctgttctgcttttcgtacattaaactggctgtcacgctggtgaaatacttcccacaggcgtacatgaatttctactacaagagcactgaagggtggtccatcggtaacgtcctgctcgattttactgggggttcatttagcctgcttcaaatgttcctgcagagctacaacaatgaccaatggacgctcatttttggggacccgaccaaattcggactgggcgtgttctcgatcgtgttcgacgtggtgttcttcatccagcacttctgcctctaccgcaaacggcctggatacgaccagctcaac

SEQ ID NO: 10221 - DNA, 1101 bp, synthetic construct
  misc_feature 1..1101: note = source = /note="Description of Artificial Sequence: Synthetic coding sequence"
  source 1..1101: mol_type = other DNA
atgattcgcaattggttgaccatctttatactcttccctctgaaactggtcgagaagtgtgagtcgagcgtttcgcttactgtccctccggtcgttaagctcgagaatggctcctccactaacgtgtcgcttactctgaggccaccactgaacgcaactcttgtgattacttttgaaatcacgtttaggtcaaagaacatcactattctcgaactgcctgacgaagtggtcgtcccacccggggtcactaactcttctttccaagtcacttcacaaaacgttgggcagcttacggtctatcttcacggtaatcatagcaatcagactggaccgagaattcggtttctggtgattaggtcctcagcgatttcgattatcaatcaagttattggatggatctactttgtcgcatggtccattagcttttacccacaagtgatcatgaactggcggaggaagtcagtcattggccttagctttgattttgtggcacttaacctgaccggattcgtggcatactcagtgttcaacattggattgctgtgggtgccatacattaaggaacagttcctcctgaagtaccccaacggggtgaaccccgtgaactccaacgatgttttcttttctctgcacgccgtcgtgctcacccttatcataattgtccagtgctgtctttacgaaagagggggacaaagagtgtcctggcctgcgattggcttcctcgtgcttgcctggctgttcgcattcgtgaccatgatcgtggccgcggtgggtgtcacgacgtggttgcagtttctcttttgtttctcgtacataaagttggcagtgactctggtgaaatactttcctcaagcctacatgaacttttactacaaaagcaccgaaggttggtccatcggaaatgtgcttctcgactttaccggaggttccttttcactgctccagatgtttctgcaatcatacaacaacgaccagtggactcttatcttcggtgatcccaccaagtttggtcttggagtcttttccatcgttttcgacgtggtgtttttcatccaacatttctgtctttacagaaagcgcccaggatacgatcaactgaat

SEQ ID NO: 10222 - DNA, 1101 bp, synthetic construct
  misc_feature 1..1101: note = source = /note="Description of Artificial Sequence: Synthetic coding sequence"
  source 1..1101: mol_type = other DNA
atgatccgaaattggctgaccatctttatcctgttccctctgaaactggtggaaaaatgcgaatcttctgtttcactgaccgttccccctgtggtaaaactcgaaaacgggagttccactaacgtgtcccttacattgcggccccccttgaatgccaccctcgtgatcacgtttgagattaccttcaggagcaagaacataaccatcctggagctgccggacgaggtggtggttcctcccggtgtcacaaacagttctttccaggtcaccagccagaatgtcggccagctgaccgtgtatctccatggcaatcattccaaccagacagggccacggatccggtttctggtgatacgctcatccgccatcagcatcataaaccaggtcatcggatggatttactttgtcgcttggtcaatctcattttacccccaggtgatcatgaactggagacgcaagtccgtaataggtctgagttttgatttcgttgctctgaatctcaccgggttcgtggcctatagcgtgtttaatattggtctcctttgggttccttacattaaagagcaattcttgcttaaataccctaacggtgtgaatcctgtcaattctaacgacgtttttttcagtctgcacgctgtcgtcttgaccctgattatcatcgtgcagtgttgcctctatgaacgggggggccagagagtgagctggccggccatagggtttctcgtgctcgcctggcttttcgccttcgtcacaatgatcgtggcggctgtgggcgtcactacatggcttcagtttctgttttgcttctcctatatcaaattggctgtcaccttggttaaatacttcccccaagcctacatgaatttctactataagtctacggagggctggagtattgggaatgtgctgttggacttcactgggggcagcttctctttgctgcagatgtttcttcaatcttacaacaacgaccaatggacgctcatctttggggaccctactaaattcggtctgggcgtgttcagtatcgtcttcgacgtggtttttttcatccagcatttctgcttgtatcggaaacgccctggctacgatcagcttaat

SEQ ID NO: 10223 - DNA, 1101 bp, synthetic construct
  misc_feature 1..1101: note = source = /note="Description of Artificial Sequence: Synthetic coding sequence"
  source 1..1101: mol_type = other DNA
atgatacggaattggctcacgatttttattttgtttccactcaagctggttgagaagtgtgagtctagtgtttcattgacagttccacctgtggtaaagctggaaaatgggtcatctaccaatgtgagtctgaccctgcgtcctccgctgaacgccactttggtgattactttcgagattacgttccgctccaagaatattactattctggagctccctgatgaggtggttgtgccccccggagtgacaaactcaagttttcaggtgacaagccagaacgtgggccagttaaccgtatatctgcacggcaaccacagtaatcagacaggtccacgcatccggttccttgtgataaggtcttccgcaatttcaatcatcaaccaagtcatcggctggatttacttcgtggcttggagtatatctttttatccacaggtaattatgaattggcggcgcaaaagcgttataggcctctcatttgacttcgtagctctgaacctgaccgggttcgtcgcctacagcgtgttcaacatcggtctgctgtgggtgccgtatatcaaggagcaatttctccttaagtatccgaacggggttaatccggtaaattcgaacgatgtcttctttagcctccacgccgttgtcttaactctgatcatcatcgtccagtgttgtctgtacgagaggggggggcagagagtgtcctggccagcaattggttttttggtgctcgcgtggctcttcgctttcgtgacaatgatagtggccgcagtaggcgtcactacatggctccagtttctcttctgcttctcctacatcaagctggccgtcaccctcgtaaaatacttcccccaggcttatatgaatttttattataaaagtaccgaagggtggtcaatcgggaatgttttgcttgatttcacaggaggctctttctcactcctgcagatgttcctccaaagctacaacaacgaccaatggactttgattttcggagacccgactaaattcggattgggggtgttctccatagtgtttgacgtcgtcttttttattcagcacttctgtctgtatcgaaagagacccggctacgatcagctgaat

SEQ ID NO: 10224 - DNA, 1101 bp, synthetic construct
  misc_feature 1..1101: note = source = /note="Description of Artificial Sequence: Synthetic coding sequence"
  source 1..1101: mol_type = other DNA
atgatccgcaattggctgactatcttcatcctgtttcctctcaaactcgtcgaaaagtgtgaatcgagcgtgtccctgacggtgccaccagtggtgaagctggagaatggatcgagcaccaatgtcagcctcaccctccggccgccgctgaacgcaactctggtgatcacgtttgagattacctttcgatccaagaacattaccatcctggaactccccgatgaagtggttgtcccgcccggagtcactaatagctcgtttcaggtcacttcccagaatgtgggtcagctgactgtctacttgcatggcaaccactcaaaccaaaccggtccgcgcattaggtttctcgtgatcagatcgtccgcgatttccatcatcaaccaggtcataggctggatatactttgtggcttggtccatcagcttctacccacaagtcattatgaattggagacggaagtcggttatcggactgtcgtttgacttcgtggccctgaacctgaccggattcgtggcgtacagcgtgttcaatatcggacttctgtgggtgccgtacattaaggagcagttcctgctgaagtacccaaacggtgtgaacccggtgaactcgaacgacgttttcttctccctgcatgccgtggtgctgacgttgatcattatcgtgcaatgttgcctgtacgagcgcgggggacagagagtctcatggcccgctatcggctttctggtcctcgcttggctgtttgcattcgtcacgatgatcgtggcagccgtgggcgtgacgacttggctgcagttcctcttctgcttctcatacatcaagttggccgtgacccttgtcaagtacttcccgcaagcatatatgaacttttactacaagtcaactgagggatggtcgatcggaaacgttctcctggacttcaccggtggatctttctccctgctgcagatgttcctgcaatcatacaacaacgaccaatggaccctgatctttggcgatcctactaagttcggactcggagtgttcagcatcgtgtttgacgtggtgtttttcatccagcacttttgcctgtaccgcaaacgccccggatacgatcagctcaac

SEQ ID NO: 10225 - DNA, 1101 bp, synthetic construct
  misc_feature 1..1101: note = source = /note="Description of Artificial Sequence: Synthetic coding sequence"
  source 1..1101: mol_type = other DNA
atgatcagaaattggttgaccatctttatccttttccctctcaaactggtggagaagtgcgaatccagcgtgtcccttactgtgccaccagttgtcaagctcgagaacggatcgtcgaccaatgtgtcgctcacgctgcggccgccgctgaacgccactctcgtgatcactttcgaaatcactttccgcagcaagaacatcactatcctggaactgccggatgaggtcgtggtgccgccaggagtgacgaactcgtccttccaagtgaccagccagaatgtgggccagttgactgtgtacctccacggtaatcactcgaaccagaccggaccgagaatcagattcttggtcattcgctcctccgctatctcaatcatcaaccaagtgatcggctggatctacttcgtggcctggtcgatctccttttacccccaagtcatcatgaattggagacggaaatcggtgatcggactgtcctttgacttcgtggcgcttaacctgaccggatttgtcgcctacagcgtgttcaatatcggactgctctgggtcccttacatcaaggaacagttcctgctgaaatacccaaacggagtgaaccccgtgaattccaacgacgtgtttttctccctgcacgcggtggtgctcactctgatcataattgtgcagtgttgcctgtacgagcgcggcggacagcgtgtgtcatggcccgctattggatttctcgtgctggcctggcttttcgccttcgttacgatgatcgtggcagctgtgggggtgaccacctggctccaattcctgttctgcttctcatacatcaagctggcggtgaccctggtcaaatacttcccacaagcctacatgaacttttactataagtccactgaaggatggtccatcggcaacgtcttgctggacttcaccggaggatcattctcgcttctgcagatgttcttgcaatcctacaacaatgatcagtggaccttgattttcggcgatcccactaagttcgggctgggcgtcttttcgattgtgtttgatgtcgtgtttttcatccagcacttctgcctgtaccggaaaagaccggggtacgaccaactcaac

SEQ ID NO: 10226 - DNA, 1101 bp, synthetic construct
  misc_feature 1..1101: note = source = /note="Description of Artificial Sequence: Synthetic coding sequence"
  source 1..1101: mol_type = other DNA
atgattcgcaactggctgaccatcttcatcctctttccgctgaagctcgtggaaaagtgcgagtcatcggtgtccctcactgtgccgccggtggttaagctcgaaaacggatcatccactaacgtttccctgaccctgcggccgcccctgaacgccaccctggtgatcacttttgagatcactttcagaagtaagaacatcacgatcctcgagctccccgatgaggtggtggtccccccaggagtgactaatagctcgtttcaggtcacctcacaaaacgtcggccaattgactgtctatctgcatggaaaccacagcaatcagactggaccgcgcatccgcttcctggtgatccgctcatcggcaattagcatcattaaccaagtgattggttggatctattttgttgcctggagcatttcgttctacccacaggtgatcatgaactggcggcgcaagagcgtgatcggcctgtcgttcgattttgtggcactgaatctcaccggttttgtcgcgtattcggtgttcaatattggactgctgtgggtgccttacataaaagagcagttccttctcaagtacccgaatggcgtgaatccggtgaactcaaacgacgtgttcttttccctgcacgccgtcgtgcttactctgatcatcatcgtgcaatgttgtttgtacgaacggggtggccagcgggtgtcttggccggcaatcggattcctggtgctcgcgtggctgtttgcctttgtcactatgattgtggccgcagtcggagtgactacgtggctgcagttcctgttctgcttcagctacatcaaactggccgtcactcttgtcaagtacttcccgcaggcgtacatgaatttctactacaaatcgacggagggctggtcgattggcaacgtgctgctggatttcactgggggctcgttctccctgctgcagatgttcttgcagtcctacaataatgatcaatggaccctcatcttcggagatcctaccaagttcgggttgggagtgttcagcatcgtgtttgacgtcgtgttctttatccagcacttctgcttgtatagaaagcgccctgggtacgatcagttgaac

SEQ ID NO: 10227 - DNA, 1101 bp, synthetic construct
  misc_feature 1..1101: note = source = /note="Description of Artificial Sequence: Synthetic coding sequence"
  source 1..1101: mol_type = other DNA
atgattcgcaactggttgacgatcttcattctgtttcccttgaagctggtcgaaaagtgtgaaagttctgtgtctcttaccgtaccgcccgtggtgaagttagagaacggctcatctacaaacgtgtcgctcactctgcgccctcctcttaatgctacacttgtcattaccttcgagatcacattccgaagtaaaaatataacaatcctggagctgccagacgaggtcgtggtgcccccgggcgtaactaactcatcatttcaggtgaccagccagaatgtcggccagctgacagtgtatctgcatggaaatcatagtaaccagaccggccctcggatcagatttctcgtgattcgatcctctgcaatcagtatcattaatcaggtgataggctggatctatttcgttgcctggtccatatctttttaccctcaggtgatcatgaactggcggagaaagtccgtaatcggactcagctttgacttcgttgctctgaacctaacaggattcgtcgcatacagtgtgtttaatataggcttgctgtgggtaccctatatcaaagagcagttccttctgaaatatcccaacggcgtgaatccagtgaattccaatgacgtttttttctctttgcatgcggtggtgctcaccttgataataatagttcagtgttgtctgtacgagagaggcggccagcgagtgagttggcctgccatagggtttctcgtactagcatggctttttgcctttgtgaccatgatcgtcgctgcagtcggggtgacaacatggctgcagttcttgttttgcttcagctatataaaattggctgtcacgctcgtaaagtattttccccaagcttatatgaacttttactacaagagtactgagggatggtctatcggcaatgtactgttggatttcactggaggaagtttcagccttctgcaaatgttcctacagtcatacaataacgaccagtggactctgatatttggagatccgactaaatttggtctgggtgtgttttctattgtctttgacgttgtgttcttcatccagcatttttgcctctatagaaagcggccaggatacgaccagctgaac

SEQ ID NO: 10228 - DNA, 1101 bp, synthetic construct
  misc_feature 1..1101: note = source = /note="Description of Artificial Sequence: Synthetic coding sequence"
  source 1..1101: mol_type = other DNA
atgatccgcaactggctgacaatctttatactgttccccctaaagctcgtcgaaaagtgtgaatcctcagtcagcctaaccgttccccccgtggtgaaacttgaaaatggcagctccaccaacgttagcttaactctcaggcctccactaaatgctaccctggtgattacctttgaaatcacctttcggagcaagaacatcactatattggaactgccagacgaggtggtagtaccacccggcgttactaatagcagtttccaagtgacctcacaaaacgtcggccagctaactgtgtacttacacggcaatcacagtaatcagacaggccctaggatcaggttcctggtgataaggtcctccgccatatctattataaatcaagtaattggctggatatattttgtagcatggagtatatccttttatcctcaggttatcatgaactggcggcgcaaatctgtcatcggcttatccttcgatttcgttgcccttaacttaacaggatttgtagcttactctgtgtttaacattgggctattatgggtgccttatattaaagagcaatttctgttgaaatatccaaatggggtgaacccagtgaactctaacgacgtgttcttttctctgcacgccgtggtgctcactctcataattatagtgcagtgctgtctgtacgagaggggaggccagcgggtgtcctggcctgctatcggctttctggtgctggcctggctattcgcatttgtgacaatgatagttgctgcagtcggcgtgacaacatggttacagtttttattttgcttcagttacatcaagctagctgtgacacttgtaaaatacttcccacaagcttatatgaacttctactacaagagcaccgaaggatggagcataggcaatgtcctcctggactttaccggtggctcttttagcctacttcagatgttcttgcagtcttacaataacgaccagtggaccctcatatttggcgatccaacaaaatttggcctgggcgtgttctctattgtctttgatgtggtcttttttatacagcacttctgcctataccgcaagaggcccgggtatgatcagttaaac

SEQ ID NO: 10229 - DNA, 1101 bp, synthetic construct
  misc_feature 1..1101: note = source = /note="Description of Artificial Sequence: Synthetic coding sequence"
  source 1..1101: mol_type = other DNA
atgataagaaattggcttacaatttttatattatttcctttaaagttagttgaaaaatgtgaatcaagtgtatcacttacggttcctccagtagttaaattagaaaacggatctagtacaaacgtttcattaactttgagacctccattaaatgcaactcttgtaataacatttgaaattacttttagatcgaaaaatataacaattttagaattaccagatgaagtagttgttccacctggagttactaattcatcttttcaagttacttctcaaaacgttggtcaattaacagtttatttacatggaaatcatagtaatcaaactggaccaagaattagatttttagttattaggagctcagcaatttcaattattaatcaggtgattggatggatttattttgttgcatggtctatttcattttatccacaagttattatgaattggagaagaaaatctgttattggactttcattcgatttcgttgcattaaatttaacaggattcgtagcatattcagtttttaatattggtttattatgggttccatatattaaggaacaatttcttttgaaatatccaaatggagttaatccagttaattctaacgatgtttttttttcacttcatgcagttgttcttacattaataattattgtacaatgttgtttatacgaacgtggtgggcaaagagtcagttggccagctattggatttttagttttagcttggctttttgcttttgttactatgatagttgcagcagttggtgtaactacttggttacaatttttattctgtttttcctatataaagttggcagttacacttgtaaagtattttccacaagcatatatgaatttttattacaaatcaacagaaggatggagtattggtaatgttttattagattttacaggtggaagtttttcattattacaaatgttccttcaatcttataataatgatcaatggactttgatttttggtgatcctactaaattcgggcttggagtttttagtattgttttcgatgtagttttttttattcaacatttctgtttatacagaaagaggccaggatatgatcaacttaac

SEQ ID NO: 10230 - DNA, 1101 bp, synthetic construct
  misc_feature 1..1101: note = source = /note="Description of Artificial Sequence: Synthetic coding sequence"
  source 1..1101: mol_type = other DNA
atgatcagaaattggctcaccatctttattctgttccctcttaaactcgttgagaagtgcgaatcctcggtgtcgcttactgtccctccggtggtgaaacttgagaatggttccagcactaacgtcagccttacgctccgtcctcctctgaatgccactctcgtcattaccttcgagatcacttttcggtcaaagaacatcacgattctggagctgcccgacgaagtcgtggtgcctcccggagtaaccaactcatcgttccaggtcacctcgcaaaatgtgggacagttgactgtgtacctgcacgggaatcattccaaccagaccggtcctcgcattaggtttctggtgattagaagcagcgcgatcagtatcattaaccaagtgattggatggatttacttcgtcgcatggtcgatatcattctacccgcaagtgattatgaactggaggcgaaaatccgtgattggacttagctttgattttgtggcacttaacttgacgggatttgtggcttactcagttttcaatataggtctgctctgggtcccttacattaaggagcaattcctgctgaaataccctaacggagtcaaccctgtcaacagcaatgatgtgttctttagccttcatgccgtcgttctcacccttatcataatcgtccagtgttgtttgtacgaacggggcggacagcgagtgtcttggccagctattggatttcttgtgctcgcgtggctgtttgcatttgtgaccatgatagtcgcggcggttggagtgactacctggcttcaatttctcttttgcttttcttacattaagctggcagttaccctcgtgaagtacttccctcaggcctacatgaatttctactacaaaagcaccgaggggtggtcgattggtaatgttttgctcgattttaccgggggctcgttttcgctcctgcaaatgttccttcaaagctacaataacgatcagtggacccttatctttggtgacccaactaagtttggactcggtgtgtttagcattgtgtttgacgtggtgttctttattcagcatttttgcctgtacagaaagcgccctggctacgaccagttgaat

SEQ ID NO: 10231 - DNA, 1101 bp, synthetic construct
  misc_feature 1..1101: note = source = /note="Description of Artificial Sequence: Synthetic coding sequence"
  source 1..1101: mol_type = other DNA
atgatcaggaactggctgaccattttcattctgttccccctgaagctggtggaaaaatgcgagtcgtctgtgtccctcacggttccgccggtggtgaaactcgaaaacggaagctcgaccaatgtgagcctgaccctgcggccgcctctgaacgctacgttggtcatcactttcgaaataaccttccggtctaagaacatcactatcctcgagctgccagacgaagtggtggttccaccgggtgtgaccaactcgtcctttcaagtgaccagccagaacgtcggccagctgactgtctacctgcacggaaatcattcaaaccaaactggcccgaggatcaggttcctcgtcatccggtcgtcagcgatttccatcatcaaccaggtgatcgggtggatctatttcgtggcctggtcgatcagcttctatcctcaggtcataatgaattggaggcggaaaagcgtcatcggactgtccttcgatttcgtggcgctgaaccttaccggatttgtggcttacagcgtctttaacatcggactgctttgggtgccatacatcaaggaacagttcctgctcaagtacccaaatggcgtcaatcccgtcaacagcaatgacgtgttcttctcgctgcacgccgtcgtgctcacgctgatcatcatcgtgcaatgctgcctgtacgaacgcggaggtcaacgcgttagctggccggccatcggattcctggtgcttgcatggctcttcgcgtttgtgaccatgattgtggccgcagtcggagtgaccacttggctgcaattcctgttttgcttctcatacattaagctcgctgtcactctcgtcaagtacttcccgcaggcgtacatgaatttctactacaagtctaccgagggatggtcgatcggtaacgttttgctcgactttaccggaggatctttcagcttgctccagatgttcctccaatcctacaacaatgatcagtggactcttatcttcggtgatcctactaagttcgggcttggggtgtttagcattgtgtttgacgtggtgttcttcatccagcatttctgcctttaccggaaacggccggggtacgatcagctgaat

SEQ ID NO: 10232 - DNA, 1101 bp, synthetic construct
  misc_feature 1..1101: note = source = /note="Description of Artificial Sequence: Synthetic coding sequence"
  source 1..1101: mol_type = other DNA
atgatccgaaattggcttaccattttcattctttttccattgaaactggtggaaaagtgcgaatcatccgtgtcccttactgtccctcctgtggtgaagctcgagaatggctcttccactaatgtgtccctgaccctcagaccacctttgaatgcaaccttggtcatcacttttgaaattactttccggtcgaaaaacataactattcttgaactgccagatgaggtcgttgtgccaccgggcgtgaccaactcgtcatttcaagttaccagccagaacgtgggacaacttacggtgtacctgcatggaaatcactcaaatcaaactggaccccggataagattcctggtcattcggtcgtcggcaattagcatcattaaccaagtcatcggttggatttacttcgtggcatggagcatttcattctaccctcaagtcattatgaattggcgacggaaaagcgtgattggactgtcctttgatttcgtggcactcaaccttactggttttgtcgcgtactcggtgttcaatatcggacttctgtgggtcccatacatcaaggagcagttccttctgaagtacccgaatggtgtgaacccagtcaatagcaacgatgtctttttctcactccatgcggtggtcctgaccctcataatcattgtgcaatgctgtctttacgaacgaggcggacagcgagtctcctggcccgcaattggttttcttgtgctcgcatggctgtttgcatttgtgaccatgatagtggctgccgtgggagtgaccacctggctccaatttctcttctgttttagctacataaagctggcagtgacgcttgtgaagtattttccccaagcctacatgaacttttactacaagtccacggaaggttggagcattggaaacgtcttgctggactttactgggggatcgttttcgcttcttcaaatgtttctccaatcctacaacaacgatcagtggactctgatttttggtgatcccaccaagttcggtcttggcgtgttctcgatcgtgtttgacgtggtgttctttattcagcacttctgtctgtatcggaagcggcccggatatgatcaactgaac

SEQ ID NO: 10233 - DNA, 1101 bp, synthetic construct
  misc_feature 1..1101: note = source = /note="Description of Artificial Sequence: Synthetic coding sequence"
  source 1..1101: mol_type = other DNA
atgattcgaaactggctcactatctttattctcttcccgctgaaactggtggagaagtgcgaatcgtcagtgagcctgacggtgcccccagtggtcaagctggaaaatggatcgtccactaacgtgagcctgacccttcgtcccccgcttaacgcaaccttggtcataactttcgaaataaccttcagatccaagaatatcactattctggaactgcctgatgaagtggtggtgcctcctggagtgacgaactcgtcattccaagtgacttcacagaacgtgggtcagttgactgtgtaccttcacggtaaccactcaaatcaaacggggcctcggatacgatttctcgtgatccgatcgtcagcaatttccatcattaaccaggttatcggttggatttactttgtcgcttggtccatttctttttaccctcaagtgattatgaattggaggaggaaaagcgtgatcgggctgtcctttgattttgtcgcgcttaacctgacgggatttgtggcttacagcgtgtttaacattggacttctttgggtcccatatatcaaggagcagttccttctcaagtacccaaacggcgttaatccagtgaactcgaatgacgttttctttagcctccatgccgtcgtcttgacgctgatcattattgtgcagtgttgtctgtatgaacggggcggacaaagagtgtcgtggccggcaattggtttcctcgtgcttgcatggctctttgcctttgtcaccatgattgttgcagcagtgggtgtaactacctggttgcaatttctgttttgctttagctacataaagctggcggtaaccctggtgaagtactttcctcaagcctacatgaacttttactacaaatcgaccgagggctggtccatcggaaacgtactcctcgatttcaccggaggatcgttctctcttctgcagatgtttcttcagtcgtacaataacgatcaatggaccttgatcttcggcgacccaactaagtttgggcttggggttttctccatcgtgtttgatgtagtgtttttcatacagcatttctgtctgtaccgcaaaagacccggatacgaccaacttaat

SEQ ID NO: 10234 - DNA, 1101 bp, synthetic construct
  misc_feature 1..1101: note = source = /note="Description of Artificial Sequence: Synthetic coding sequence"
  source 1..1101: mol_type = other DNA
atgatccggaattggctcacaatctttatactgtttcccttaaaactggtggaaaaatgcgaatcctccgtttccctgacagtgccccctgtggttaagcttgaaaatgggtcttctactaatgtatccttaactctgcgacccccactaaatgccacactcgtcattactttcgaaattacttttcgatccaaaaacatcacaattctcgaacttcccgatgaagtggtcgtacctcctggggtgactaactcttcatttcaggtgacatctcagaatgtagggcagctaactgtgtatctacatggaaatcactcgaatcagacagggccacggatccggttcttggtgattcgatcctctgcaatcagtataataaaccaggttattggatggatctactttgttgcctggtcaatatcattctatcctcaggttatcatgaactggagaagaaaatccgtaatagggctctcctttgatttcgttgccctgaatctcactgggttcgtggcctattctgtctttaacatcggattgctctgggttccatacatcaaagagcagttcctccttaagtatcccaacggagtcaaccccgtgaattctaacgatgttttcttctctctccatgctgtcgtactcactttaatcatcatcgtgcagtgctgtttatatgaaagaggggggcagcgggtttcttggccagcgattggatttcttgtactcgcttggctttttgctttcgtgactatgattgttgctgcagttggagtgacaacatggcttcagtttcttttctgcttcagttacattaaactcgccgtgactcttgtgaaatatttccctcaggcatatatgaacttctattataaatctacagaaggatggtctatcggaaatgtcctgcttgatttcacggggggatctttctccctgctacagatgttcctccagagttataacaacgatcagtggacactcatattcggagaccctacaaagttcggactcggagtgttttccatcgtgttcgatgttgtgttctttatccaacacttttgtctctacagaaagcggcctgggtacgaccagcttaac

SEQ ID NO: 10235 - DNA, 1101 bp, synthetic construct
  misc_feature 1..1101: note = source = /note="Description of Artificial Sequence: Synthetic coding sequence"
  source 1..1101: mol_type = other DNA
atgattagaaattggctgaccatttttattctattccctttgaagcttgtggaaaagtgcgagtcttccgtttcactcacggtgcctcctgtcgttaagctggagaacgggtctagcaccaatgtttccttgaccctgcggcctcccctaaatgccacactggtgatcacctttgagataacattccgctcgaaaaacatcacaatcctggagttaccagatgaggtggtggtaccccctggtgtgacgaacagctcttttcaggtgacctcccagaatgtcggacagctcaccgtctacctacatgggaatcatagtaatcagactggtcccaggatccggttcctggtgatcagaagcagcgctattagtatcatcaatcaagtgatcgggtggatctactttgtggcatggtccatctcattctacccccaggttatcatgaactggcggcggaagagcgtgattggactgagcttcgatttcgttgcattgaacctcactggattcgtcgcatacagtgttttcaacataggtctgctctgggttccttacattaaggaacagttccttctcaagtatcccaatggagtgaatcccgtgaatagtaatgacgtgttcttttccttgcatgcagtggtcttaaccctaataatcatcgtgcagtgctgtctttacgagagggggggacagagagtctcttggccagctataggcttcctggtgctggcgtggttattcgcgttcgtcaccatgatagtagcagctgtaggggtaactacctggctgcaattcctattctgcttctcatacattaagctcgcagtgacattggtgaagtacttcccccaggcttatatgaacttttattataaatccaccgaagggtggagcatcggcaatgtgctgctcgatttcacaggcggaagtttctccctgttgcagatgttcttacagagctacaataatgatcaatggacactgatttttggggacccaactaaatttggcctcggggtcttttctatcgtttttgacgtcgtgtttttcatccagcacttttgcctgtatcggaagcgaccagggtacgaccagcttaat

SEQ ID NO: 10236 - DNA, 1101 bp, synthetic construct
  misc_feature 1..1101: note = source = /note="Description of Artificial Sequence: Synthetic coding sequence"
  source 1..1101: mol_type = other DNA
atgatacggaactggctgaccatcttcatcttgtttcccctgaagctcgtggaaaagtgcgagagctcagtgtccttgaccgtcccgccggtggtgaaactggaaaacggatcgtcaactaatgtctccctgactctccgcccgccgttgaacgccacgctggtgatcacgttcgaaatcacctttcgttcaaagaatatcaccattctggaattgcctgatgaggtggtggtcccaccgggcgtgaccaattcctcattccaggtgacctcgcagaacgtcggtcaattgactgtttatctgcacggcaaccattcgaatcagacgggcccgcgaatcagattcctcgtcatcaggagctcagccatctcaataatcaatcaagtgatcggctggatctactttgtggcatggtctatcagcttctacccgcaagtgattatgaactggcggcggaagtcggtgattgggctgtccttcgacttcgtggcgctgaacctcaccggcttcgtagcctactcggtgtttaacattggactgctctgggtcccctacatcaaagagcagttcctgttgaagtacccaaatggagtgaaccctgtgaattccaatgatgtgttcttcagcttgcatgcggttgtactgaccctcattatcatcgtgcaatgctgtctctacgagaggggaggacagagagtctcttggcctgccatcggattcctggtcctggcatggctgtttgccttcgtcactatgatagtcgccgctgtcggagtgactacttggctccaatttctgttctgcttctcatacatcaagctggcggttactcttgtgaagtacttcccgcaagcatacatgaacttttactataagtccaccgagggatggtcaattggaaacgtcctcctcgacttcacggggggatcattcagcctcttgcagatgttcctgcagtcctacaacaacgaccagtggactctcatctttggcgaccctacgaaattcgggctgggggtgtttagtatcgtgtttgatgtggtgttcttcatccagcacttctgcctgtaccgcaaaagaccaggatacgaccagctcaac

SEQ ID NO: 10237 - DNA, 1101 bp, synthetic construct
  misc_feature 1..1101: note = source = /note="Description of Artificial Sequence: Synthetic coding sequence"
  source 1..1101: mol_type = other DNA
atgatccgcaactggctgactatcttcatcctttttccgctcaagctcgtcgagaagtgcgagtcaagcgtgtccttgacggtccctcctgtcgtcaagctcgagaacggtagctccaccaacgtgtcgctgactcttagaccaccgctcaatgccacgctggtcattactttcgaaatcactttcaggagtaagaacatcaccatcctggaattgccggacgaagtggtggtgccgccaggggtgactaattcttcgttccaggtgacctcacaaaatgtcggtcagcttaccgtgtacctgcatggtaatcactcgaaccagaccggcccaagaatacggttccttgtgatccggtcctcggcaatctcgatcatcaaccaagtgattggatggatctacttcgtggcctggtcaatttcgttttacccgcaagtcattatgaactggcggcggaagtccgtgatcgggttgtccttcgacttcgtcgcgctgaatctgaccgggtttgtggcttactcggtgttcaatatcggactgctctgggtgccctacattaaggagcagtttctcctgaaatatccgaacggagtcaaccctgtgaactccaatgacgtgttcttcagcctccacgcagtcgtgctgactcttatcatcatcgtgcaatgctgtctttacgagcggggcggacaacgggtgtcgtggcctgctatcgggttcctggtgctggcctggttgttcgcctttgtcacgatgatcgtcgctgccgtcggggtgaccacgtggctccagttcctgttctgcttttcatacatcaaactcgcggtgaccctggtgaaatacttcccccaggcctacatgaacttctactacaagtccacggaaggatggtcaatcggaaacgtgctgctggacttcaccggaggatctttttcactgctgcagatgttcctccagtcgtacaataacgaccagtggactctgatatttggggacccaaccaagttcggactgggcgtcttctcgatcgtgtttgatgtggtgttcttcatccagcacttctgtctgtatcggaagcggccaggatacgatcagctgaac

SEQ ID NO: 10238 - DNA, 1101 bp, synthetic construct
  misc_feature 1..1101: note = source = /note="Description of Artificial Sequence: Synthetic coding sequence"
  source 1..1101: mol_type = other DNA
atgatccgcaactggctcactatattcatcttgtttccactcaagctggtggaaaagtgcgaatcctccgtgtcactcaccgtcccgcctgtggtgaaactcgaaaatggatcttccaccaatgtctcactcaccctcagaccgccgcttaacgcgactctggttataactttcgagatcactttccgctcaaagaacatcaccatcctcgagctgccggacgaggtggtggtaccccctggcgtaaccaattccagtttccaggtgacctcgcaaaacgtcggtcaacttactgtctacctccatgggaaccacagcaaccagacgggaccacgcatccggttcctggtgatcaggtcgtccgccatatcgattatcaaccaggttattggctggatctacttcgtggcgtggtccatctcattctatccacaggtgattatgaactggcgtcgcaagagtgtgatcggtctgtccttcgatttcgtggcattgaacctgactggcttcgtggcctactcggtattcaatatcgggctcttgtgggttccttacatcaaggagcaatttctcctgaaatatcccaatggagtgaatccagtcaactcgaacgacgtctttttctcgctgcacgcggtcgtcctgactctcatcattatcgtgcagtgctgcttgtacgaacgaggaggacagcgggtgtcgtggccggcaatcggatttctggtcctggcgtggcttttcgcctttgtgaccatgattgtggctgccgtcggtgtcactacgtggctgcaattcctgttctgtttcagctatatcaagctggctgtgaccttggtcaaatactttccgcaggcttacatgaacttttactacaagagcaccgaaggatggtctatcggcaatgtgctgctggactttaccggaggcagcttttcgctgttgcaaatgttcctccagtcatacaacaatgaccaatggacgctcatcttcggggatccgaccaaattcggactgggtgttttctcaattgtgttcgacgtggtgtttttcattcagcatttttgcctgtacagaaagcggccggggtacgatcagctgaac

SEQ ID NO: 10239 - DNA, 1101 bp, synthetic construct
  misc_feature 1..1101: note = source = /note="Description of Artificial Sequence: Synthetic coding sequence"
  source 1..1101: mol_type = other DNA
atgatccggaattggctgaccattttcatcctgtttcccttaaagttggttgagaagtgtgaatccagcgtgagtctaaccgtcccacctgtggtgaagctggaaaacggaagctccaccaatgtcagtctcactctcagaccgcctctgaatgccaccctcgtgattaccttcgagatcaccttcaggtccaagaacataaccatcctggaactgccggacgaggttgttgttccaccaggggtgacaaactcgagctttcaggtcacctcccagaacgtgggacagcttaccgtgtatctgcatggaaaccatagcaatcagacggggccgcggattcggtttttggtgattcgtagcagtgctatcagcataattaaccaggtaatcggctggatttactttgtcgcatggagcatcagcttctacccgcaggttatcatgaactggaggcgcaaatctgtgatagggctgagttttgactttgttgccctgaaccttacaggattcgtcgcatacagcgtgttcaatatcggcctgctctgggtgccctacatcaaagagcagttcttgctaaagtacccaaacggggtgaatcctgttaacagtaacgacgtgtttttttcattgcacgccgtggttttgactctaataatcatcgtccagtgttgcctctacgagcggggtggccagcgggtgtcttggcctgcgattggctttcttgtgctggcgtggctgttcgcattcgtgactatgatcgtcgccgcggttggggtgacaacctggctgcagtttctcttttgtttcagttatattaagctggccgtgaccctggtcaagtactttccacaagcatacatgaacttttactacaaatctacagaaggttggagtattgggaatgtgctactggacttcacaggggggtccttttcactgctgcagatgtttctacagtcctacaacaacgaccaatggaccctgatcttcggcgatccaaccaagtttggactcggggtgttcagcatagtttttgatgtggtgttcttcattcagcacttctgcctgtaccgaaaacgacctggatacgatcaactcaac

SEQ ID NO: 10240 - DNA, 1101 bp, synthetic construct
  misc_feature 1..1101: note = source = /note="Description of Artificial Sequence: Synthetic coding sequence"
  source 1..1101: mol_type = other DNA
atgattagaaattggctcacaatctttatcctgtttcctctgaaactcgtggaaaagtgtgagagcagtgtaagccttacagtaccccctgtggtgaaactcgagaatggatcctcaactaacgtgagcttaacccttcgcccaccactgaacgcgacccttgtaatcacatttgaaatcacgttccgcagtaagaatataactattctggagcttcccgatgaggtggtggtgccccccggcgtgaccaatagcagtttccaggttacgagccagaacgtgggccaattgactgtttacctgcacggaaatcactccaaccagacagggcccaggattcgattcctggtgattagatcctcagcaatctcgatcataaaccaggtcatcggatggatctatttcgtagcttggagtatttcgttttatccgcaggtaatcatgaactggaggcgcaagagtgtgatcggactgtcgtttgactttgtagcattaaatctaactgggtttgtggcatacagcgtttttaatatcggtttgctgtgggtgccttatatcaaagagcagttcctattgaaatatcctaatggtgttaatcctgtcaattcaaatgatgtgttctttagcctgcacgcagtcgtcctgactctgatcataatcgtccagtgctgtctgtacgagcgtggcggtcagagagtgtcctggcccgcaatcggattccttgtgctagcctggctgtttgccttcgtgactatgatcgttgcagctgttggagtgaccacttggctgcagttccttttctgcttttcatacataaaactggctgtaacactggtcaaatattttccacaagcctacatgaacttttactacaagtcaactgaaggttggtcaatcggaaatgttctgttggactttactggaggatcgttttccctactgcagatgtttcttcagtcatacaacaacgaccagtggaccctcatttttggggatccaacaaagtttgggttgggggtttttagcattgtgttcgatgtcgtcttcttcattcagcatttttgtctctacaggaagcgcccaggttatgaccaattgaat

SEQ ID NO: 10241 - DNA, 1101 bp, synthetic construct
  misc_feature 1..1101: note = source = /note="Description of Artificial Sequence: Synthetic coding sequence"
  source 1..1101: mol_type = other DNA
atgattagaaactggctcaccatcttcatcctcttccctctcaaattggtggagaagtgtgagtcatcggtgtcacttactgtcccgccggtcgtcaaactggagaatggaagctctaccaacgtctccctcaccctccgacccccgctgaatgcaaccttggtgatcacctttgagattacctttaggagcaaaaacatcaccatcctggaactgccggacgaagtggtggtgccacccggcgtcaccaactcatccttccaagtcacctcccagaacgtgggtcaactcaccgtgtacctgcacggcaatcatagtaaccagactggccctaggataaggttcctcgtgatccgctcatcggcaatctcgatcatcaaccaggtgatcggatggatctacttcgtggcgtggtcgatctcattctaccctcaggttatcatgaattggcgccgtaaaagcgtcataggacttagcttcgatttcgtggcccttaacctgaccggatttgtcgcttattccgtattcaacatcggactgctgtgggtgccgtacatcaaagaacagtttctgctgaagtacccaaacggtgtgaatccggtgaattccaatgacgtattcttctccctgcacgccgtagtgctgactttgattatcatcgtgcaatgctgcctttatgaaagaggagggcagcgcgtgtcatggcctgccatcgggttcctcgtcctcgcgtggcttttcgcctttgtgaccatgattgtcgccgcggtgggcgtgactacctggctgcagttcctgttctgcttctcttacatcaaactcgcagtgactcttgtgaaatacttcccacaagcctacatgaacttctactacaagagcacggagggctggtccatcgggaatgtgcttctggacttcactggaggtagcttcagcctgctgcaaatgttcctccagtcctataacaatgaccagtggaccctgatcttcggagatccgactaagtttggccttggcgtgttctcgatcgtgttcgatgtggtgtttttcattcagcacttctgcctgtatcggaagcggccaggatacgaccagctgaac

SEQ ID NO: 10242 - DNA, 1101 bp, synthetic construct
  misc_feature 1..1101: note = source = /note="Description of Artificial Sequence: Synthetic coding sequence"
  source 1..1101: mol_type = other DNA
atgattcgcaattggttaactatatttatcctctttcctctgaaacttgtagaaaagtgtgaatcgtccgtttccctgactgttcccccagtggtgaagttggagaacggatcatctactaacgtgtctctgacacttcgaccccccttgaacgctaccctcgttatcacatttgagattactttccgcagcaagaacattacaattttggagttaccagacgaagtagttgtcccccccggagtgaccaacagctctttccaggtgacaagccagaacgtcgggcaactgaccgtgtatctacacggcaatcactctaaccagacaggcccccgcatccggttcctcgttattcgatcctccgcgatcagcatcattaaccaggttataggatggatatactttgtggcgtggagtatcagtttctatccacaggtcatcatgaattggcgtcgcaaatctgtgataggcctgagcttcgatttcgtcgccttgaatttaactggcttcgtggcctattcagttttcaacatcggcctactgtgggtcccttatatcaaggagcagttcttgttaaagtatccaaatggcgtcaatccggtgaactccaacgacgtgtttttcagccttcacgccgtggtgctcacactaatcataatagtgcagtgttgtctttacgaacgaggggggcagagagtatcttggccagctatcggctttcttgtcttggcatggttgttcgcatttgtcactatgattgtagccgctgttggggttacgacatggctacagttcttgttctgtttctcatacattaagttggccgtcacactcgtgaaatacttcccccaagcctacatgaacttttactacaagtcgacagagggttggtccatcggcaacgtgctgttagactttaccggtggtagcttcagtctactccaaatgttcttgcagtcctacaacaacgaccagtggactctgattttcggggacccaacgaaatttggcctcggcgtgttctctatcgtgttcgatgtggtttttttcatccagcatttttgtctatatcgaaaacggcccggctacgatcaactgaac

SEQ ID NO: 10243 - DNA, 1101 bp, synthetic construct
  misc_feature 1..1101: note = source = /note="Description of Artificial Sequence: Synthetic coding sequence"
  source 1..1101: mol_type = other DNA
atgattagaaattggctcactattttcatactgttcccactgaagctcgttgaaaagtgtgagtctagcgtttcactcactgtcccaccagtggttaaactagagaatggatcctcaaccaacgtgagccttaccctgaggcctccgctcaatgcgacactggttatcacgttcgagataacgtttcgctccaagaatatcacaatactcgagttaccagacgaagtcgtggtgccgcccggagttactaattcctctttccaggtgacatcacaaaatgtcgggcagctaactgtatatctgcacggcaaccatagcaaccagactggtcctcggattagattcttggttatcaggagctcagctattagcataattaaccaggttattggttggatttactttgtggcttggtccatttctttctatcctcaagtgattatgaactggcgaaggaaaagcgtcatagggctcagctttgatttcgtggcgctgaatctgaccgggttcgttgcctatagtgtgttcaacatcggattattgtgggttccctatatcaaggaacagttcttacttaaatatcctaatggcgttaatcctgtcaacagtaatgatgtcttcttctccctccacgctgtggtgcttaccctgattataatcgtgcaatgttgcctgtacgagagggggggccaaagagtgtcctggcctgccatcgggttcttggtgttggcatggcttttcgccttcgtcaccatgattgtggccgctgtgggcgtgactacatggcttcagttcttgttttgctttagttacataaagctagctgtaactctggtgaagtatttcccacaggcctatatgaacttctactacaaatcaactgaggggtggagcatcgggaatgtgctactggactttacggggggcagtttctccctgctccagatgttcctgcagtcttacaataatgaccagtggaccctgatattcggggatcctacaaagtttgggcttggggttttcagcattgtcttcgacgttgtgtttttcatccaacacttttgtctgtacaggaaacgtccaggctacgaccagctgaac

SEQ ID NO: 10244 - DNA, 1101 bp, synthetic construct
  misc_feature 1..1101: note = source = /note="Description of Artificial Sequence: Synthetic coding sequence"
  source 1..1101: mol_type = other DNA
atgatccgcaattggctgaccatctttatcctgtttccactgaagctggttgagaaatgtgaaagttctgtctcactgaccgtcccgcccgttgttaaacttgagaatgggagcagcaccaacgtaagcctcaccctgaggcctccgctaaatgctactcttgtcattacattcgagatcacttttcgctccaagaatattaccatcctggaactgcctgacgaggtggtcgtcccgcccggggtcaccaattccagcttccaggtcactagccagaatgttggccagctgaccgtgtatctccatggaaaccacagcaaccagactggccctcgcatccgtttcctggtaatacgtagcagcgcgatatcaattataaatcaagttatcggctggatctacttcgtggcttggagcattagcttttatccgcaggtgattatgaactggcgacgcaagtctgttattggtctgagcttcgactttgtggcccttaaccttaccggttttgtcgcatattccgtgttcaacatcggcctgctgtgggttccgtatattaaggagcagttcctattaaaatatccgaatggtgtcaaccctgtgaatagcaatgatgtcttcttctctctgcacgcagtcgttctgacgcttattattatcgttcaatgttgcctgtatgagcgaggtggtcagcgggttagctggccggcgatcggctttttggtcctggcctggctgttcgcgtttgtgacgatgattgtggcggcggttggtgtgactacgtggctccagtttctgttctgtttcagctacatcaaactcgcggtaaccttagtcaaatattttcctcaggcatacatgaatttttactataaaagcaccgagggctggagcattggtaacgtgctgctggattttactgggggttcgttcagccttttgcagatgtttctgcagagctataataatgatcagtggaccctgatttttggagatccaactaagtttggtctgggcgtgttcagcattgtgtttgacgtcgttttttttatccagcatttttgcctctaccgcaagcgaccgggatacgatcagctgaat

SEQ ID NO: 10245 - DNA, 1101 bp, synthetic construct
  misc_feature 1..1101: note = source = /note="Description of Artificial Sequence: Synthetic coding sequence"
  source 1..1101: mol_type = other DNA
atgatccggaattggctgaccatcttcatcctttttcctcttaaactggttgagaagtgtgaaagctcagtgtccttgactgttccccccgtcgtgaagctcgagaacggatcgtcaaccaacgtgtctcttaccctccgacccccactgaacgcaactctggtgattaccttcgagattacgttcagaagcaaaaacatcactatactcgaactgccagatgaagtggtggtcccgccaggagtgactaacagctcgtttcaggtgacctcgcagaatgtcggtcaactgactgtctatctgcatggtaatcactctaaccaaactggtccgcgaattcgatttcttgtcattagatcgagcgctattagcattatcaaccaagtgatagggtggatttacttcgtggcatggtccatctcgttttacccgcaagttatcatgaattggcggagaaaaagcgtgatcgggctgtcatttgactttgtggcactgaatttgacgggcttcgtcgcgtactcagtgtttaacatcggccttctgtgggtgccttacattaaagagcagtttctcctcaagtaccctaatggagtcaacccagtgaattcaaacgatgtgtttttctcgcttcacgccgtcgtcctgaccctcatcatcatcgtgcaatgctgtctttatgaaaggggaggacaaagggtgtcgtggccagccattggcttcctggtcctcgcatggctgtttgcgtttgtcaccatgattgtcgccgcagtgggtgtgactacctggcttcaattcctgttttgtttttcgtacattaagttggcagtcactctcgtgaagtacttccctcaagcgtacatgaacttttactacaagtccactgagggatggagcattggaaatgtgctgcttgattttaccgggggctcgttctcccttctgcaaatgttcctccaatcctacaacaatgatcagtggaccctcattttcggtgatcctactaagtttggtttgggggtgttttcaatcgtgtttgacgtggtgttctttatacaacacttctgcttgtacaggaagaggccaggctacgatcaactgaac

SEQ ID NO: 10246 - DNA, 1101 bp, synthetic construct
  misc_feature 1..1101: note = source = /note="Description of Artificial Sequence: Synthetic coding sequence"
  source 1..1101: mol_type = other DNA
atgattagaaattggctgacaattttcatcctcttcccactaaagctggttgaaaaatgcgagagcagcgtcagcctgacagttcctcctgtggtgaagctcgaaaatgggtcttctacgaatgtgtcgctgacgctccggcctcccctcaacgctaccctcgtcataaccttcgagattacgttccggtctaagaacatcaccattctggaactacccgacgaagtggtagtccccccaggagtgactaacagtagctttcaagtcactagtcagaacgtcggtcagctgaccgtgtacctccacggcaaccacagcaaccagactggcccgaggatacggtttctcgtaatccgaagcagcgctatttctatcataaaccaggtcatcggctggatttatttcgtcgcctggagcatctccttttacccacaggtcataatgaactggcgccggaaatcagttataggtttatcattcgactttgtggcccttaacctgaccggcttcgtagcatactcggtattcaacatagggttgctgtgggtgccatatattaaagaacagtttctgttaaaataccctaacggggtgaatcctgtcaacagcaacgacgtgttctttagtcttcatgctgttgtactgacccttatcattatcgtacagtgttgcttatatgagcgtggagggcaacgtgtcagctggcccgctataggatttttagtcctcgcctggttgtttgccttcgtcaccatgatagtcgcagctgtcggtgtgacaacgtggctgcaattcttgttctgttttagctacatcaagttggccgtcaccctagtgaagtacttcccccaggcttatatgaatttttactacaaatcaactgaaggctggtctatcgggaatgtactgctggatttcaccggcggatccttttctctcttgcagatgttcttacagagttacaacaacgaccaatggacccttattttcggcgatccgactaagtttggactgggcgtgttttctatcgtgttcgacgtcgtctttttcattcagcatttttgcctatatagaaagcggccggggtatgatcagttaaac

SEQ ID NO: 10247 - DNA, 1101 bp, synthetic construct
  misc_feature 1..1101: note = source = /note="Description of Artificial Sequence: Synthetic coding sequence"
  source 1..1101: mol_type = other DNA
atgatccggaattggctcactattttcattcttttcccgctgaaactggtggagaaatgcgagtcatcggttagccttacggttccccccgtcgtaaagctggaaaacggatcctcgaccaacgtgtccctgacgttgcgtccgccgttgaacgccacattggtgatcacgttcgaaataacattccgctcgaagaatatcaccattctggagctgcccgatgaggtggttgtccctccgggcgttacaaactcatcctttcaggtgacctcccagaatgtcggacagctgaccgtctaccttcacggtaatcatagcaaccaaaccggtccgcgcattcgattcctggtgatccgtagctccgcaatatcgatcatcaaccaggtgattggctggatatacttcgtagcgtggtctattagcttctatccacaggtgatcatgaactggagacgtaagtcggtaattggcctctccttcgattttgtagctctaaatctgactggcttcgtggcctattcggtgttcaacattggcttgctgtgggtgccatacataaaggagcagttcttactgaaatacccgaatggcgtcaacccagtgaactcgaacgatgtgtttttttcgcttcatgccgtggttctgaccttgattattattgttcagtgctgcctatatgagcgcggcgggcaacgggtgagctggccagccatcggctttctggtcctggcctggttgttcgccttcgttaccatgattgtggccgccgtgggcgttaccacctggttgcagttcctgttctgcttctcgtacatcaagctcgccgtcaccctggtaaaatacttcccacaggcttacatgaacttttattataagagtacagaaggatggagcatcggcaacgttctgttggactttactggtggctcattctcgctgttgcagatgttccttcaaagttacaacaatgaccagtggaccttgatcttcggtgatccaaccaaatttggcctaggagtgttttccattgtcttcgacgttgtgtttttcatccagcacttctgcctgtaccgcaagcgaccgggatacgatcagctgaat

SEQ ID NO: 10248 - DNA, 1101 bp, synthetic construct
  misc_feature 1..1101: note = source = /note="Description of Artificial Sequence: Synthetic coding sequence"
  source 1..1101: mol_type = other DNA
atgatcaggaattggctcacgatattcatcctgttcccactaaagctcgtggagaaatgtgagtcgtctgtgtcactgactgtgcctcctgtcgtcaaactggagaatggctccagcacgaacgtcagcctgacacttagacctccattgaacgccactcttgtcatcactttcgagatcacattccgctccaaaaatataaccattctggaactgccggatgaggtggttgttcccccaggtgtgactaactctagttttcaggtaacatctcaaaacgtagggcagttgactgtgtacctgcatggtaatcatagcaaccagactgggcccagaattaggttcctcgtgatacgtagctcagccatctctatcatcaaccaggtgattggatggatctacttcgtggcgtggtctatctcattttatccacaagttatcatgaactggaggcgaaagagcgtcataggactgtcgttcgactttgtggccctgaatctgactgggtttgtggcttactctgtgtttaacatcgggctgttgtgggtaccttacatcaaggagcagtttcttcttaagtaccccaacggggtcaatcccgtgaacagtaatgatgtgttttttagtctccatgccgtcgttttaacattgatcatcatcgtccagtgctgtctatacgaacgaggcggccagagggtctcctggccagcaatcggcttcttagtgcttgcctggctctttgcgtttgtcaccatgatcgtggcggccgttggggttacaacatggcttcagtttctgttctgtttctcttacatcaagcttgcagtgacgctagtgaaatatttccctcaggcctatatgaatttttattacaaatcgactgaggggtggtccatcggaaacgttttgttagacttcaccggggggtctttctcccttctgcagatgtttctgcagtcatacaacaacgaccaatggaccctaatctttggcgatcccactaaatttggactgggggttttctccattgtcttcgatgtggttttctttattcagcacttctgtctgtatcgaaagcggcccgggtatgaccagcttaac

SEQ ID NO: 10249 - DNA, 1101 bp, synthetic construct
  misc_feature 1..1101: note = source = /note="Description of Artificial Sequence: Synthetic coding sequence"
  source 1..1101: mol_type = other DNA
atgatcaggaactggttgacaatctttatccttttccccctgaaactcgttgaaaaatgtgaaagcagtgtgtctctgactgttccacccgtggtgaagctggagaacggcagctctaccaacgtttcactcacgctgagacctccactgaacgctactctcgttatcacctttgagatcacctttcgctcaaagaatatcacgatcctcgagctgcccgacgaggttgtggtgcctcccggggtcacaaattcctcatttcaggtgacatcccagaacgttggtcagctcacggtctatctgcacggaaatcacagcaaccagacgggtcctcgaatcagatttctcgttataagatcaagcgctatatccatcatcaaccaggtgatcgggtggatttactttgtggcctggtccatcagtttctacccccaggtgataatgaactggagaagaaagagtgtcattggtctgtcttttgacttcgtcgcactgaatttgaccggcttcgtggcctactcagtgtttaacattggcctcctctgggttccatacattaaggaacagtttctgttgaagtaccctaatggagtgaaccctgtgaacagcaacgatgtcttttttagtctgcatgctgtcgttctgaccctgattatcatcgtgcagtgttgcctctacgaacggggaggacagagggttagttggccagcaatcggctttctcgtgctggcgtggctgtttgccttcgtcaccatgattgtagcagccgtgggtgtcaccacatggctccagtttctgttctgcttctcttatattaagttggcagtcactctcgtgaagtactttccccaggcgtacatgaatttctattacaaatccaccgagggctggagtataggtaatgtcctgctcgacttcacaggagggtccttctccctcctccaaatgtttcttcagagctataacaacgaccagtggacgctcatttttggcgatcccactaagttcggcttgggtgtattctcaattgtctttgacgtcgtgttctttatccagcatttttgtctctatcgcaagaggcctgggtatgaccaactcaat

SEQ ID NO: 10250 - DNA, 1101 bp, synthetic construct
  misc_feature 1..1101: note = source = /note="Description of Artificial Sequence: Synthetic coding sequence"
  source 1..1101: mol_type = other DNA
atgataaggaactggcttactatcttcattcttttcccccttaaacttgtggaaaagtgtgagtcctccgtgtctctcaccgtgccaccagtggtcaagctggaaaacggatcctcaactaacgtgtcgcttaccctcagaccccctctgaatgcaactctggtgattacctttgaaattacttttcgctccaagaatatcactattctcgaactgcccgacgaagtggtggtgccccctggtgtcactaattcgtcgttccaggtcacctcccagaatgtggggcaattgaccgtctaccttcatggaaaccattcgaaccaaactggaccccgcattcgctttcttgttattagatcatcggcgatctcgattatcaaccaggtgatcggttggatctattttgtggcatggagcattagcttttacccacaggtgatcatgaactggaggcggaagtcggtcattggactctcctttgatttcgtggcactgaatctcaccggctttgtcgcctactcggtgtttaacatagggcttctttgggtgccatacataaaggaacagtttctgctgaaataccctaatggcgtaaacccagttaactccaacgacgtgtttttctcgctgcatgcggtggtgttgaccttgattatcatagtgcagtgctgcctttacgaaagaggaggtcagcgggtttcctggccagctatcggatttcttgtgctcgcgtggctgtttgcatttgtcaccatgatcgtcgcagcagtgggagtgacgacctggttgcaattccttttttgtttttcctacatcaagctcgcagtgaccttggtgaagtacttccctcaggcatacatgaatttctactacaaatcaactgagggttggtcgattggaaacgtcctccttgattttaccggtggatccttttcgctcctccagatgtttctccaatcgtacaataacgatcaatggactctgatatttggagatccgaccaagtttggtctgggagttttttccatcgtgttcgatgtcgtctttttcattcagcatttctgtctgtaccggaaacgcccgggttacgatcaacttaac

SEQ ID NO: 10251 - DNA, 1101 bp, synthetic construct
  misc_feature 1..1101: note = source = /note="Description of Artificial Sequence: Synthetic coding sequence"
  source 1..1101: mol_type = other DNA
atgattaggaactggctgacgatctttatcctcttcccgcttaagctcgtggagaaatgcgagtcgtccgtctcacttacggtgccgccagtggtgaagctcgaaaacggttcgtcgactaatgtgtccctcacgctccgaccaccgctgaacgccactctggtgatcacctttgaaatcaccttcagatcgaagaatatcaccatcctggagctgcctgatgaagtggtggttccgccaggcgtgaccaactcgtcctttcaagtgacttcccagaacgtcggccagctgaccgtgtacctgcatggaaatcacagcaatcaaaccggccctcgcatcaggttccttgtgatccgctcgagcgcgatcagcatcatcaaccaagtgatcggatggatttacttcgttgcatggtccatcagtttctaccctcaggtgatcatgaactggcgcagaaagagcgtgatcgggttgagtttcgatttcgtggcactgaatctcactggattcgtcgcctactccgtctttaacattggactgctctgggtgccgtatatcaaggaacagttcctgctcaagtaccccaatggggtcaatccggtaaattcgaacgacgtgtttttctccctgcacgcggtagttctcacccttatcattatcgtccagtgctgcttgtatgagcggggaggacagagagtgagctggccagccatagggttcctggtgctcgcttggcttttcgcctttgtgaccatgatcgtggcagctgttggagtcacgacttggcttcaatttctgttctgtttctcgtacatcaaactggccgttactctcgtcaaatacttcccccaggcgtacatgaacttctactacaagtcaactgaaggatggtcgataggtaatgttctcctggatttcaccggtggttcatttagcctgctccagatgttcctccaatcctacaacaacgaccaatggaccctgattttcggtgatcccacgaagtttggcctgggcgtgttctccatcgtgtttgatgtggtgttctttatccagcacttttgcctctaccggaaacgcccgggctacgaccagctgaac

SEQ ID NO: 10252 - DNA, 1101 bp, synthetic construct
  misc_feature 1..1101: note = source = /note="Description of Artificial Sequence: Synthetic coding sequence"
  source 1..1101: mol_type = other DNA
atgatcaggaactggctcaccatcttcatcctgttcccgctgaaacttgtcgaaaagtgtgaatcgagcgtttcactgacggtcccacctgtggtcaaactggagaatggctcaagtaccaatgtttccttgactctccgccctcccttgaatgcgacgttggtaataaccttcgaaatcacatttcgttcgaagaacataactatcctagaattacctgatgaagtggtggtcccccccggtgtcacaaacagtagctttcaagtcacaagccagaacgtcggacagcttactgtatacctccacggcaaccacagtaaccaaacaggaccccgaatccggttcttggtcatccgatcatccgcgattagcatcattaaccaagtcatcggctggatctactttgtggcctggtcaatttcgttttatcctcaggtcatcatgaattggcgccgtaaatcagtgatcggactgtccttcgactttgttgctcttaacctaacgggcttcgtcgcctatagcgtcttcaatatcggactcttgtgggtaccttacataaaagaacagtttttgttgaagtatccaaatggggtgaatcctgtgaatagtaacgacgttttcttttctttacacgcggttgtccttactctcatcatcatcgtgcaatgctgtttgtacgagcgaggaggtcagcgcgtatcttggccagccatcggattcctcgtgctggcctggttgttcgcattcgttactatgatcgtcgcagcagtcggtgttacgacctggcttcagttcttgttctgcttttcctatatcaaactcgcagttacgctggttaaatatttcccacaagcttacatgaacttctattacaagtccacagaaggttggagcatcggcaatgtgcttctggactttaccggtggctctttcagtctactgcagatgttcttgcaatcctataacaacgatcagtggactctgatcttcggcgatcctaccaagtttggtttgggagtgttttcgatagttttcgacgttgtgtttttcatacaacacttctgcctttataggaagagacccggatacgatcagttgaat

SEQ ID NO: 10253 - DNA, 1101 bp, synthetic construct
  misc_feature 1..1101: note = source = /note="Description of Artificial Sequence: Synthetic coding sequence"
  source 1..1101: mol_type = other DNA
atgattaggaactggttgacgatcttcatcctctttcccctgaagttggttgagaagtgtgaaagctccgtgtccctgaccgttccgccggttgtgaaactagagaacggttctagcaccaacgtctccctcacactgcgccccccccttaacgccacgctcgtgatcactttcgagatcactttcagatctaagaacatcacaatcttagagcttcccgacgaggtggtggtccctcctggcgtcaccaactcctcattccaggtgacctcccagaacgtaggacaactgaccgtatatctgcatggaaatcacagtaatcagacgggtcctagaattcgttttttggtcatccgctcgtctgccatctctatcattaatcaggtcattggttggatctacttcgttgcctggtcgattagtttctatccccaggtcataatgaattggcgtagaaagtccgttatcggcttgtcgtttgatttcgtggcattaaaccttaccggtttcgttgcctactccgtctttaacatcggtctgctttgggtgccttacattaaggaacaatttcttctcaagtatccgaatggcgttaatccagtaaactcaaacgacgtcttcttctccctccatgccgtcgtccttaccctcatcatcatcgtgcagtgttgcctctatgagaggggcggtcagcgtgtgtcttggccggctatcggttttttggtcctggcctggctcttcgccttcgtgaccatgatcgtggccgcagtgggcgttaccacatggttgcagttcctattctgtttctcgtacattaaactggccgtgacgcttgtcaagtacttccctcaggcatatatgaacttttactataaatccaccgaaggctggtcgatcggcaacgtgctgctggatttcactggtggttctttttctctgttgcagatgtttctccagtcctataacaacgatcagtggacactcatctttggggatcccaccaagttcggtctcggcgtcttttcaatcgtgtttgatgtggtgttctttattcagcacttctgtctttaccgcaagcgtccgggctatgaccagctcaac

SEQ ID NO: 10254 - DNA, 1101 bp, synthetic construct
  misc_feature 1..1101: note = source = /note="Description of Artificial Sequence: Synthetic coding sequence"
  source 1..1101: mol_type = other DNA
atgattaggaactggcttaccatctttattctttttccccttaaacttgtggagaaatgcgagagctccgtgtcactgaccgttccccccgtcgtgaagctggaaaacggttcttccaccaatgtgtcactcacccttcgtccacctctcaacgcgactctcgtgataactttcgaaatcacttttcgatccaaaaacattacgattctcgaattgcctgatgaggtcgtggtcccacccggcgtcactaactcgtcttttcaagtcacctcgcagaatgtcggtcaactcacggtgtatcttcatggaaatcattccaaccaaactgggccaagaatccggtttttggtgattagatcgtcagccatttctattatcaaccaggtgatagggtggatatactttgtcgcatggtcgatatcattttacccgcaggtgattatgaattggcgtcgaaagagcgtgatagggctcagcttcgacttcgtggccctcaacctgactggttttgtggcctacagcgtgttcaacattgggcttctgtgggtcccgtacatcaaggagcaatttctgcttaagtatcccaacggagttaacccggtgaattccaacgacgtgttctttagcctgcacgcagtcgtgcttactctgatcattattgtacagtgttgcctgtacgaaagagggggacaacgtgtgtcctggcctgcaatcggatttctcgtcctggcgtggcttttcgcatttgtgaccatgatagtcgcagcagtgggagtcaccacctggcttcagttccttttttgttttagctacatcaagctggccgtgaccctggttaagtacttcccgcaggcatacatgaatttctactacaagagcactgaagggtggagcattggtaatgtgctgctcgattttaccggtggatccttttccctgttgcaaatgttccttcagtcgtataacaatgaccaatggaccctcatttttggagatccgactaaattcggattgggcgtctttagtatcgtgtttgacgtggtgtttttcattcagcacttctgtctttacaggaagcgacccggatacgatcaactgaac

SEQ ID NO: 10255 - DNA, 1101 bp, synthetic construct
  misc_feature 1..1101: note = source = /note="Description of Artificial Sequence: Synthetic coding sequence"
  source 1..1101: mol_type = other DNA
atgatccgcaactggctgaccattttcatactttttcctctgaagctggtggaaaagtgcgaatccagcgtgtcgctcactgtccctccagtcgtcaaactggaaaacgggtcgtcgactaacgtgtcactcactctcagaccacctctgaatgcgacgctcgtgattacttttgagatcacctttcgctcaaaaaacatcaccatcctggagctgcctgatgaagtcgtcgtcccgccgggagtgaccaactcgtcgttccaagtcacctcgcagaacgtgggacaactgacggtgtacctccacggaaatcactcgaaccaaacgggaccaagaatccggtttttggtgatccgcagtagtgccattagcatcattaatcaagttatcggctggatctacttcgtggcgtggtccatctcgttctacccacaggtgattatgaactggcgccgcaagtcagttattggactctccttcgacttcgtcgcactgaacctgactggatttgtggcttacagcgtgttcaatatcggactcctgtgggttccctacattaaggaacagttcttgctgaaatacccaaacggcgtcaatccggtcaatagcaatgatgtgttcttctccttgcatgcagtggtgctcaccctgatcatcatagtccagtgctgcctgtacgaacgaggcggtcagcgggtgagctggcctgcgatcggtttcctcgtgctggcctggctcttcgcgtttgtcaccatgattgtggctgccgtcggagtaaccacgtggctccaattcctgttctgttttagctacatcaagctggctgtcacgctggtgaagtacttcccacaggcatatatgaacttctactacaaaagcactgagggctggagcattggtaacgttcttcttgacttcactggaggatcattctccttgctgcagatgttcctgcaatcttacaacaatgatcagtggactctcatcttcggcgaccccacgaagttcggcctcggggtgttttcaatcgtgttcgacgtggtgttctttatccaacatttttgtctctatcgcaagcggccgggctacgaccaactgaat

SEQ ID NO: 10256 - DNA, 1101 bp, synthetic construct
  misc_feature 1..1101: note = source = /note="Description of Artificial Sequence: Synthetic coding sequence"
  source 1..1101: mol_type = other DNA
atgatacgtaactggttgactatcttcattctgtttcctctcaagctagtggagaaatgtgagtcgtcggtctctttgacggtcccgcccgtggtgaaactcgaaaacggctccagcactaacgtctcactcacgttgcgaccccccctgaatgccaccttggtcataacttttgaaataacgttccgatcaaagaacatcacaattcttgagttaccagacgaggtggtggtcccccccggggtcacgaactctagttttcaggtgacgagtcagaacgtcgggcagctgaccgtgtacctgcacggaaaccactccaaccaaaccggccctaggatcagatttcttgttatccgttcatccgccatatccattatcaatcaggtgatcgggtggatctactttgtcgcgtggagtatctcattctacccacaggtcatcatgaattggcggcgcaaatccgtgatcgggctgtcgtttgattttgtggccctcaatctgaccggtttcgttgcctattcggtgttcaacatcggcctcctctgggtgccatacatcaaagagcagtttctgttgaagtaccccaatggtgtgaatccggtgaatagcaacgacgtgttcttttcccttcatgccgtcgtgctaacgttgatcataattgttcagtgctgcctgtacgagcggggtgggcagcgcgtgagctggcctgcaattggcttcctggtactcgcctggctgttcgcttttgtgacaatgattgtggccgccgtgggtgttaccacctggctgcagttcctgttctgtttctcatacattaagctggctgtgaccctggtgaagtactttcctcaggcgtatatgaatttctactacaaaagcactgagggttggagtataggaaatgtgctgctcgatttcactggaggttcttttagtctgctccaaatgtttttgcagagctacaacaacgaccagtggacacttatcttcggggaccccacgaaattcggcctcggggtcttcagtatcgttttcgacgtcgttttttttatccagcacttttgcctgtaccggaagcgccccggatatgaccagttgaac

SEQ ID NO: 10257 - DNA, 1101 bp, synthetic construct
  misc_feature 1..1101: note = source = /note="Description of Artificial Sequence: Synthetic coding sequence"
  source 1..1101: mol_type = other DNA
atgattcggaactggcttacgattttcattctatttccgctaaaattagtagaaaaatgtgaatctagcgtatcattgacggttcctccggtggtcaaattggaaaacggctcttctactaatgtttcattaacactaagacctccacttaacgcaacgctggtcataacttttgaaatcacgtttcgcagcaaaaacattacaattctggagcttcctgacgaagttgttgtgcctcctggagtaacaaatagttcatttcaggtcacttctcagaacgtaggtcaattaacggtgtaccttcatggtaatcattccaatcaaactggcccgagaattcggtttctggtgatacgatcttcagcaatcagcattattaatcaggtgattggttggatctattttgtagcctggtctatatctttctaccctcaggtaattatgaactggcgtcggaaaagtgtaatcggcttgtcatttgattttgtcgcccttaacctaacgggctttgtagcgtattctgtgtttaatataggattgctctgggttccttatatcaaggagcagtttcttcttaagtacccgaatggtgtaaacccggtcaattcgaatgatgtatttttttctttgcacgctgttgtgctgaccctcataattattgttcagtgctgtttgtatgagcgcggaggccaaagagtgtcgtggcctgccatcggttttttagttcttgcttggctgtttgcattcgtaacgatgatcgtggcggcggtaggcgttactacgtggctccaatttttgttctgcttttcttacatcaaacttgctgtaactcttgtcaagtattttccgcaggcgtatatgaatttttattataaatcaactgaaggatggtctattggtaacgtccttttggattttaccggcgggagcttctctcttctgcagatgttcctacagagctacaataatgatcagtggacactaattttcggagatcctacaaaatttggcttaggagtgttttctatcgtctttgatgtagtcttctttattcagcatttttgcctttatcgcaaacggccgggctatgatcagttgaac

SEQ ID NO: 10258 - DNA, 1101 bp, synthetic construct
  misc_feature 1..1101: note = source = /note="Description of Artificial Sequence: Synthetic coding sequence"
  source 1..1101: mol_type = other DNA
atgattcgcaattggctgactattttcatactttttcccctgaagctggtggagaagtgtgaatcgtcggtttcactcaccgtgccacccgtcgtgaagctggaaaacggatcgtcaacgaacgtcagcctcacccttagaccgcctctgaatgcaactcttgtcatcacctttgaaataacttttcgctcgaaaaacatcactatcctcgaactgccggatgaagtggtcgtgcctcctggggtgaccaactcgtcgtttcaggtcaccagccaaaatgtgggacagctgactgtgtacctgcatggtaaccactccaaccaaactggaccccgtattcggttcttggtcattagatcgtcagctatcagcatcattaatcaagtcattggctggatatacttcgtggcatggtcgatatcgttctaccctcaggtgattatgaactggcggaggaagtccgtgattggtctttcctttgattttgtggcacttaatctgactggctttgtggcgtattccgtgttcaatattggcctcttgtgggtcccatacatcaaggaacagtttttgcttaagtaccctaacggtgtgaacccggtcaacagcaacgatgtgttcttctcactccatgcagtggtcctgacgctgatcataatagtccagtgttgtctttacgaacgcggagggcagcgggtcagttggccggctattgggttcctggtgcttgcctggctgttcgcttttgtgactatgatagtggccgcagtgggagtgactacctggctgcagtttcttttttgttttagctacattaagctcgccgtcaccctggtcaagtactttcctcaggcctacatgaacttctactataagtccactgaaggctggtcgattggcaatgtgcttcttgattttaccggaggctcgttctcactgctgcaaatgttcttgcaatcctacaacaacgatcaatggactttgatttttggtgaccctaccaaattcggactcggagtgttttcgattgtgtttgacgtggtgttctttattcagcacttttgcctgtaccgaaagaggcccggatacgaccaactgaat

SEQ ID NO: 10259 - DNA, 1101 bp, synthetic construct
  misc_feature 1..1101: note = source = /note="Description of Artificial Sequence: Synthetic coding sequence"
  source 1..1101: mol_type = other DNA
atgatcaggaattggctcactatattcattctgtttccattgaagctggtcgagaagtgtgagtcaagcgtgtcactaactgtgcctcctgtcgtgaagctggagaatgggagttctactaacgtcagtctgacattgcggccccctcttaatgccaccctcgtcattacattcgaaatcacttttcgcagcaaaaacataactattctcgaactgccagatgaagtcgttgtgcctccaggggttaccaactccagttttcaagtgacctcacagaatgtgggacagctcaccgtctatctccacggcaatcactcaaatcaaacaggaccccggatcaggttcctggtcattaggtcttccgctataagcatcatcaatcaggtcattggctggatctacttcgtagcgtggagtatctctttttatcctcaggttatcatgaattggaggagaaaatccgtgatcggactgtcatttgactttgtggcacttaatctcacaggtttcgttgcctattcagtattcaacatcggcctcctgtgggtcccctacataaaagaacagtttctgttgaagtatccgaatggggtaaatcctgtcaacagtaacgacgtgttctttagtttgcacgccgtagtgctcactttgataattattgtccagtgctgcctatatgaacgcggcggccagcgagtgtcttggccggccattggttttttagtgctcgcttggctgttcgcgttcgtaacaatgatcgtcgctgccgtcggcgtcacaacctggcttcagttcctgttttgtttttcatatatcaaattggctgtaaccctggtgaagtactttccccaggcttatatgaacttctactataaatccacggagggttggtctatcggcaatgtgttgctagatttcacaggtgggagctttagcctgcttcagatgtttcttcaaagctacaacaatgaccagtggacacttatctttggtgatccgaccaagttcggcctgggagtattctctattgtcttcgacgtggtattttttatccagcacttttgcctctaccgcaaacgtcccggatatgaccagctcaac

SEQ ID NO: 10260 - DNA, 1101 bp, synthetic construct
  misc_feature 1..1101: note = source = /note="Description of Artificial Sequence: Synthetic coding sequence"
  source 1..1101: mol_type = other DNA
atgataagaaactggctgaccattttcatcctgttcccgctcaagctggtcgagaaatgcgaatcgtcagtgtcgctgaccgtgcctccggtcgtcaagctggaaaacgggagctccaccaacgtgagcctgactcttcggccaccgctgaacgcaactttggtgatcaccttcgaaatcacttttcggtcaaagaacatcactatccttgagctgccagacgaagttgttgtgccgccgggtgtgaccaattcatccttccaggtcacgtcacaaaacgtgggacagcttactgtctacctgcacggaaaccacagcaaccaaaccggaccccggatccggttcctcgtgatccgttccagcgctatctcgatcatcaaccaggtgatcggatggatctacttcgtggcctggtctatctcattctaccctcaggtgatcatgaactggagaagaaaatcagtgatcgggctgtccttcgacttcgtggccctgaacctgaccggcttcgtggcctactccgtctttaacatcggccttctgtgggtcccctacatcaaggaacagtttttgctgaagtaccctaatggcgttaatcctgtgaactctaacgatgtgttcttctcgctccatgcagtggtgctcaccctgatcattatcgttcagtgttgcctgtacgaaaggggtggccagcgagtgtcctggcctgcgatcggatttctggtgctggcatggctgttcgccttcgtgactatgattgtggccgccgtgggcgtcacgacctggctgcaattcctgttctgcttctcctatatcaaattggcggtcaccctcgtgaagtactttccccaagcctatatgaacttctactacaagtccaccgaaggatggtcgatcggaaacgtacttttggacttcactgggggcagcttttccctcctgcaaatgttcctgcagtcgtacaacaatgatcagtggacccttatcttcggcgatcctaccaagttcggactgggtgtgttctcaatcgtgttcgatgtggtctttttcatccagcacttctgcctgtatcgcaagaggcccggatacgatcagctcaac

SEQ ID NO: 10261 - DNA, 1101 bp, synthetic construct
  misc_feature 1..1101: note = source = /note="Description of Artificial Sequence: Synthetic coding sequence"
  source 1..1101: mol_type = other DNA
atgattagaaattggctaaccattttcattttgttccctctgaaactcgtcgagaaatgcgaatctagcgtatcgcttaccgtgccaccggttgtcaaactggaaaacgggagcagcactaatgtgtccttgacactgcgtccccctctgaatgccaccctggtcattacttttgagattactttccgctctaagaatattacaatcctggagctcccagacgaagtggttgtgccacccggtgtcacaaattcaagtttccaggtgacgagtcagaatgtggggcagcttaccgtttacttgcatggaaaccatagcaatcagactggaccaagaattaggttcctagtgatacgctcctccgccatttcaattatcaaccaggtaatcgggtggatctattttgtggcctggtctatcagcttttaccctcaggtgattatgaattggcgtaggaaatcggtcatcggcctgtcgttcgatttcgtggcccttaatctgacaggatttgttgcgtattcagtgttcaacattgggcttctgtgggtgccatacatcaaggaacagttcctgttgaaataccctaatggcgttaaccccgttaattctaacgatgtgttcttctcacttcacgccgtggtgctgactcttattatcattgtccagtgttgcctgtatgagcggggcgggcaaagagtgtcttggccagctattgggttcctagttctggcctggttatttgcatttgtaaccatgattgtggcagccgtaggcgtgacaacatggctgcagtttttgttctgtttttcctacattaagttagctgtgactctggttaaatattttccccaggcgtatatgaacttttactacaagtcaaccgagggctggtccatcggtaatgttttacttgacttcaccggtggctcgttcagcctactgcagatgtttttgcaatcttacaacaacgaccagtggaccctgatctttggggacccaaccaagtttgggttaggggtgtttagtatagttttcgacgtagtgttttttatacagcatttttgtctctataggaaacgcccaggctatgaccagcttaac

SEQ ID NO: 10262 - DNA, 1101 bp, synthetic construct
  misc_feature 1..1101: note = source = /note="Description of Artificial Sequence: Synthetic coding sequence"
  source 1..1101: mol_type = other DNA
atgatacgcaattggctaactatcttcatattgtttccgctaaagctggtcgaaaagtgcgagagctcggtctccttaactgtccccccggtggtgaaattggagaacggatccagtaccaatgtgagtctgaccctacgcccgccactgaacgcaacacttgtaataacatttgagataacatttagatcgaaaaacataacaatactggaactgcctgacgaggtagtcgtccctcctggagtcaccaattcttccttccaggtgacctctcagaacgtagggcaactcactgtctaccttcacggcaaccacagtaatcagacagggcctcgaattaggttcttggttatcagatcctcagccataagtattatcaaccaggtcattggctggatctactttgttgcctggagcatctccttctatcctcaggtcatcatgaactggaggcgaaaatccgtcatcgggttgtctttcgactttgtcgccttgaacctgaccggattcgtggcctattcagtgttcaacataggcttgctatgggtgccttacatcaaggaacagttcttactgaagtacccaaacggggtgaaccccgtcaattccaatgatgtgtttttcagcctccacgccgttgtgctaacactgataatcatcgtgcagtgttgtctctacgaacgggggggacagcgagtgtcttggcctgccattgggttcttagtgctggcctggctcttcgcattcgtcaccatgattgtggctgccgtaggggtgaccacctggcttcagttccttttctgttttagctacattaaattagccgtgacgctggtgaaatattttcctcaagcatacatgaatttttactacaagtcaacagaggggtggagcatcggaaatgtcctgcttgacttcaccggaggttcattttcacttttgcaaatgttcctccagagctacaacaacgatcagtggaccctgatctttggtgatcccacgaaatttggactcggtgtttttagcatcgtgtttgacgtggtcttctttattcagcacttctgcctctatagaaaacgccccggctacgatcagttgaac

SEQ ID NO: 10263 - DNA, 1101 bp, synthetic construct
  misc_feature 1..1101: note = source = /note="Description of Artificial Sequence: Synthetic coding sequence"
  source 1..1101: mol_type = other DNA
atgataagaaactggctgactatttttatactgttcccattgaagctggtggagaagtgcgaatctagcgtgagtctaacagtcccccccgtcgttaaattggagaacggctcgtccacaaacgtgtccttgactctgcgcccccctttaaatgccacgcttgtgatcacctttgagatcacattccgatcgaaaaatatcactatccttgagcttcctgacgaagtcgtagtcccgccaggagttactaatagctcatttcaagttacctcacagaacgtggggcaacttacagtgtatcttcacggcaatcattctaatcagaccggacctcgtataagattcctcgtgataagaagcagcgctatctctatcattaatcaggtgatcggatggatttactttgtggcatggagcattagtttctacccgcaagttataatgaattggcgacggaagagcgtaatcggactctccttcgatttcgtagctttgaacctgaccggttttgtggcttattctgtgttcaatattggtctgctgtgggtgccctacattaaggagcaatttctgctgaaataccccaacggtgtgaacccagtgaattccaatgacgtgtttttcagcctgcatgctgttgttctgacacttattatcatcgtccagtgctgcttgtacgaaaggggaggacagcgggtgtcttggcctgcgattggttttttggtactggcctggctttttgcttttgtgacaatgatcgttgccgcagtgggggtcacgacgtggctccagttcttgttctgcttctcctatattaaactggccgtcacgctggtgaagtacttccctcaagcctacatgaacttctactataaatctaccgaagggtggtcaatcggtaatgtactgctggacttcaccggtggatccttcagccttctccagatgtttctgcagagttacaacaacgaccaatggacgctgatctttggcgatccaacaaagtttggcctgggggtatttagtatcgtgttcgatgtagtattcttcattcagcatttctgcttgtataggaagcggccaggttatgatcaattgaat

SEQ ID NO: 10264 - DNA, 1101 bp, synthetic construct
  misc_feature 1..1101: note = source = /note="Description of Artificial Sequence: Synthetic coding sequence"
  source 1..1101: mol_type = other DNA
atgatccgaaattggcttaccatctttatcctattcccactgaagcttgtggagaaatgtgagtctagcgtgagcctgaccgtcccaccagtggtgaagctcgagaatgggtcatccaccaatgtcagcctgaccctgagaccaccactgaacgccacccttgtgattacatttgagattacctttagaagcaaaaacattaccattcttgaactgccagatgaggtcgtcgtgccaccaggcgtgacaaattctagcttccaggtgacctcgcagaatgtaggacaactgaccgtttacctacacgggaatcattcaaaccagaccggtccccggattcggttcctggtgatccgcagcagcgctatttcaataataaaccaggtcattggctggatttactttgtcgcatggagtatcagcttttatccacaggtcatcatgaactggaggcgtaaatctgtaataggactctctttcgattttgtggctttgaacctcactggatttgtggcctacagcgtcttcaatatcggcctgctatgggttccttacatcaaggagcagttcctgctcaaataccccaatggggtcaaccctgttaatagcaacgacgttttcttctcactccatgccgtagtgttgaccctgatcatcattgtgcaatgctgcctgtacgaacggggcggccagagggtcagctggccagccattggctttctggtattggcttggctcttcgcctttgtcaccatgattgtcgccgcagtgggagtgacgacatggttacagtttctgttttgtttttcatacatcaagttggccgtaaccctggtcaaatacttcccacaggcatacatgaacttctattataaatccacagagggatggtcaatcggcaatgttttgctcgattttaccggcggatcgttctcacttctgcagatgtttctccaaagctataacaatgaccagtggaccttgatattcggggatcctaccaaattcggcctcggagtgtttagcattgtattcgacgtggtgttctttatccagcacttctgcctctatcgaaagcgaccaggttatgatcagctaaat

SEQ ID NO: 10265 - DNA, 1101 bp, synthetic construct
  misc_feature 1..1101: note = source = /note="Description of Artificial Sequence: Synthetic coding sequence"
  source 1..1101: mol_type = other DNA
atgattcgcaattggctgaccattttcatcctgttcccgctgaagctggtcgagaagtgtgaatcctcagtgtcgctcaccgtcccgccagtcgtgaaacttgagaatggcagctcgactaacgtgtcactgactctccgccctcccctgaacgccaccctggtcatcaccttcgaaattacttttcgttccaagaacattaccatcctggagctgccagacgaggtggtagtgccccccggcgttactaactcatcttttcaggtgacgtcgcaaaacgtgggacaattgacggtctacctccacgggaatcatagcaatcagactgggcctcgcatccggttcctggtgatccggtcgtccgcgatcagtatcatcaatcaggtcatcggatggatctacttcgtcgcgtggtccatctctttctacccacaagtgattatgaactggcggcgcaagtcagttatcggcctcagtttcgatttcgtagcgctgaacctgaccgggtttgtggcctacagcgtgttcaacatcggcctgctttgggtaccttacatcaaagaacagttccttctgaagtatccgaatggagtgaacccggttaacagcaatgacgtgtttttctcactccatgcagtggtgctgaccctgatcattatcgtccagtgctgcctgtatgaaaggggcggacaaagagtcagctggccggctataggattcttggtcctcgcctggctgtttgcttttgtgactatgatcgtcgcggccgtgggagttactacttggctgcaattcctgttctgcttttcatatatcaaactcgccgttaccttggtgaagtacttcccgcaggcatacatgaacttctactacaagtcgaccgaaggatggtcgatcggaaacgtcttgcttgacttcactgggggatctttttccctgctgcagatgttcctccagtcgtacaacaacgaccagtggaccctcatttttggtgacccaacgaaatttggtctgggggtgttcagcatcgtgttcgatgtggtgttctttatccaacacttctgcctgtaccgaaagaggcctggttacgatcagttgaac

SEQ ID NO: 10266 - DNA, 1101 bp, synthetic construct
  misc_feature 1..1101: note = source = /note="Description of Artificial Sequence: Synthetic coding sequence"
  source 1..1101: mol_type = other DNA
atgatccgaaattggcttaccatttttattctttttccgctgaagttggtcgagaagtgcgaaagtagcgtgtcgctgaccgtgccacccgtggtcaagttggagaatggctctagtaccaacgtttctctcaccttgcgacctccccttaacgctacacttgtgatcacctttgagatcaccttcaggagcaagaacataaccatcctggagcttccggacgaagtggtggtcccaccgggcgtcactaactcaagttttcaggtcacctcacaaaacgtaggtcagctgaccgtttatttacacggcaatcactcaaatcaaactggccccaggattaggtttttggtcatcagaagctccgcgatcagcattatcaatcaagtgattggttggatctacttcgtagcttggtcgatcagcttctatccgcaggtcatcatgaattggcgacgtaaatccgtgatcggattgtcttttgatttcgtggcccttaatcttaccgggttcgtggcgtattcagtcttcaatatcgggctcctgtgggtcccatacatcaaggagcagttcttgcttaaataccccaacggagtgaatccagttaattctaacgatgttttcttctcacttcacgccgttgtactgactcttatcataattgttcagtgctgtctgtacgaaagagggggacagagagtgagctggcccgctatcggattcttggtgctggcctggctttttgcctttgtgaccatgatcgttgccgcagtgggtgtgactacatggctgcagttcttgttctgtttttcctatataaagttggccgttacattggtgaagtacttcccacaagcttatatgaacttctactataagagtaccgaagggtggtctattgggaacgttctactggactttacaggcgggagcttttctctgctacaaatgttcctacagagttacaacaatgatcagtggacactaatcttcggagacccaacgaaattcggactgggtgtcttttctattgtgttcgacgtggtgtttttcatccagcatttctgcctctatcgaaagcgacctggatacgatcaattaaat

SEQ ID NO: 10267 - DNA, 1101 bp, synthetic construct
  misc_feature 1..1101: note = source = /note="Description of Artificial Sequence: Synthetic coding sequence"
  source 1..1101: mol_type = other DNA
atgatccgaaactggttgacaatatttatattgttccctctgaaactggtagagaaatgcgagtcatccgtgagccttacggtgccgcccgtcgttaagctggagaacggatccagtacaaacgttagtttgaccctgaggcctccgctgaacgctactttagtgatcacctttgaaatcacctttagaagcaagaatatcacgatcctggagctccctgacgaagtggtggtcccccccggcgtgacgaattctagcttccaagtcacatcacagaacgttggccagctcactgtgtacttgcacgggaaccattccaaccaaacaggaccaaggatccgcttccttgtgatccgcagctctgccatttccatcattaaccaagtgattggatggatatatttcgtggcctggtccatttctttctacccccaggtgatcatgaattggcgacgcaagagcgttattggtttgtcctttgacttcgtagctctaaaccttaccggcttcgtagcttactccgtgtttaacattgggctgttatgggtgccttacatcaaggagcaattcctcctgaagtatccaaacggagtgaatccagttaactctaacgatgtttttttcagtctgcacgcagttgtgttaactctgataattatcgtacagtgttgcttgtacgagcgtggagggcaaagagtgtcttggcctgccatcgggttcctggtgcttgcttggctgtttgctttcgttacaatgatcgtggccgctgtaggggtgactacttggctgcagttccttttttgtttttcttatattaaacttgcagttactctggtcaaatattttcctcaggcctacatgaatttttactacaaaagtaccgagggctggtcgataggcaacgtcctgctggacttcacaggtggaagtttttctctgcttcagatgttcctgcagtcatataataatgatcagtggacactgattttcggcgatcccacaaagttcgggttgggtgtgttttccattgtctttgacgttgtttttttcattcagcatttttgtctctatagaaaacggccgggttatgatcaactgaat

SEQ ID NO: 10268 - DNA, 1101 bp, synthetic construct
  misc_feature 1..1101: note = source = /note="Description of Artificial Sequence: Synthetic coding sequence"
  source 1..1101: mol_type = other DNA
atgatacgaaattggctgacaatctttatcttgtttccgctgaagctggtggagaaatgcgagtcttctgtgtcactgaccgtccctcctgtggtcaaactggagaacggatcatctactaacgtttccctcactctgcggccaccactaaacgctaccttagtgattacatttgaaattaccttccgatctaagaacatcactatcctagaattgccagacgaggtggtggtgccgcccggcgtaacaaactcgtccttccaagtaacatcccaaaatgtgggccaattgaccgtgtatctacatgggaaccacagtaatcagaccgggccgcgtatccgtttccttgtcatccgcagttcggcgattagcatcattaaccaggtcatcggttggatttactttgttgcatggtctatttctttttaccctcaggtcatcatgaactggcggagaaagagcgtgattggattatcatttgactttgtggctcttaatctgactggttttgtggcctacagtgtgtttaacattggcctactctgggtaccttacatcaaggagcaattcttactgaagtatcccaacggcgtcaacccagtcaatagcaatgatgtatttttcagcctgcacgcagtggtcctcacattgatcattatagtccagtgttgcctttatgagcgaggaggccagcgagtgagttggcctgcgataggatttctagtcttggcctggctcttcgcatttgtgaccatgatcgtcgccgccgttggcgtgaccacttggctacaattcctgttttgctttagctacatcaagctggcagtgaccctcgtcaagtacttccctcaagcctacatgaatttctattacaagtcaactgagggctggtcgatcggtaacgtcctcctcgacttcacgggagggagcttttccttacttcagatgtttttgcaatcatacaataacgatcagtggacactgatctttggagaccctactaaattcggccttggggtcttttccatcgtattcgacgttgtgttttttattcagcacttctgtctatacagaaagaggccagggtacgaccagctcaac

SEQ ID NO: 10269 - DNA, 1101 bp, synthetic construct
  misc_feature 1..1101: note = source = /note="Description of Artificial Sequence: Synthetic coding sequence"
  source 1..1101: mol_type = other DNA
atgattcgtaattggttaacaatcttcattttgttccctctgaaattggtggagaaatgtgagtcaagtgtcagtctgacagttcctccggtagttaagcttgagaatggatcctcaacgaatgtaagtcttacgcttcgaccaccacttaatgcgacactggtgattactttcgagatcacttttaggtccaaaaatataacaatccttgaactgcctgacgaagttgttgtcccgccaggtgtgaccaactcatcatttcaagtaacatcacagaatgtgggacaactcactgtttatctgcatgggaaccatagtaatcaaactggaccacgtattcggttcctcgtgatcagaagctcagctatttctattattaaccaagttatcgggtggatctacttcgttgcttggtccatttctttttatccgcaggttataatgaattggagacgaaagtctgttattggtttgtcatttgattttgttgcgttgaatctcacgggatttgttgcctactccgttttcaacattggacttttgtgggtaccgtatattaaagagcaattcctattgaagtatccgaatggagtgaacccagttaatagtaatgatgtattcttcagtctccatgcagttgttcttactctcataataatagtacaatgctgcttgtatgaacgaggtgggcagcgagtgtcctggcccgctataggttttttggtgttggcatggttgtttgcttttgtcacgatgattgtagcagccgtaggcgtaactacatggttacaattcttgttctgcttctcatatattaagttggcggtcactctcgtgaaatatttcccacaggcttatatgaatttttactataagagtacagaaggatggtctataggtaacgtcttgctggattttacaggaggatctttttctctgttgcaaatgtttctgcaatcatataataacgaccagtggaccctgatattcggagacccaacgaaattcggattgggagtcttctctattgtgttcgatgttgtcttcttcatccaacatttctgcctttatcgcaaacgaccgggatacgatcaacttaat

SEQ ID NO: 10270 - DNA, 1101 bp, synthetic construct
  misc_feature 1..1101: note = source = /note="Description of Artificial Sequence: Synthetic coding sequence"
  source 1..1101: mol_type = other DNA
atgatacggaactggcttactatattcattctatttcctctcaagctggtggaaaaatgtgaaagtagtgtctcccttacagtccctcccgttgtgaaactcgaaaacgggtcctccacaaacgtctccctgacgctaagaccaccactgaacgccactctagtgataactttcgaaatcactttccggtcgaaaaacatcactatcctcgagctgcccgacgaagtggtggtcccacctggggttactaatagttctttccaggtgacaagtcagaatgttggacaacttacagtgtatctccatggaaatcatagtaatcagacagggccaagaattcgcttccttgtgatacggtcatcagcaatatctataataaaccaggtgatagggtggatatattttgtggcttggagtatctctttttatccacaggttatcatgaactggcgcaggaaatcagtgatcgggctgtcctttgatttcgtggcccttaacctgacaggattcgtcgcttatagtgtttttaatattggacttctatgggtgccttatataaaagaacagttcctccttaaatatccaaacggggtaaaccctgttaactcaaatgatgtctttttctcgctccacgccgtagtgttaacactcatcataatcgtgcagtgctgtttgtacgaacggggaggacagcgggtaagttggcccgcaatagggtttcttgtgctggcgtggctgttcgccttcgtaactatgatagtcgccgccgtaggggtcactacttggctccagttcttattctgtttctcttacatcaaacttgccgttacacttgtgaaatatttcccccaagcctatatgaacttctactacaaatccactgaagggtggagtataggaaacgtgctcctggactttacaggggggtctttttccttactccagatgtttctccagtcctataacaatgatcagtggacactgatatttggagatcccacaaaatttggactgggggttttcagtattgtgttcgatgtggtttttttcatccagcatttttgcttataccgcaaaagacctggatatgatcagttaaat

SEQ ID NO: 10271 - DNA, 1101 bp, synthetic construct
  misc_feature 1..1101: note = source = /note="Description of Artificial Sequence: Synthetic coding sequence"
  source 1..1101: mol_type = other DNA
atgatccgcaactggcttactattttcatcctttttccgcttaagctggtggaaaagtgtgaatcctctgtaagcctcacagtacctcccgttgtgaagctggaaaatggctcttctaccaatgtatctctcactctcagacctcccctgaacgcaaccctggtgataacctttgagatcacttttaggagcaagaatataaccattctcgaactgcccgacgaggtggtcgtaccacccggcgtgactaactcttctttccaggtgacttctcaaaacgtgggtcagctcacagtttacctccacggaaaccacagcaatcagaccggcccgcgcatccgcttcctggtcattagatctagtgccatctctatcattaatcaggtgatcggctggatctattttgtggcttggagtatcagtttttacccacaagtgataatgaactggaggagaaagtcagtcatcggactctctttcgatttcgtagcactgaacctcacaggattcgtcgcctacagcgtgttcaacattggcctgctgtgggtgccatatatcaaggaacagttcctcctgaaataccccaacggtgtcaacccagtgaactccaacgatgtgttcttttcacttcatgccgtcgtcctcacattgattatcattgtgcagtgctgtctgtatgaacgcggcggccagagagtcagctggccagcgataggcttcctcgtcttggcttggctctttgctttcgtgaccatgatcgtagcggccgttggagtcactacctggctgcagttcctgttctgtttcagctatatcaagcttgctgtcactctcgtaaaatacttcccccaagcctacatgaacttttattacaagagcacagagggctggagcataggaaatgtgctcctggattttactggaggatctttcagtcttctccagatgttcctgcagtcttacaacaacgaccagtggaccttgatcttcggtgatcccacaaagtttggtctcggagtattctctattgtgtttgatgtggttttttttatccagcacttctgcctttacagaaagaggcctggatacgaccaattgaac

SEQ ID NO: 10272 - DNA, 1101 bp, synthetic construct
  misc_feature 1..1101: note = source = /note="Description of Artificial Sequence: Synthetic coding sequence"
  source 1..1101: mol_type = other DNA
atgattcgaaactggctgacgattttcattctgtttccacttaagctcgtggagaaatgtgagtcctcagtgagcctcaccgtcccgcctgtggtcaagttggagaacgggtcctcaaccaacgtgtccctgactctcagaccgcctttgaatgcaacgctcgtcatcacttttgaaataaccttccgctccaaaaacataaccatattggaacttccagacgaagtcgtggtgcccccaggggtgaccaatagttcattccaagtgaccagccagaatgtgggtcaactgacggtctacttgcacggaaatcatagcaaccaaaccggaccccggattagatttctggtcatacgctcgtccgcaattagcatcatcaatcaagtgattggttggatctattttgtggcctggagcatatcattctatccacaagtcattatgaactggagacgcaagtccgtgataggtcttagcttcgatttcgtcgcccttaacctgactggttttgtggcctactcggtgtttaacattggactcctttgggtgccatacattaaggaacagttcctgctgaaataccctaacggagtcaacccggtcaactcaaatgatgtgttcttctctcttcatgcggtggtgctcaccctgattatcattgttcagtgctgtctttatgaacgtggaggacaaagagtgtcctggccagcaatcggatttctcgtcctggcatggctctttgcatttgtgaccatgattgtggcagccgtcggagtgactacgtggctccaatttctgttttgtttttcgtacataaagctggcggtgactctggtgaagtattttcctcaagcatacatgaacttttactacaaatccactgaaggctggtcgataggtaatgtccttctggatttcactggaggtagcttttcgctcttgcagatgtttttgcagtcctacaataacgaccagtggacccttatcttcggcgaccccactaagttcgggctgggggtcttttccatagtctttgatgttgtgttctttattcagcacttttgcctgtaccgcaagcgcccgggctatgatcaactgaac

SEQ ID NO: 10273 - DNA, 1101 bp, synthetic construct
  misc_feature 1..1101: note = source = /note="Description of Artificial Sequence: Synthetic coding sequence"
  source 1..1101: mol_type = other DNA
atgatccgcaactggctgaccatcttcatccttttcccactcaagctggtggaaaagtgtgaatcgtcagtgtccctgaccgtgccgccggtggttaagctggaaaacgggtccagcaccaacgtgtcactgacgctcagaccgccgctgaacgcaaccctggtgatcaccttcgagatcacctttcggtccaagaacatcacgattcttgaactgccagacgaagtggtcgtgccgccgggtgtcacgaacagctcgtttcaggtcacttcgcagaatgtgggacagctcactgtgtacctgcacgggaaccactcgaatcagactgggccgagaattcggttcctcgtgattcgatcgtccgctatctccatcatcaatcaagtgatcgggtggatctacttcgtggcttggagcatctcattctaccctcaggtgatcatgaactggcggcggaagagcgttatcggcttgtcattcgatttcgtggcccttaatctcactggcttcgtcgcatactccgtgtttaacatcggactcctgtgggtgccatacatcaaggagcaattcctcctcaaatatccaaacggtgtgaatccagtgaactcaaatgacgtgttcttctccctgcatgccgtggtcctcacgctcatcattatagtccaatgttgtctgtacgagagaggcggacaacgggtgtcctggccggccatcggattcctcgtgctcgcctggttgttcgcgtttgtcaccatgatcgtggcggctgtcggcgtcaccacttggcttcagttcctgttctgctttagctacatcaagttggcggtgactctggtcaaatacttcccgcaggcttacatgaacttttactacaaatctacggaaggatggagcattggaaacgtgcttctggacttcaccggggggagcttctcactgctccaaatgttccttcagagttacaacaatgaccaatggactctgattttcggagatccaaccaagttcggtctgggagtgttctccatcgtgtttgatgtggtgtttttcattcaacatttctgcttgtacaggaagcgcccagggtacgaccaactgaac

SEQ ID NO: 10274 - DNA, 1101 bp, synthetic construct
  misc_feature 1..1101: note = source = /note="Description of Artificial Sequence: Synthetic coding sequence"
  source 1..1101: mol_type = other DNA
atgattcgaaattggctgaccattttcatactgtttcctctcaaacttgtggaaaagtgtgaatcaagcgtgagcctgactgtgccccctgtggtcaaacttgaaaacggctcgagcactaacgtgtcattgactcttaggccgcctctgaacgcaaccctcgtgattacttttgagattactttccggtccaaaaacattaccatccttgagttgcctgacgaagtggtcgtgccacccggagtcaccaactcctcgtttcaagtgaccagccagaatgttggtcaactgaccgtgtaccttcacggtaaccattccaaccaaactgggcctaggataagatttctggtcatcaggtcatcggcgatatccattatcaaccaagtgatcggatggatttacttcgtggcatggagtatcagcttttacccccaggtgatcatgaattggaggcggaaatcggtgataggcctttcatttgattttgtggcactgaacctcacgggcttcgtcgcctatagcgtgttcaatattgggctgctttgggtgccatacattaaggaacagtttcttttgaagtaccctaacggagtcaacccagtcaacagcaatgatgtgttcttttcattgcacgctgtcgtgctcaccctcatcataattgtccaatgttgcctgtacgaacgtggtgggcaacgcgtgtcatggcctgccatcggctttctcgtgctggcatggctttttgcatttgtgaccatgattgtggccgccgtcggtgtcactacttggctgcaattcctgttctgctttagctacattaaacttgcagtcaccctggtgaaatacttcccacaggcctacatgaacttttactacaagtcaactgagggctggagcataggaaacgtgcttctggatttcaccggaggctccttttcccttttgcagatgttcctccaatcatacaataatgatcagtggaccctgatctttggggaccctactaaattcggtctgggtgtgtttagcattgtctttgatgtggtgtttttcatacagcacttctgtctgtacagaaagcgcccgggctacgatcagctgaac

SEQ ID NO: 10275 - DNA, 1101 bp, synthetic construct
  misc_feature 1..1101: note = source = /note="Description of Artificial Sequence: Synthetic coding sequence"
  source 1..1101: mol_type = other DNA
atgattcggaattggctgaccatcttcatactttttcctctgaagctcgtggagaagtgcgagtcgtctgtttccctgactgttcccccggtggttaaacttgagaacggaagtagtacaaacgtctccttaacactcagaccaccactcaacgcaactctggtgatcaccttcgagatcactttcaggtctaagaatatcaccatcctggaactgcctgatgaggtggtggtgccccctggcgtgactaatagctcatttcaggtgacctcgcagaatgtgggccagctgacagtttacctccacggcaaccactcaaatcagacaggcccccgaatcaggttccttgtgatccggtcttccgcaatttcaattataaatcaagtaattggctggatctactttgtggcctggtccattagtttttacccgcaggtcattatgaattggcggagaaaaagcgtaatcggcctgtccttcgactttgttgcgttaaacttgactggattcgtggcctacagtgtgtttaatataggccttctgtgggttccttacatcaaggaacagtttctcctgaaatacccgaatggagtgaaccccgtcaatagtaatgacgtgttcttctcattgcacgccgtggtgttaacactaatcattatcgtgcagtgctgcttgtacgagaggggcggacagagggtgtcttggcccgccataggattcctagtgctcgcttggttgtttgccttcgtcactatgatcgtggcggccgtgggcgtgaccacatggcttcagttcctgttctgttttagctacattaaactggcagtcaccctcgttaagtattttccgcaggcttatatgaacttctactataagagcacagaaggctggagtataggtaatgttctcttagattttactggtggatcatttagtctgctgcagatgtttttgcagtcatataataacgaccagtggactctgatatttggggatcctacgaaattcggactaggggtgtttagcatcgtgttcgatgtggtcttttttatccagcacttttgtttgtaccgcaagcgcccgggatatgatcagcttaac

SEQ ID NO: 10276 - DNA, 1101 bp, synthetic construct
  misc_feature 1..1101: note = source = /note="Description of Artificial Sequence: Synthetic coding sequence"
  source 1..1101: mol_type = other DNA
atgatacgcaactggctgactatcttcatcctcttcccgctgaagctggtggaaaagtgcgagagcagcgtgtcgttgactgtgccgccggtcgtgaagttggaaaatggatcgtccaccaacgtgtctctgaccttgcgccccccactcaatgcaacccttgtcattacctttgagatcactttccggtccaagaacatcactatcctggaactgccggacgaggtggtggtgccaccgggcgtgaccaatagttcattccaggtcacttcacagaacgttggacaactcactgtgtaccttcacggaaaccattcaaaccaaaccggaccacgaatcagattcctcgttatccggtcgtccgccatcagcatcatcaaccaagtgatcgggtggatctacttcgtggcctggtcgatctccttctatcctcaggtcatcatgaactggagaagaaaatccgtgattggactctcgttcgatttcgtcgccctgaatctgactggattcgtcgcgtactcagtattcaacatcggcctgctctgggtgccgtacattaaggaacaattcttgcttaaataccctaacggcgtgaatcccgtgaattcaaatgacgtgttctttagcctgcatgctgttgtcctgacgctgatcatcattgtgcagtgctgcctgtacgaacgcggtggacaacgggtgtcctggcccgcgattggcttcctggtgctcgcatggctcttcgcatttgtgaccatgatcgtggccgccgtcggggtcacgacctggctgcagttcctgttttgcttctcctatatcaagctcgcggtcaccctcgtcaagtactttccgcaggcttacatgaacttctactacaagagcactgagggatggtcgatcggtaacgtgctgctcgactttaccgggggatccttctcgctgttgcagatgtttcttcagtcgtacaacaatgaccagtggactctgatcttcggagatcctaccaaattcggactgggcgtgtttagcatcgtgtttgatgtcgtgttcttcattcagcacttctgtctgtacaggaaacgcccaggttacgaccaactcaac

SEQ ID NO: 10277 - DNA, 1101 bp, synthetic construct
  misc_feature 1..1101: note = source = /note="Description of Artificial Sequence: Synthetic coding sequence"
  source 1..1101: mol_type = other DNA
atgatccggaattggctcaccatatttatactgttccctttgaagttggtcgagaagtgcgaatctagtgtcagcctgacagtaccgccagtggttaaattggagaatggcagttccacaaacgtgtctctgactctaaggccaccactgaatgccaccctggtaatcactttcgagatcacattccgaagcaaaaacatcactatccttgagcttcctgacgaggttgtagtgccacctggagtgaccaactcgtcttttcaggtaaccagtcagaacgtcggtcagctcacggtctatctgcacgggaaccactccaatcaaacgggaccccgtattcgctttctagtcattcggtcctccgcgatttccattataaaccaggtgattgggtggatttatttcgtagcatggagcatcagcttctacccacaagtgatcatgaattggcgcagaaaaagcgtaatcgggcttagcttcgatttcgtcgctctgaacctgacaggcttcgtcgcctactctgtcttcaatatcgggttgctctgggttccatatatcaaggaacagttcctgctgaagtaccccaacggcgtcaatcctgtgaattcgaatgatgtgttcttcagcctccacgcagtagttcttaccctgattatcatcgttcagtgctgcctctatgagaggggggggcagcgagtgtcatggccagcaatcggattcttagttttggcctggctattcgcgtttgtcacaatgattgtcgcagccgtgggtgttacaacatggctgcagtttctgttctgttttagctatattaaactggctgtcacattggtgaagtatttcccacaggcctacatgaacttctactacaagagcactgagggctggtcaatcggcaacgtattgctagatttcactggcggatctttctctctgctgcagatgttcctgcagtcatacaataatgaccagtggacactgatcttcggagatcccacaaagttcgggttaggtgtgttcagtatcgtgttcgatgtcgtgttctttatccaacacttctgtctttacagaaagcggcctggctatgaccaactaaat

SEQ ID NO: 10278 - DNA, 1101 bp, synthetic construct
  misc_feature 1..1101: note = source = /note="Description of Artificial Sequence: Synthetic coding sequence"
  source 1..1101: mol_type = other DNA
atgatacgtaattggctaacgatatttatactatttccgctaaaactagtagaaaaatgtgaatcgtcggtttcgctaacggtaccgccggttgtaaaattagaaaatggttcgtcgacgaatgtatcgttaacgttacgaccgccgttaaatgcgacgctagttataacgtttgaaataacgtttcgttcgaaaaatataacgatattagaactaccggatgaagtagttgtaccgccgggtgtaacgaattcgtcgtttcaagttacgtcgcaaaatgttggtcaattaacggtatatttacatggtaatcattcgaatcaaacgggtccgcgaatacgttttctagtaatacgatcgtcggcgatatcgataataaatcaagttataggttggatatattttgttgcgtggtcgatatcgttttatccgcaagtaataatgaattggcgtcgaaaatcggttataggtctatcgtttgattttgttgcgctaaatctaacgggttttgttgcgtattcggtatttaatataggtttactatgggttccgtatataaaagaacaatttttattaaaatatccgaatggtgtaaatccggtaaattcgaatgatgtttttttttcgctacatgcggttgtattaacgctaataataatagtacaatgttgtttatatgaacgaggtggtcaacgtgtatcgtggccggcgataggttttctagtattagcgtggctatttgcgtttgtaacgatgatagttgcggcggtaggtgtaacgacgtggctacaatttctattttgtttttcgtatataaaactagcggttacgctagttaaatattttccgcaagcgtatatgaatttttattataaatcgacggaaggttggtcgataggtaatgtattactagattttacgggtggttcgttttcgttactacaaatgtttctacaatcgtataataatgatcaatggacgttaatatttggtgatccgacgaaatttggtttaggtgtattttcgatagtatttgatgtagtattttttatacaacatttttgtttatatcgtaaacgtccgggttatgatcaattaaat

SEQ ID NO: 10279 - DNA, 1101 bp, synthetic construct
  misc_feature 1..1101: note = source = /note="Description of Artificial Sequence: Synthetic coding sequence"
  source 1..1101: mol_type = other DNA
atgatccgaaactggctaacaattttcattctttttccactgaagctagtcgagaaatgcgagagctccgtatctctgacggtaccaccagtggttaaacttgagaacgggagtagcactaatgtgagccttaccctgcgccctcctctgaatgccacccttgtgatcacattcgaaataacatttagatccaagaatatcaccatcttggagctgcccgatgaagtggttgtcccacctggagtcaccaacagcagttttcaagtcacctctcagaacgtcgggcaattgacagtctacttgcacgggaaccattcaaaccagactggcccacgcatccggttcctcgtcatccggtcgagcgcaatttctattatcaaccaagttatagggtggatctatttcgttgcctggtctattagtttttaccctcaggtgataatgaattggcgccgtaagtcggtgattggcctgagctttgatttcgtggctcttaatctgacaggattcgtcgcttactccgtttttaatatcggactcttgtgggtcccttacattaaggagcagttcttactcaaatatcccaatggagtaaatcccgtgaacagcaacgatgtgttcttcagcctgcacgccgtggtgctcaccctgatcattattgttcaatgctgtctgtatgaaaggggaggacagagagtctcttggcccgcgatcggcttcctggtgctggcctggctgtttgcctttgttaccatgattgtggctgcggtgggcgtaaccacctggctccaatttctgttttgcttttcctatatcaaactcgccgtaaccctggtgaaatacttccctcaggcgtatatgaacttttactataaatccactgagggctggagcatcggcaacgtgctgctggatttcaccggcggatccttctcgctgctccaaatgtttttacagtcatataacaatgaccagtggacactgatattcggcgaccccacaaagtttggattgggtgtcttcagcattgtgttcgatgtggtgtttttcatccagcatttttgtctttatagaaagagaccaggctatgatcagttgaac

SEQ ID NO: 10280 - DNA, 1101 bp, synthetic construct
  misc_feature 1..1101: note = source = /note="Description of Artificial Sequence: Synthetic coding sequence"
  source 1..1101: mol_type = other DNA
atgatccggaattggctcacaatctttatcctttttccccttaagctggtcgagaagtgtgagtcctcggtttcgctaaccgtgccacctgtggtgaagctcgagaatggcagctccacaaatgtgtccctcactttgcggccccctttgaacgccactctggtgatcacctttgaaatcacctttcgctctaagaatattacaatcttggaactccccgacgaagtcgtagtgcctccaggtgtaaccaactccagctttcaggtgacatcccaaaatgtgggtcagctgactgtgtaccttcacggcaaccactcaaaccagactggcccacgaattcgcttcttagtgatccgatcctcggctatttcgattattaatcaggtgatcggctggatctacttcgtggcttggagtatcagcttctacccccaggttattatgaattggagacggaaatccgttatcggcctgagcttcgacttcgtggctttgaacttaaccgggttcgtggcctattccgtgttcaatattgggctgttgtgggttccctatatcaaagagcagttcctgctaaaataccccaacggcgttaaccctgttaatagcaacgatgtttttttcagtctgcatgcggttgtgctcaccctgatcataattgtccagtgctgcttgtatgagagaggcggacagagggtatcttggcccgcaataggatttctggttctagcttggcttttcgcattcgtgacgatgatagtcgcagccgttggggtgacaacatggttacagttcctattttgtttttcgtatattaagctcgccgtcacactggtcaagtatttcccccaggcctacatgaacttctactataaatctacagagggctggtccatcggaaacgtcttgcttgatttcacaggaggctctttctccctattacagatgttcctccagtcgtataataacgaccagtggacgttgatctttggcgatccaacaaagtttgggttaggcgtgtttagcatcgtctttgacgtggtcttttttatccagcatttttgcctttacaggaagagaccgggctacgatcagctgaat

SEQ ID NO: 10281 - DNA, 1101 bp, synthetic construct
  misc_feature 1..1101: note = source = /note="Description of Artificial Sequence: Synthetic coding sequence"
  source 1..1101: mol_type = other DNA
atgatccggaattggctgactattttcatcctgttcccactaaaactcgtcgagaagtgcgagtcttccgtatcgctgaccgttccgccagtcgtgaagctcgagaatggctcttctactaatgtctcgctgactcttaggccccctcttaatgctacccttgtcataacatttgagatcacctttaggtcaaaaaacattaccatccttgagctgccggatgaggtcgtggtaccacctggagtgacgaatagcagctttcaggtgacatctcagaatgtgggccagctgacggtgtatctgcacggtaatcacagtaatcagacaggcccacggatcagatttctagtgatccggagttcagccatatccatcattaatcaggttatcggctggatctattttgtcgcatggagcatctctttctacccccaggtcatcatgaactggaggcgaaagtccgtcatcggactatcctttgattttgtggccctaaacctaactggctttgtagcttattccgtctttaatattggtctcctttgggtgccctacatcaaagagcaatttttgctgaaataccccaacggcgtgaatccggtgaactctaatgacgtttttttttctctccacgccgtggtgctgaccctaatcattatcgtgcaatgttgcttatatgagaggggcgggcagagagtatcatggcctgcaataggattccttgtgcttgcgtggctattcgcgttcgtaaccatgattgtcgctgccgtgggggtgactacctggctgcagttcctgttctgcttcagctatataaaactcgcagtgacactagtgaaatatttcccgcaggcgtatatgaatttttactataaaagcaccgaggggtggagcatcggcaacgttctgcttgacttcacaggtggatccttctccctgctgcagatgtttctccagtcttacaataatgatcagtggacgttgatttttggagatccgaccaaatttggtctgggcgtatttagcattgtctttgatgttgttttctttatccagcacttctgtctctacaggaagcggcccgggtacgaccagctgaat

SEQ ID NO: 10282 - DNA, 1101 bp, synthetic construct
  misc_feature 1..1101: note = source = /note="Description of Artificial Sequence: Synthetic coding sequence"
  source 1..1101: mol_type = other DNA
atgatcagaaactggctaaccatctttatcctgttccccctgaaactcgtggagaagtgcgagtcttccgtctctctcacggtgcctcctgtggtcaaactggagaacgggagtagcactaatgtctcattaactctccggccccctctgaatgccactctggtgatcaccttcgagataacgttccgcagtaagaacatcactatcctggagcttccagacgaagtggttgtgccaccgggcgtaaccaactcctctttccaggtgaccagccagaatgttggacagctgaccgtctatctgcacggcaaccatagcaaccagaccggtcccaggatcagattcctggtaatccggagctcagcaatttccatcatcaatcaggtgatagggtggatttattttgtcgcctggtccatctccttctacccacaggtaatcatgaattggcgccggaaatccgttatcggtttgtcattcgatttcgttgctttgaacctcaccgggtttgtggcctatagcgtgttcaacattgggttgctgtgggtcccttacataaaggaacagtttctgctcaaatatccgaacggagtgaaccctgtcaactcaaatgatgtgttcttttctctccacgcagtggtcctgactcttatcatcatcgtccagtgttgtctttacgaacgaggtgggcaacgcgtttcttggccagctatagggttcctcgtgcttgcctggcttttcgccttcgtgacaatgattgtggctgctgtcggtgtgacaacatggctgcagttcttattctgcttcagttacattaaactggctgtgacgctggtgaagtacttcccccaggcttacatgaacttttattataaaagtactgaggggtggtccataggcaacgttctcctggattttaccggtggcagtttctctctgctgcagatgttcctgcagagttacaataatgaccagtggacactgatctttggggaccccacaaagtttgggttgggggtgttctcgatcgtgttcgatgtcgtgtttttcattcaacatttttgtctgtacaggaaacgtccagggtatgatcaattgaac

SEQ ID NO: 10283 - DNA, 1101 bp, synthetic construct; identical to SEQ ID NO: 10267
  misc_feature 1..1101: note = source = /note="Description of Artificial Sequence: Synthetic coding sequence"
  source 1..1101: mol_type = other DNA

SEQ ID NO: 10284 - DNA, 1101 bp, synthetic construct
  misc_feature 1..1101: note = source = /note="Description of Artificial Sequence: Synthetic coding sequence"
  source 1..1101: mol_type = other DNA
atgattcggaactggctgaccatcttcattctgtttcctcttaaacttgttgagaagtgtgaatcatcggtgtccctgacggtccccccagtcgtgaagctggaaaacggttcaagcactaacgtgagcctcacccttcgacctccactgaatgccaccctggtgatcacttttgaaatcacctttcgcagcaagaacattactattcttgagctccccgatgaagtggtggtcccccctggagtgactaattcgtccttccaggtgacgagccaaaatgtgggtcagctgactgtgtacctccacggaaaccattcgaatcaaacgggacctcggattcgattcctggtcattagatcgtccgcaatttcgattatcaaccaagtgattggctggatatactttgtggcatggtctattagcttttacccccaggtgataatgaactggcgccgcaagagcgtgattgggctgtcctttgattttgtggcactcaacctcactggcttcgtcgcctattccgtgtttaacatcggactgctgtgggttccgtacattaaagagcagtttctcttgaaatatcctaacggtgtgaacccagtcaatagcaatgatgtgtttttctcgcttcacgccgtggtgctcaccctgataatcatcgtgcaatgttgtctgtacgagcgaggcggacaaagagtatcctggcctgccataggatttttggtcctggcatggcttttcgccttcgtcactatgattgtggcagcagtgggggtgaccacttggctccaatttctcttttgttttagctacattaagttggcagtgaccctggtgaaatactttcctcaagcatacatgaacttttactacaaatcgaccgaaggatggtcgatcgggaacgtgcttcttgattttaccggtggatcgttttccctgctccaaatgttcctgcaatcctacaataacgaccagtggactctcatttttggcgaccctacgaagttcggacttggagtcttttccattgtgtttgacgtggtctttttcattcaacatttctgcctgtataggaaacgtccagggtatgatcaactgaac

SEQ ID NO: 10285 - DNA, 1101 bp, synthetic construct
  misc_feature 1..1101: note = source = /note="Description of Artificial Sequence: Synthetic coding sequence"
  source 1..1101: mol_type = other DNA
atgatacgcaactggttgacgatttttattctgttccctcttaagctggtagagaagtgtgaatcaagcgtgtctcttacagtcccgcccgtggtgaagttggaaaacggaagtagcacaaatgtgtcactgactctgaggcctccgctcaacgccacactcgtgattacattcgaaatcacatttaggtccaagaatatcacgatcctcgaactgccagatgaagtggtcgtgccccccggcgtgaccaacagttctttccaggtgaccagccaaaacgttgggcagttgaccgtgtatctgcacggcaaccacagcaatcagacaggcccgaggatcaggttccttgtaatcaggagttcagcaatctcaataataaatcaagtcatcggctggatctacttcgtggcttggagcataagtttctatccccaagtcattatgaattggcgccgcaagtccgtgatcggattgtctttcgacttcgtcgccctcaacctaaccgggttcgtcgcatattctgtttttaacatcggcctgctgtgggtcccctatatcaaggaacaatttctactgaagtaccccaacggtgtgaaccctgtgaattcaaacgacgttttcttttctcttcacgccgtggtgctgacccttatcatcatcgtccagtgctgtctgtacgaaagaggcgggcagcgagttagctggccagcaatcggtttcttggtgcttgcttggctttttgcatttgtgaccatgattgtggcagccgtgggagtgactacctggttacaatttctgttctgctttagttacatcaaacttgctgtcacacttgtgaagtacttcccgcaggcatatatgaacttctactataagagtacagaagggtggagcattggcaatgtgctgttggattttaccggcggcagctttagcctgttgcaaatgtttctccagagctataacaacgaccaatggaccttgatctttggagatccaaccaagtttggtctgggagtcttctcaattgtgtttgacgtggtttttttcatccaacacttttgtctgtacaggaagaggccagggtacgaccaactgaat

SEQ ID NO: 10286 - DNA, 1101 bp, synthetic construct
  misc_feature 1..1101: note = source = /note="Description of Artificial Sequence: Synthetic coding sequence"
  source 1..1101: mol_type = other DNA
atgatcaggaattggctgaccattttcatacttttccctctgaaactcgtggaaaagtgtgagagctctgtgtcactgacggtgccaccagtggttaagctggagaacgggagctctacgaacgtgagccttaccctgaggcctccgctgaatgccacacttgtgataacattcgaaatcacttttcgaagcaagaacattacaatcctggagcttcctgatgaagtggtggtcccccccggggtaacaaactcatcctttcaagttaccagccagaacgttggacagctgactgtatacctgcacggaaaccattcaaatcaaactgggccgcgaatcagattcttggtgattagaagtagtgcaatcagtatcatcaatcaggtgatcgggtggatatacttcgtggcttggagcatttccttctatcctcaggtcatcatgaactggaggcgaaaaagcgtgattggactgtctttcgactttgtggcacttaatctgaccgggtttgtcgcatattccgtcttcaacattggactgctgtgggtcccgtatatcaaagagcagtttctgctcaagtacccaaacggtgtcaatccagtaaacagcaatgacgtctttttctctttgcacgctgtggtgcttacgcttataatcattgtgcagtgctgcctctatgaacggggcggtcagagggtttcctggcccgcaatcggctttctcgtactcgcctggttgttcgcgttcgttacaatgatcgtcgccgcagtgggcgtgactacctggctgcaatttctgttttgcttctcctacattaaactggcggtgaccctggtgaaatactttccccaggcctacatgaacttttactataagtccacggaggggtggagtattggcaatgtcttgctggatttcacagggggcagtttttccctgctccaaatgtttctgcagagctacaacaatgaccaatggaccttgatcttcggcgatccgaccaaattcgggcttggcgttttctctattgtttttgacgtggttttttttatccagcatttctgtttgtacagaaaaagacccggctacgatcagctgaac

SEQ ID NO: 10287 - DNA, 1101 bp, synthetic construct
  misc_feature 1..1101: note = source = /note="Description of Artificial Sequence: Synthetic coding sequence"
  source 1..1101: mol_type = other DNA
atgatccgaaattggctgaccatctttatcctgttcccgttgaagctggtggaaaaatgcgagagctcggtatcgctgactgtgccgccggtggtcaagctcgagaacgggtccagcaccaacgtctccttgaccctgcgcccaccgttgaatgccactctggtcattactttcgagatcactttccggtccaagaacatcaccattctggagctcccggatgaagttgtggtccctcctggggtgaccaattcctccttccaagttaccagccagaacgtgggacaactcaccgtgtacctgcacgggaaccacagcaatcaaaccggaccccgcatcaggttcctcgtgatccgcagctcggcgatcagcatcattaatcaggtgattggatggatctactttgtggcttggtcgatttcgttctacccacaggtgatcatgaactggagaagaaagtccgtgatcggattgagtttcgacttcgtcgccctgaatctgaccggattcgtggcgtactcggtgttcaacatcggcctcctgtgggtgccgtacatcaaggagcagttcctgctgaaatacccaaacggagtgaatccggtgaactccaatgatgtgtttttctcgctgcacgcagtggtcctgactttgatcatcatcgttcagtgctgcctgtacgaacgcggcggacagcgggtgtcttggccggccatcggattcctggtcctggcctggctcttcgcattcgtcaccatgatcgtcgccgcagtcggagtcaccacctggctccagtttctgttctgcttttcctacatcaagttggccgtgaccctggtcaagtacttcccgcaggcgtacatgaatttctactacaagtccactgaaggatggtcgataggtaacgtgctgctggacttcaccggcggctcgttctcacttctgcagatgttcttgcaatcgtacaacaatgaccagtggactctgatctttggcgaccctactaagttcggactgggcgtgttttccattgtgtttgatgtggtgtttttcatccaacacttctgcctctacaggaaaagaccagggtacgaccagctcaac

SEQ ID NO: 10288 - DNA, 1101 bp, synthetic construct
  misc_feature 1..1101: note = source = /note="Description of Artificial Sequence: Synthetic coding sequence"
  source 1..1101: mol_type = other DNA
atgatccggaactggctcaccatattcatcctctttccgttgaaacttgtcgaaaaatgcgaatcatcggtgtcgctcacggttccacctgtggtcaagctggagaatggttcgtcaaccaatgtgtcattgacccttcgtccacctctgaatgcaaccctggtgatcacttttgaaattacctttcggtccaagaacattaccatcctggaacttcccgacgaggtggtcgtccctccaggtgtcaccaattcgtcttttcaggtcacctcccagaacgttggccaacttaccgtgtacctgcatgggaaccattcgaaccaaactggacctcgaattagattccttgtgattcgctcgtcagccatctcgatcattaaccaggtcattgggtggatatactttgtggcatggtcgatttcattttaccctcaagtgattatgaactggcggagaaagagcgtgatcggtctgtccttcgatttcgtggcccttaaccttaccggatttgtcgcctattccgtgtttaacattggccttttgtgggtgccttacataaaggaacaattcctgctgaaatacccgaatggagtcaatccggtgaattccaatgatgtgttcttttcgctccacgccgttgtgctgaccctgataatcattgtgcaatgctgtttgtacgagcgaggaggacaaagagtgagctggcctgctataggattccttgtactggcctggttgtttgcatttgtcaccatgattgtcgctgcagtgggcgtgactacttggcttcaatttctgttttgcttttcgtacatcaagctcgcagtgaccttggtcaagtactttccacaggcctacatgaacttctactacaaatcgactgaaggatggtcaattgggaacgtgctgctggactttaccggagggtcattctcattgttgcaaatgtttctgcagtcctacaacaacgatcaatggaccctcatttttggcgatcctactaagtttggactgggagtgtttagcatagtgtttgacgtggtgttctttattcagcacttctgcctttacagaaagaggcccgggtacgaccagctgaat

SEQ ID NO: 10289 - DNA, 1101 bp, synthetic construct
  misc_feature 1..1101: note = source = /note="Description of Artificial Sequence: Synthetic coding sequence"
  source 1..1101: mol_type = other DNA
atgattagaaactggctcaccatcttcatcctgttccctctgaagctcgtagaaaaatgcgagtcaagcgtcagtctgactgtgccgccggtcgtcaagctcgaaaatgggtcaagcactaatgtctcgctgactctccggcccccacttaacgccacccttgtcatcacgttcgaaatcaccttccgcagcaagaacattaccatcctggaacttcctgatgaggttgtggtcccaccgggagtgactaatagcagctttcaggtcacgtcgcagaatgtcggccagcttaccgtgtatctccacggtaatcactcgaaccagactggaccgcgcatccgattcctggtgattaggtcgtcagccatctccatcatcaatcaagtcatcggatggatctactttgtggcatggtccatctcgttttacccacaagtcatcatgaactggcgccgcaagtcggtgataggcttgagttttgacttcgtggccctgaacctcactggcttcgtggcgtactcagttttcaacatcggattgctgtgggtgccttacattaaagaacaattcctcctgaagtacccaaacggagtgaacccggtgaacagcaacgacgtattcttttctctgcatgctgtagtcctcaccctgattatcatcgtgcagtgctgtctgtacgagaggggagggcaaagagtttcttggcctgctatcggattccttgtgctcgcctggctgttcgcgtttgtgaccatgatcgtggcggctgttggcgtgacgacttggctgcagtttttgttttgcttctcgtacatcaagctcgccgtgaccctcgtgaagtacttcccgcaggcatacatgaatttctactacaagtcaaccgagggttggtccatcggcaatgtactgctcgatttcactgggggatccttttcactgctgcagatgttcctgcaatcgtacaacaatgaccagtggaccctgattttcggcgatccgactaaattcggacttggtgtgttttccattgtgtttgacgtggtgttcttcatccaacatttctgcctgtaccggaaacggcccggatatgaccagctgaac

SEQ ID NO: 10290 - DNA, 1101 bp, synthetic construct
  misc_feature 1..1101: note = source = /note="Description of Artificial Sequence: Synthetic coding sequence"
  source 1..1101: mol_type = other DNA
atgatccgaaattggttaacgatctttattctcttcccattgaagttagtggaaaaatgtgagtcaagcgtatctctgactgtgcctccagttgtcaaattggaaaatggtagctctactaatgtttctttgacattgcgtccgccattgaacgcaactctggtgatcacctttgaaataacctttcgtagtaagaatataaccatactcgagcttccagatgaggttgtggttccccccggggttacaaattcgtcatttcaggtcacaagccagaacgtcggtcaacttacagtctacctgcacgggaatcattccaaccagaccggccccaggattcgttttttggttattcggtcatccgctataagtataataaaccaggttattgggtggatttattttgtagcctggtcgatttcattttaccctcaagtcattatgaattggcgtcgaaagtccgtaatcgggcttagcttcgattttgttgcgctcaacttgactggttttgttgcttatagcgtttttaatatcggattgttatgggtaccttacattaaagagcagttcctccttaaataccctaatggggttaaccctgtgaactctaacgatgttttttttagcctccacgcagtggtgttgacccttattattattgtccagtgttgtctttatgagaggggtggccagcgggtgagctggcctgctattgggttccttgttttggcttggttgttcgccttcgttacaatgatagtcgccgcagttggagttactacttggttgcaatttctgttttgtttttcctatatcaagttagctgtgactttggttaagtacttcccacaggcatacatgaatttctattacaaatctacagagggttggtcaatcggaaatgttcttttagatttcacggggggctcgttttcattgttgcagatgttcctccaatcatataacaatgaccagtggacacttatctttggtgatcctacgaagtttggattaggggtgtttagtatcgtgtttgacgttgtgttcttcattcagcacttctgcttgtataggaaacgtcctgggtacgaccagcttaat

SEQ ID NO: 10291 - DNA, 1101 bp, synthetic construct
  misc_feature 1..1101: note = source = /note="Description of Artificial Sequence: Synthetic coding sequence"
  source 1..1101: mol_type = other DNA
atgatacgaaattggctgactatctttatcttgtttccactgaagttggtcgagaagtgcgaaagcagcgtctcactcacggtcccccccgtggtaaaattggagaatgggagtagtactaatgtctcattaaccctccggccgcctctgaacgcaactctcgtaataacattcgagattacctttcgctccaagaatattacgatcttagagctgcccgatgaggtggttgtccctcctggcgttaccaattcctcctttcaggtcacttcccagaacgttggtcagctgactgtgtacctgcacgggaatcactctaatcagaccgggcccaggatcaggttcctagtcatacgtagctctgccatttctatcattaaccaggtgatcggctggatctatttcgttgcatggtccatctccttttacccccaggtaatcatgaattggcgacggaaaagcgtaattggtttgtccttcgatttcgtggccctcaacttgacaggctttgtggcttactccgtctttaacattgggctgctttgggtcccctacataaaagagcagttcctgttgaagtacccgaatggggtaaaccctgtgaattccaatgatgttttttttagcttgcatgcagtggtgttaactttaatcattatcgttcaatgttgtctctacgagaggggcggccagcgagtatcatggccagcgatcggatttcttgtcctagcctggcttttcgcttttgtgactatgattgtggcagctgtgggcgtgactacctggcttcagttcctgttctgcttttcatatatcaaactcgcagtcacgttggtgaaatactttccacaagcctacatgaacttctactacaaaagtacagaggggtggagcattggaaatgtgctgctggacttcacaggtggaagctttagtttactgcagatgttcctgcagtcttataataacgatcagtggactctgatcttcggagaccccaccaagtttgggttgggagtgttttcaatagtgttcgacgtcgtgtttttcatccagcacttctgcctgtatcgaaagcgccccggctatgaccagcttaat

SEQ ID NO: 10292 - DNA, 1101 bp, synthetic construct
  misc_feature 1..1101: note = source = /note="Description of Artificial Sequence: Synthetic coding sequence"
  source 1..1101: mol_type = other DNA
atgatacgcaattggctgaccatcttcatcctctttccactcaagttagtggagaaatgtgagagcagtgtaagcctgacagtgccccccgtggtgaagttagagaatggctccagcaccaatgtctctttaaccctccgcccaccactcaatgcaacgcttgtgattacatttgagattacattcagatccaaaaacatcaccatcttggaactgccagacgaggtagtggtccctccaggcgtcaccaattcgtcattccaggtcacgagccagaacgtcggacagctcactgtatacctgcatggaaaccatagtaatcagacaggacctaggatccggtttcttgtgatcagatcgagcgctatttcaattattaaccaggttatcggttggatatattttgtcgcctggtctattagcttctatccacaggttattatgaactggaggcgtaagagcgtgatcggcctcagcttcgactttgtcgccctgaaccttacggggttcgtggcatacagcgtgtttaacatcggcctactgtgggtcccatatattaaggagcagttcctccttaaatacccgaacggcgtgaaccctgtcaactcgaacgacgtattcttcagtcttcacgccgtggtgttgaccctaattatcattgttcagtgttgcctttacgagaggggaggccagcgtgttagttggcctgcgatcggttttttggtcttggcatggctctttgcctttgtgaccatgatcgtcgcggcggtaggagtgacaacttggctgcaattcctgttttgcttctcttacattaaactggccgtcacccttgtgaagtacttcccccaggcctatatgaatttctattataagtccaccgagggatggagcatcggaaatgtcctactggacttcaccggcggctctttcagcctcctgcagatgttcctgcagtcctataataacgaccagtggaccctgatcttcggggaccccacgaaatttggattgggcgtcttctctattgtgttcgacgtggtgttcttcattcagcacttctgcctctaccgaaagcggcctggctacgaccagctgaac

SEQ ID NO: 10293 - DNA, 1101 bp, synthetic construct
  misc_feature 1..1101: note = source = /note="Description of Artificial Sequence: Synthetic coding sequence"
  source 1..1101: mol_type = other DNA
atgatcagaaactggctgacgatctttatcctgttccctcttaagctcgtggaaaaatgcgaatcgtcagtgagccttactgtccccccagtggtgaagctggagaatggatcgtccaccaacgtgtcactcaccctgcgccctccattgaatgccaccctggttattacgttcgaaatcacctttcggagcaagaatatcacgattctggaacttcctgatgaggtggtcgtgccccctggtgttactaactcgtcgtttcaggtgacttcacaaaatgtcgggcaactgaccgtgtacctgcatggcaaccattcgaaccagactgggccacgcataaggttcctggtcatcagatcaagcgctatttcgatcataaaccaggtgattggatggatctatttcgtagcctggtcgatttccttttaccctcaggtcatcatgaattggagaagaaaaagcgtgattggactttcattcgattttgtggccctgaacctgacgggatttgtggcatactccgtgttcaatattgggctcctgtgggtgccgtacataaaggaacaatttctcctgaagtaccctaatggcgtcaaccccgtcaactcgaacgacgtctttttctccctgcatgcagtcgttctgactctgatcataattgtccagtgttgtctttatgagcgtggcggacaacgagtgtcatggcccgcaatcggatttcttgtcctcgcttggcttttcgcattcgtcaccatgatcgttgcagcggtgggtgtgactacgtggctgcagtttctcttttgtttctcctatatcaaactggcagtgactctggtgaagtactttccccaagcgtacatgaacttttactacaagtcgactgaaggatggtcgattgggaacgtgcttctggattttaccggcggtagcttttcgttgcttcaaatgttccttcagtcatacaataacgatcaatggactctgatattcggagatcctacgaagtttggcctgggcgtgttctctatcgttttcgatgttgtctttttcatccagcacttttgtctttaccgtaagcgccccggttacgatcaactgaac

SEQ ID NO: 10294 - DNA, 1101 bp, synthetic construct
  misc_feature 1..1101: note = source = /note="Description of Artificial Sequence: Synthetic coding sequence"
  source 1..1101: mol_type = other DNA
atgattcgaaattggctgactattttcatcttgttccctctcaaactggtggaaaaatgcgaatcctccgtgtcccttacagtacctcctgttgtgaagcttgagaatggtagctcaactaatgtaagcttaacacttcggccacccctgaacgccacactggtcatcactttcgagatcacgtttagatccaagaatataacgatcctcgaactcccagacgaagtcgtggtgccacccggtgtgaccaacagtagttttcaggtgacctcccagaatgtgggacagctcaccgtctatctccacggcaaccacagtaaccagactggcccgaggataaggttcctggtcatccgctcttccgctatctctatcattaaccaggtgattggatggatctatttcgtcgcttggagcatcagtttctatccacaggtcattatgaattggcgacgcaaaagcgtcatcgggcttagcttcgattttgtagccctgaacctgaccgggtttgtggcttactcagtgttcaatattggcctgctctgggtgccctacattaaggaacaatttctgctgaaataccctaacggggttaatcccgtcaactctaacgacgtgttcttcagcttgcacgctgtggtcttgactctgataatcattgtgcaatgttgcctctatgagaggggcggtcaacgggtgagttggccagcaatcggcttccttgtgctggcctggttattcgccttcgtcactatgatagtggccgccgtgggggtcacgacctggctgcagttcctgttctgcttttcctatattaaactggctgtgactcttgttaaatatttcccccaagcctacatgaacttttattataagtcgaccgaaggctggtctatcggaaacgtgctgcttgacttcacgggtggctccttttctctgctgcagatgttcctccagtcttataacaatgaccagtggactttgatttttggcgacccaactaagtttggcctgggcgtgttctccattgtgtttgacgtggttttttttattcagcacttttgtttatatcgcaaacgtccaggttacgatcagctcaac

SEQ ID NO: 10295 - DNA, 1101 bp, synthetic construct
  misc_feature 1..1101: note = source = /note="Description of Artificial Sequence: Synthetic coding sequence"
  source 1..1101: mol_type = other DNA
atgatccgcaattggctgacgatcttcatattatttccacttaagctagtcgagaagtgcgagtctagcgtgtcattaactgttccccctgtagttaagctcgagaatgggtcaagtacaaacgtcagtctgacccttcgcccaccgctcaatgcaaccctggtcatcaccttcgagatcacttttcgcagcaagaatattacgattctggagctgcccgacgaggtggtggtgccaccgggagtcactaacagttcctttcaggtgacaagccaaaatgtgggacagcttaccgtgtacctacatggaaatcattcaaatcaaaccggacctaggatccgcttcctcgtgatccgatcatctgctatttccattattaaccaagtgataggctggatttattttgtggcctggtctataagcttttaccctcaggttatcatgaattggcgccgaaagtccgtgatcggccttagcttcgacttcgtcgccttgaacctcacaggtttcgttgcttacagcgtgtttaacattggattgttatgggtgccctatatcaaggaacagttcctattaaaatatcccaatggggttaacccagtgaatagcaatgacgtgttcttttcgctccacgccgttgtcctcacgctcatcattatagtccagtgctgcttatacgaacgaggaggccagcgggtttcttggcccgccataggcttcctggtgttagcctggctttttgcatttgtcaccatgatcgtcgcagccgtgggagtgaccacctggctgcaattcctgttctgcttctcttatattaaattagctgtgaccctcgtgaagtactttccacaggcctacatgaacttttattataagtctacagaaggctggtcaattggaaatgtgctgttggattttacgggcggcagttttagtcttcttcaaatgttcttacagtcttataataatgaccagtggacactcatcttcggagatcccactaaatttggactgggtgtcttttcgatagtgtttgacgtggtgtttttcatccagcatttctgtctgtaccgcaagcggcctggctacgatcagctgaac

SEQ ID NO: 10296 - DNA, 1101 bp, synthetic construct
  misc_feature 1..1101: note = source = /note="Description of Artificial Sequence: Synthetic coding sequence"
  source 1..1101: mol_type = other DNA
atgatccggaactggctgaccatctttatactcttcccacttaagctggtggagaaatgcgaaagcagcgtctcccttaccgtgccacctgtcgtgaagctcgagaacggctcatccactaacgtctcgctgacgctgaggcctccactgaatgcaaccttggtgatcacctttgaaatcaccttcaggtccaagaatatcaccattcttgaacttcctgatgaggtggtcgtgcctcctggcgtgacgaattccagcttccaagttactagccagaatgtgggccagcttactgtctatctgcacggaaatcactccaatcaaacggggccacgtatcaggtttcttgtgattaggtcgtcggcaatatctatcataaaccaagtgatcggttggatctactttgtggcatggtcaatttcgttttacccacaggtgattatgaactggcgtagaaagagcgtcataggcctgagctttgatttcgtggcactcaaccttaccggatttgtcgcgtacagcgtgttcaacattggactgctgtgggtgccttacatcaaagagcaatttctgctgaagtaccctaacggggtgaaccctgtcaactcaaatgatgtctttttctcgcttcatgcggtggtgctcacgctcattatcatagtgcaatgttgtttgtatgaacgtggaggacaacgagtgtcgtggcctgccattggttttttggtcttggcatggctgttcgcatttgtgactatgatcgtcgcggccgtgggcgtgaccacttggctccagtttcttttttgttttagttacattaagttggctgtgaccttggtcaagtactttccgcaggcatacatgaacttttactacaagtccaccgaggggtggtcgataggaaatgtgcttctcgacttcaccgggggctcgttttcattgctgcaaatgttcctgcaatcatacaacaatgaccagtggactctgatttttggggacccgactaagttcggactgggtgtgtttagcattgtgtttgatgtagtgtttttcatacagcatttttgtctgtaccgcaagcgccctggttacgatcagcttaac

SEQ ID NO: 10297 - DNA, 1101 bp, synthetic construct
  misc_feature 1..1101: note = source = /note="Description of Artificial Sequence: Synthetic coding sequence"
  source 1..1101: mol_type = other DNA
atgatacgcaactggctaacaatcttcattctgttcccgctcaaactcgttgagaaatgcgaatcctccgtcagcctaaccgtcccacctgttgtgaaactggagaatgggtccagcacaaatgtctccctcaccctgaggccacccctgaatgccactctggtgattacattcgagatcaccttcagatccaagaatatcacaattctagagctgcctgacgaggtagtggttccgcccggcgtgacaaatagctcattccaggtcacgtctcagaatgtgggacagctcactgtgtacctgcacggaaatcacagcaatcagactggaccgcgaattcgctttctcgtcattagaagttcagctattagcatcattaatcaggtcattgggtggatttacttcgtagcatggtcgatttccttctacccacaggtgataatgaattggcgcaggaaaagcgttatcggtctgtctttcgatttcgtagccctgaacctaacaggcttcgtcgcctactcagtttttaatataggtttactttgggtcccttatattaaggagcagtttctgcttaaataccccaatggtgtgaatcctgtgaactcaaatgatgtcttcttttctctgcacgcggtcgtgctaacattgatcattatcgttcagtgctgcttatacgaacggggaggacaacgtgtgtcctggccagcaatcggcttcttagttcttgcctggctgtttgctttcgtgacaatgattgtggcagccgttggcgtcacaacttggctgcagttcctgttctgcttttcctatatcaagctcgctgtgacattggtcaaatatttcccgcaagcttatatgaacttctattataagagcaccgaagggtggagtatcggaaatgtcctgttggacttcacaggaggctctttttcgctgcttcaaatgtttttacagagttacaacaatgatcagtggacactcatttttggcgatcctacaaagtttggtttgggggtgttttctatcgtgttcgacgtcgttttttttattcaacatttttgtctctacagaaagaggccaggatacgaccagctgaac

SEQ ID NO: 10298 - DNA, 1101 bp, synthetic construct
  misc_feature 1..1101: note = source = /note="Description of Artificial Sequence: Synthetic coding sequence"
  source 1..1101: mol_type = other DNA
atgatccgcaattggcttaccatctttattctgttccccctcaagctggtcgaaaagtgcgaatccagcgtctcgctgactgtcccgcctgtggtgaagttggaaaacggaagctcgactaacgtgtctcttactcttagaccgcctctgaacgccactcttgtgatcaccttcgagatcacctttcgaagcaagaacattactatactggagctgcctgacgaagtggtggtgccaccaggagtcaccaactcgtcgttccaggtgacttcccaaaacgtgggacaacttacggtctacctgcatggcaaccattccaaccaaaccggacctagaattcgctttcttgtcatcagatcctcggccatatcaatcattaaccaggtgatagggtggatttacttcgtggcatggtcaatttcgttctacccacaggtgatcatgaattggaggcgaaagtcggtaattggcctgtcatttgattttgtcgcgcttaatctcactggatttgtggcatactcagtgttcaatatcggactcctttgggtgccatacatcaaagagcagtttctgctcaagtacccaaacggagtgaatccagttaacagcaatgacgtgtttttctcgctgcatgcagtggtgctgacgctcatcatcatcgtccaatgctgtctctacgaaagaggaggacagcgagtgtcctggccagccatcggattccttgtcctcgcatggctttttgcattcgtgaccatgatcgtcgcagcagtcggagtcactacctggctgcaatttcttttctgtttttcctacattaaactcgcagtcactcttgtgaaatacttcccacaggcttacatgaacttctattacaagagcaccgaagggtggtccatcgggaacgtgttgcttgattttacgggtggaagtttctcgctccttcagatgtttcttcaaagctacaataacgaccaatggaccctgatttttggagatccaaccaagtttggactgggtgtgttctcgatagtttttgacgtggtgttcttcatacaacatttctgtctgtaccgcaaaaggccggggtacgatcaacttaac

SEQ ID NO: 10299 - DNA, 1101 bp, synthetic construct
  misc_feature 1..1101: note = source = /note="Description of Artificial Sequence: Synthetic coding sequence"
  source 1..1101: mol_type = other DNA
atgatccgcaattggctgactatcttcatcttgttcccgctgaaattggtcgagaagtgcgaaagctctgtgtccctcaccgtccctccagtggtcaagctggaaaacggctcatccactaatgtgagcctcacgctccggccgccgctgaatgctaccctggtcatcacgttcgagatcaccttcagaagcaaaaacatcaccatcctggaactgccggatgaggtggtggtgccacccggagttaccaattcctcgttccaggtgacttcacagaacgttggacaactgactgtgtacctgcatggaaaccactcgaaccagactggccctcgcatccggtttctggtgatccgcagctcagccatctcaataatcaatcaggttattggatggatatactttgtcgcctggtcgatctcgttctatcctcaagtgatcatgaattggcggcgcaaatccgtcattgggctctcattcgacttcgtagcactgaaccttactggcttcgtggcatactccgtgttcaacatcggactgctttgggtgccgtacatcaaagaacagtttctgctcaagtacccaaacggagtgaacccggttaactctaacgatgtgttcttcagcctccatgctgtagtcctgacgctgatcattatcgtgcagtgctgcctctacgaacggggaggacaacgagtctcctggccggcgatcggattcctggtgcttgcgtggttgttcgcgttcgtgaccatgattgtggcggccgtgggagtgaccacttggctgcagtttttgttctgcttctcgtacatcaagttggcagttactttggtgaagtattttcctcaggcttacatgaacttctactacaagtcgactgagggatggtccatcggcaacgtcctgctggacttcaccgggggtagcttttcccttctgcaaatgttcctgcagtcttataacaatgaccagtggaccctgattttcggggatccaactaagtttggcctgggcgtgttctcaattgtgttcgacgttgtgttctttatccagcatttctgtctctaccgaaagcggcccggctacgatcagctgaac

SEQ ID NO: 10300 - DNA, 1101 bp, synthetic construct
  misc_feature 1..1101: note = source = /note="Description of Artificial Sequence: Synthetic coding sequence"
  source 1..1101: mol_type = other DNA
atgatccgaaattggcttaccatattcatcctgttccccctcaagctggtcgaaaagtgcgaatcatccgtaagcctgaccgtgccgccagttgtgaagttggagaatgggagctccaccaatgtgtccctgaccctgcgcccgccgctgaatgccacgttggtgatcactttcgagattactttccgctccaagaacatcactatcctggaactgcctgacgaagtggtggtccccccaggcgttactaactcttcatttcaggtgactagccagaacgtcggtcaacttactgtgtacctccatgggaatcacagcaatcagactggtcctcgcatcaggtttcttgtcatcaggtcctccgcgatttctatcatcaaccaggtgatcgggtggatctactttgtggcctggtccatctcgttctacccgcaggtgattatgaactggagacgcaagtcagtgattggcctgtcgttcgatttcgtcgctttgaacctcaccggctttgtggcatatagtgtattcaacatcggtttgctctgggtgccatacatcaaggagcagttcctgctgaaataccctaacggagtgaatccggtgaacagcaacgacgttttcttctcgctgcacgcggtcgtgttgacccttatcattatcgtgcaatgttgcctttacgaacggggaggacaacgggtatcatggcccgccattggcttcctggtgctggcatggctgttcgccttcgtgactatgatcgtcgcagcggtgggcgtgacgacctggctccaatttctcttctgcttttcgtacataaagctggctgtcaccctggtgaaatacttcccacaagcctacatgaatttctattacaaaagtacggagggctggtcgatcggaaacgtcctccttgatttcaccggaggatcgttttccttgctgcagatgttcctccagtcatacaacaacgaccagtggaccttgatcttcggggacccgactaagtttggactcggagtcttttcaatcgtgttcgacgtcgtattctttatccaacatttctgcctgtaccggaaaagaccgggatacgatcagctgaat

SEQ ID NO: 10301 - DNA, 1101 bp, synthetic construct
  misc_feature 1..1101: note = source = /note="Description of Artificial Sequence: Synthetic coding sequence"
  source 1..1101: mol_type = other DNA
atgattaggaattggttgacaatttttattctgtttccattgaagctcgtggagaagtgcgaatctagcgttagcctaactgtgccccctgtcgtcaagttggagaatggaagctccacaaatgtgtccctcacactaaggcctccgctgaatgctacgttagtgattacattcgaaatcaccttccgcagcaagaatattaccatcctcgagttgccagatgaggtcgtggtgcctcccggggttaccaattcatcttttcaggtgacgagccagaacgtggggcagctaactgtctacctgcatgggaaccattccaaccagaccggacctcggatccgttttcttgtcatcaggagttccgccataagcatcatcaaccaggttattggttggatctattttgtcgcatggagtattagtttctatccacaagtcatcatgaactggaggagaaaatcagtcattgggctttcctttgactttgtagccttgaacctgaccggctttgtggcatactcagtcttcaatattgggctgctgtgggtgccatacatcaaggagcagtttttattgaagtaccctaacggggtgaaccctgttaattcaaacgacgttttttttagcttgcacgccgtcgtgcttacattgatcattattgtacagtgttgtttgtatgaacggggtggacagcgcgtgagttggccggcaatcggctttcttgtgctggcatggctctttgcattcgtgactatgattgtcgcagcggtgggggttaccacttggctgcagttcttattctgctttagttacatcaaattggcggtgacacttgtcaaatatttccctcaggcttacatgaatttttactacaagtccacagaaggttggtcgatcggtaatgttctcctagatttcactggggggagcttttctctgttacagatgttcttgcagagctacaataatgaccaatggaccctgatctttggagatcctactaagtttgggctgggcgtcttttctatcgtattcgatgtggtgttttttatccagcatttctgtctttatcgtaagcggccaggatatgaccagttgaac

SEQ ID NO: 10302 - DNA, 1101 bp, synthetic construct
  misc_feature 1..1101: note = source = /note="Description of Artificial Sequence: Synthetic coding sequence"
  source 1..1101: mol_type = other DNA
atgattagaaattggttgaccatctttatcctgtttccacttaagcttgttgaaaagtgcgaatccagcgtcagcctgaccgttccacccgtcgttaaattggaaaacggctcttctaccaacgtctcactcactctgcggccacctctcaacgcaacattagtcatcaccttcgagatcaccttcaggagtaagaacatcacaatcttagaactgcctgacgaggtggtcgtccctcccggcgtgacaaactcaagcttccaggtgacaagccagaatgtgggccagttgacagtgtatcttcatggcaaccactctaatcagaccggacctagaatccggttcctcgtcatacggtcgagtgctatttccataattaatcaagttattggctggatctattttgttgcatggagcatctctttttatcctcaagtgatcatgaactggcggaggaaatccgtcattggactgtcatttgactttgtggctttaaaccttacaggcttcgtcgcttactccgtttttaacatcggcctgctatgggtgccatacattaaggaacagttcctgctcaagtaccccaatggtgtgaaccccgtcaactccaatgatgtcttcttttctcttcacgccgtggttctaaccctcatcatcatcgtccagtgttgcctgtacgaaaggggtgggcagcgcgtaagttggcctgctatcgggtttctggttcttgcttggcttttcgctttcgttaccatgatcgtggctgctgttggagtgactacatggctccagttcctgttctgcttttcttacatcaagctcgctgtaaccctggtgaaatactttccccaggcatacatgaatttctattacaagagcacagaaggctggagcattggcaacgtgcttctcgattttactggtggctcttttagtctgctgcaaatgttcctgcagagctacaacaacgaccagtggaccctgatctttggagatcctaccaaatttggactaggagttttcagcattgtgtttgatgtcgttttctttatccagcacttttgtctctacagaaaaagacccggatatgaccagttaaac

SEQ ID NO: 10303 - DNA, 1101 bp, synthetic construct
  misc_feature 1..1101: note = source = /note="Description of Artificial Sequence: Synthetic coding sequence"
  source 1..1101: mol_type = other DNA
atgattcggaactggctgaccatattcatcctcttcccgctcaagctcgtggaaaaatgcgagtcctcggtcagccttaccgtacccccggtggtcaaacttgaaaacggaagctcaactaacgtgtcgttgactttgcgccctccccttaatgcgaccctggtcattaccttcgagatcaccttcagatcaaagaacatcactattctggaactcccagatgaagtggtggtgcctcctggagtgactaactcctcattccaagtgaccagccagaacgtcggacaactcacggtgtacctgcatggcaatcactccaaccagaccggaccacgtattcgctttctcgtcatcaggagcagcgcgatcagcatcattaatcaagtgatcggttggatatactttgtagcttggtccatctctttctaccctcaggtcattatgaattggagaaggaagtccgtcattggtctttccttcgattttgtggcacttaacctcactggtttcgtcgcatattccgtgtttaacatcggcctcctgtgggtgccttacataaaggagcagtttttgcttaagtaccctaatggtgtcaatcctgtgaactcaaacgatgtgttctttagcctccacgcggtggtcctgactctgattatcattgtgcaatgttgcctctacgaacggggtggccagcgcgtctcgtggccggcaattggatttctggtcctggcatggctttttgcatttgtgaccatgatagtggcagcagtgggcgtgactacctggctgcaatttctgttctgtttttcatacataaagttggcagtcactcttgtgaagtacttccctcaagcgtacatgaacttttactacaagtcgaccgaaggatggtcgatcggcaatgtgcttctggattttaccggcggatcgttttcgctcctccagatgttcctgcaaagctacaacaatgatcagtggactctcatctttggggacccaacgaagtttggactcggcgtgttttctattgtgtttgacgtggtgtttttcattcaacatttttgtctctaccggaagcggcccggttacgatcagctgaat

SEQ ID NO: 10304 - DNA, 1101 bp, synthetic construct
  misc_feature 1..1101: note = source = /note="Description of Artificial Sequence: Synthetic coding sequence"
  source 1..1101: mol_type = other DNA
atgatcagaaattggctgaccatcttcatcttgtttccattgaagctagtggagaaatgtgagtcttcagttagcctgacggtgccgccggtagtgaagttggaaaatggcagcagcacaaacgtgtccctgacattaagacctcctctcaatgctactttggtgataacctttgagattaccttcagaagcaagaacattacgatcttggaacttccagacgaagtggtcgtgccacccggagtgactaattcttcttttcaggtcacctcgcagaatgtcggacaattgaccgtgtatcttcatggaaatcattctaatcagacagggccaagaattcgattcctcgtgatccgaagtagtgcaattagcatcattaaccaggtgattgggtggatctactttgttgcttggtctataagcttttacccgcaggttattatgaattggaggaggaaatctgtcatcggcttaagtttcgattttgtggctctgaaccttacaggcttcgtcgcttattcggtattcaacattggactgttgtgggtgccatacatcaaagaacagttccttctgaaataccccaacggggtgaatccggtcaactccaacgatgtattcttctcactccacgcagtggtgctgacacttattatcattgtccagtgctgtctttacgaacgaggcggtcagcgagtgagctggccagccatcggatttcttgtgctcgcctggctatttgccttcgtgacaatgatcgtcgccgccgtcggagttacgacctggctgcaattcttgttctgtttctcttacatcaagctggccgtaaccttggtgaagtacttccctcaggcctatatgaacttttattataagtcaaccgaaggatggtccatcggcaacgtcctgttggattttaccggcggaagcttttctctcctgcagatgtttttgcaatcctataacaacgaccaatggacccttattttcggcgaccccacgaagttcgggctgggtgtgttcagtattgtttttgatgtggtgttcttcatccagcatttttgcctttatcgtaagaggccagggtatgatcagctgaat

SEQ ID NO: 10305 - DNA, 1101 bp, synthetic construct
  misc_feature 1..1101: note = source = /note="Description of Artificial Sequence: Synthetic coding sequence"
  source 1..1101: mol_type = other DNA
atgatcaggaactggttaacaatcttcatactgttccctctgaaactggtggagaagtgcgagagcagcgtgagcttaaccgtcccgccggtagtgaagctggagaacggttcctcaactaacgtgagcctgaccctgcgccccccgctgaatgctaccctggtgatcacatttgaaattacctttaggagtaagaatattactattctggagttgcctgacgaggtggtcgttcctcctggggttacaaactcttcctttcaagtcacgtcccaaaacgttggccaactaaccgtgtacctgcacggtaaccactctaaccaaactggtcctagaattaggttccttgtcattcgctcctctgctatctcgattatcaatcaagtgattggttggatttatttcgtcgcatggtctatttctttctatcctcaggtgattatgaattggcgccgcaaaagcgttatcggcctttcgtttgactttgttgccctgaatctgaccggtttcgtggcgtacagcgttttcaatataggcctgctgtgggtgccatacatcaaggagcaattcctactgaagtatccaaatggtgttaatcctgtcaactccaatgatgtcttcttctcactgcacgctgtggtgctgaccctgattatcattgttcagtgctgtttgtatgagcgtggcggacagcgcgtgagctggccggcgatcggttttttagtgttagcgtggctgtttgcctttgttaccatgatagtcgcagccgtcggtgttactacttggttgcaattcttgttctgcttctcttatattaagctggcggtcacgcttgtcaagtactttccacaggcttacatgaatttctattacaagagcacggaaggctggagcatcggcaatgtcttactggattttacgggtggtagcttctctctgctccaaatgttcctgcaaagttataataacgatcagtggacactgattttcggtgacccgaccaagtttggactgggcgtcttcagcatcgtgtttgacgtggtattcttcatccagcacttttgtctgtaccgtaaaagaccgggctacgatcagctgaat

SEQ ID NO: 10306 - DNA, 1101 bp, synthetic construct
  misc_feature 1..1101: note = source = /note="Description of Artificial Sequence: Synthetic coding sequence"
  source 1..1101: mol_type = other DNA
atgatacgtaattggctaacgatatttatactatttccgctaaaactagttgaaaaatgtgaatcgtcggtatcgctaacggtaccgccggttgtaaaactagaaaatggttcgtcgacgaatgtttcgctaacgctacgtccgccgctaaatgcgacgttagtaataacgtttgaaataacgtttcgttcgaaaaatataacgatattagaattaccggatgaagtagttgttccgccgggtgtaacgaattcgtcgtttcaagttacgtcgcaaaatgtaggtcaactaacggtatatctacatggtaatcattcgaatcaaacgggtccgcgtatacgatttctagtaatacgatcgtcggcgatatcgataataaatcaagttataggttggatatattttgttgcgtggtcgatatcgttttatccgcaagtaataatgaattggcgacgtaaatcggtaataggtctatcgtttgattttgtagcgttaaatttaacgggttttgttgcgtattcggtatttaatataggtttactatgggttccgtatataaaagaacaatttctattaaaatatccgaatggtgtaaatccggttaattcgaatgatgtatttttttcgttacatgcggttgttctaacgctaataataatagtacaatgttgtttatatgaacgtggtggtcaacgtgtttcgtggccggcgataggttttttagttctagcgtggttatttgcgtttgttacgatgatagtagcggcggtaggtgtaacgacgtggttacaatttctattttgtttttcgtatataaaactagcggtaacgctagtaaaatattttccgcaagcgtatatgaatttttattataaatcgacggaaggttggtcgataggtaatgtattattagattttacgggtggttcgttttcgctattacaaatgtttctacaatcgtataataatgatcaatggacgttaatatttggtgatccgacgaaatttggtctaggtgtattttcgatagtttttgatgtagttttttttatacaacatttttgtctatatcgaaaacgtccgggttatgatcaattaaat

SEQ ID NO: 10307 - DNA, 1101 bp, synthetic construct
  misc_feature 1..1101: note = source = /note="Description of Artificial Sequence: Synthetic coding sequence"
  source 1..1101: mol_type = other DNA
atgattcgcaactggctgaccatctttattctattcccattgaaattggttgagaaatgcgagtctagtgtatctctaacagtcccgcccgtggtgaagctggaaaacgggtccagcacaaatgtgtccttaacactccgcccccccctaaatgcaaccctagtcatcacctttgagataaccttcaggagcaaaaatatcaccatcttagaattgccagatgaagttgtggtaccgcctggggtaacaaatagttcctttcaggtgacctcacagaacgtgggccaactgaccgtgtacctacatggcaaccactcaaaccagacagggccccggattcgctttctagtgatccgcagttctgccatcagcatcatcaatcaggtcatcggatggatctacttcgtggcctggtcgatttctttttacccacaggtgattatgaactggagacgaaaatcagtgatcggtctgtccttcgatttcgttgctctgaatctgacgggatttgtggcttacagtgtgttcaacatcggcctcctgtgggtgccttacattaaagagcagttcttattgaaatatcccaacggcgtcaatcccgtgaattctaatgatgtctttttctccttacacgccgtggtactgacattgatcattatcgtgcagtgttgtctttatgagcgggggggccagagggtaagttggcctgcaataggatttcttgtccttgcatggctcttcgcatttgtgactatgatagtggctgccgtgggagtaaccacatggctccagtttttgttctgttttagttatattaagctcgcagtgaccttggtcaagtactttccacaggcgtacatgaacttctactacaagtccactgaggggtggagtatcggcaatgttctgttggatttcacaggcgggtcgttctcgttacttcagatgttcctccagtcatacaacaatgatcagtggaccctgatttttggcgacccaaccaaattcggccttggagtattttctattgttttcgacgtggtgttctttattcaacatttctgtctttatcgtaagagaccaggttatgatcaattgaat

SEQ ID NO: 10308 - DNA, 1101 bp, synthetic construct
  misc_feature 1..1101: note = source = /note="Description of Artificial Sequence: Synthetic coding sequence"
  source 1..1101: mol_type = other DNA
atgatcagaaattggctgaccatatttatattgttcccacttaaattggtggagaagtgcgaaagttccgtctctctcactgtcccaccggtagtcaagcttgagaacggttctagtacaaatgtgtccctgactttgaggccgcccctgaacgccactcttgtaataacattcgaaataaccttccggagtaaaaatataacaatactcgagctccccgatgaagtcgtcgttccaccaggggtgacgaactcatcttttcaggtgacctcacagaatgtcgggcagcttactgtgtacttacatgggaatcacagcaatcaaaccggcccaagaatccgcttcctagtaattagaagctcagctattagcatcatcaaccaggtgatcggctggatctatttcgttgcttggagtatctctttctacccgcaagttatcatgaattggagaaggaaaagcgttatcgggctcagtttcgattttgtggcgctgaatctaacaggattcgttgcctactctgttttcaacatcggacttctctgggtgccttacatcaaagagcagtttctgctgaaatatccgaatggagtgaatcccgtgaactccaacgacgtttttttctccttgcacgccgtagtcttgactctgatcatcatcgtgcagtgttgcttgtatgagagaggcggtcagcgagtgagctggcccgccatcggattcttagttctggcttggttatttgctttcgtgacaatgattgtggccgccgttggggtaaccacttggctccagtttcttttctgtttctcctatattaagctcgccgtgacactcgtgaagtactttccacaagcatatatgaatttctactataaaagtaccgaaggatggtctattggaaatgtgctgcttgactttaccggcggatctttttctctactacaaatgttcctgcagtcttataacaacgatcaatggactctgatctttggtgacccaacaaagtttgggctgggtgtgttctcaatagtctttgacgtggtttttttcattcagcacttctgtctgtataggaagcggccgggttacgaccagctgaac

SEQ ID NO: 10309 - DNA, 1101 bp, synthetic construct
  misc_feature 1..1101: note = source = /note="Description of Artificial Sequence: Synthetic coding sequence"
  source 1..1101: mol_type = other DNA
atgattcgaaattggctcaccatatttattttgttcccattaaagttggtcgaaaagtgcgaatcatctgtctctctgactgttccccctgttgttaaactggaaaacggatctagcacgaatgtttcgttgacactaagaccacctttgaacgctactttggtgattacattcgaaattacctttagaagtaagaatatcaccatccttgagctgccggatgaagttgtggtaccaccaggtgtcactaacagctcgttccaagtgacttcccaaaatgtcggacaacttacggtttatcttcacggcaaccattcaaaccaaactggaccgcgtattagatttcttgtgattagatcttcagccatttccatcatcaaccaagtaattggttggatttattttgtggcttggtctatcagcttctaccctcaggtcattatgaactggcgcagaaaatcggtgataggactatctttcgatttcgtcgcgttgaatctaaccggattcgttgcgtatagcgtttttaacatcgggcttctatgggttccatatatcaaagaacagttccttttgaaatatccgaatggtgttaaccctgttaattccaatgacgtgtttttctcgcttcacgctgttgttctcacacttattatcatcgtacaatgctgtctttatgaaaggggaggacaacgtgtatcatggccagcgattggattccttgttttggcttggcttttcgcgttcgttaccatgatcgttgctgccgtgggagtaactacgtggctgcaattccttttttgtttttcgtatatcaagctcgcggtaacattggttaagtattttcctcaggcttacatgaatttttactataagtcgacagagggatggtctattggaaacgttctacttgatttcacagggggttcgtttagtctgttgcaaatgtttctgcaatcatataataatgaccaatggactctcatcttcggcgatccaacgaagtttggactcggcgtattttccatcgtctttgatgttgtctttttcatccaacacttttgcctctacagaaaaagaccagggtatgaccaacttaat

SEQ ID NO: 10310 - DNA, 1101 bp, synthetic construct
  misc_feature 1..1101: note = source = /note="Description of Artificial Sequence: Synthetic coding sequence"
  source 1..1101: mol_type = other DNA
atgattagaaactggctgaccatattcatcttgttcccactgaaactcgtcgaaaagtgcgagtcttcggttagtctaacagtgcccccagtcgttaaactggagaacggctcctcgacaaacgtctcattaacactacggccccctttgaatgccactctggtgatcacttttgaaataacctttcgttcaaagaatattactattctcgaactgcccgacgaggtcgtcgtgccacctggagtcactaatagttcgttccaggtgacatcacagaacgtgggccagcttactgtttatctccacgggaatcattccaaccagacaggaccccggatcagatttctggtgatccggagtagcgcaatatcgattatcaatcaggtgatcggctggatttacttcgtggcttggagcattagcttttatccccaagtgatcatgaactggcgaaggaaatctgtgattggactgtccttcgattttgtcgctctgaatttgaccgggttcgttgcttatagcgtttttaatatcggtttgttgtgggtaccatacatcaaggagcagttcttactcaagtacccaaatggtgtaaaccctgttaacagcaatgacgtattcttcagtcttcatgcggtcgtacttacgcttatcatcatcgtacaatgttgtttgtacgagcgaggaggtcaacgtgtttcttggccagctatcggcttccttgtgttggcctggctttttgctttcgtgaccatgattgtggctgccgtcggcgttactacttggctacagtttctcttctgtttctcctatatcaagctggctgtaaccctcgttaagtacttccctcaggcatatatgaatttctattacaagtctactgagggttggagcatagggaatgtgctcctggatttcacaggaggaagcttcagcctgctgcagatgttcctgcagtcatacaataatgatcagtggacgctgatcttcggggaccctaccaaattcgggcttggagtcttctcaatcgtgttcgacgttgtgttctttattcagcacttttgcttgtaccgaaagagacctggttacgatcagctgaat

SEQ ID NO: 10311 - DNA, 1101 bp, synthetic construct
  misc_feature 1..1101: note = source = /note="Description of Artificial Sequence: Synthetic coding sequence"
  source 1..1101: mol_type = other DNA
atgatacgtaactggttgactatttttatactgtttccgcttaagttggtcgaaaagtgtgagtcatccgttagtctcacagtgccccctgtggtgaaactcgagaatggtagttccactaacgtatccctaaccctcaggcccccgttgaacgcgacgctcgtgatcactttcgagatcacctttaggtcaaagaatatcaccatcttggagctgccagacgaggttgtggtgcctcccggcgtgacaaactccagcttccaggttacctctcaaaacgttggtcaactcaccgtgtaccttcacgggaatcacagcaaccaaacggggccccggattcgctttctggttattcgctccagcgcgattagtataattaaccaagtgatcggctggatctattttgttgcctggtcaatcagtttttacccgcaggtaattatgaactggcgtcggaagtcagtcatcgggctgtctttcgatttcgttgccctgaaccttaccgggtttgttgcttattccgtgttcaacataggcctgttgtgggttccgtatattaaagagcagttcttactgaaatatccgaacggggttaaccccgtgaacagcaacgacgtattcttctcccttcacgccgtagtcttgaccttgatcatcatcgtacagtgctgtctgtatgagcgcggtggtcaacgggtgtcctggcccgcgataggattcttagtgctagcctggctgtttgctttcgtgaccatgatcgtggctgccgttggggtgacaacctggctgcagtttctgttctgcttctcttatatcaaactcgccgtgacattggtgaagtacttccctcaagcctacatgaacttttattacaaaagcaccgaggggtggagtattggtaacgttttacttgacttcaccggcgggtcattctcactcctacagatgttcttgcagtcgtacaataatgatcagtggacactcatatttggggacccgacaaagttcggtctgggagtgttctccattgtgttcgacgtcgttttctttattcagcacttctgtctttacaggaagagaccaggatacgaccagctcaac

SEQ ID NO: 10312 - DNA, 1101 bp, synthetic construct
  misc_feature 1..1101: note = source = /note="Description of Artificial Sequence: Synthetic coding sequence"
  source 1..1101: mol_type = other DNA
atgattcgtaactggcttaccatcttcattctgttcccgctgaagttggttgaaaagtgtgagtcttcggtctcgctcaccgtcccccccgtcgtcaaattggagaacggttcctccaccaacgtcagccttacgttgcgtcctcctctgaacgctacccttgttatcaccttcgaaatcaccttccggtccaagaacattacgatcctggagctccctgatgaggtcgtcgtgccccctggcgtcacgaactcatctttccaggtcacctcgcagaatgtcggtcaactgacggtctacttgcacggcaaccactccaatcaaaccggcccgcgcatccggttcctggtcatacggtcctctgctatctcgatcatcaaccaagtgatcggatggatctacttcgttgcgtggtcaattagcttttacccacaggtgatcatgaactggcggagaaagagtgtaatcggcctgtcgttcgacttcgtggcgctgaacctgaccggttttgtggcttacagcgtcttcaatatcggcctgctttgggtcccctacattaaggagcagttcttgctcaagtaccctaacggagtgaaccctgtcaactcgaatgatgtctttttcagcctccacgcagtcgtattgaccttgattatcattgtacaatgctgcttatacgagcgcggcggtcaacgtgtgtcctggcctgctattggctttctagtgctggcgtggctgttcgcattcgtgaccatgatcgtcgccgccgttggtgtgaccacttggctgcagtttctcttctgcttctcctatatcaagctcgcagtcacccttgtgaagtatttcccccaagcttacatgaacttctactacaaatccacggagggatggtcaataggaaacgtgttgcttgacttcacagggggatcattctctctccttcaaatgttcctgcagtcgtacaataacgatcagtggacgctcatcttcggcgatccaaccaagtttggccttggtgtgttctctatcgtattcgacgtcgtcttctttattcagcacttttgcttgtacaggaagcgtcccggctatgatcaactcaac

SEQ ID NO: 10313 - DNA, 1101 bp, synthetic construct
  misc_feature 1..1101: note = source = /note="Description of Artificial Sequence: Synthetic coding sequence"
  source 1..1101: mol_type = other DNA
atgatccgcaattggctgacaatcttcattctattcccccttaagttggtggaaaaatgtgagtcgtcggtttctctgacggtgccacctgttgttaaattggaaaacggttcatcaacgaacgtgtctctgacgcttcgcccgccgttgaacgctactctagtgataacattcgaaatcaccttccgtagcaaaaatataaccattctagagctccccgatgaggtggtcgtcccacccggtgttacgaattcatccttccaggtcaccagtcaaaacgtgggtcagcttactgtttatttacacggcaatcatagcaatcagactgggccccgaattagatttctggtcatccgatcaagcgccatctctattataaatcaggtcattggctggatctacttcgttgcatggtccatttccttttacccccaggtgatcatgaactggcgcaggaagagtgtgatcggcctctccttcgacttcgtcgccttaaatctcaccgggtttgtggcttattccgtttttaacatcggcctcttgtgggtcccatacatcaaagaacagtttctcctgaaatacccaaacggagtcaaccctgtaaatagcaacgacgtgtttttttccttgcacgccgtagtgctgacccttatcattatagtgcagtgttgtttgtacgagcgcggtggacagcgcgtgtcttggcccgcgatcgggtttctagttttagcctggttgttcgcgtttgtcacaatgatcgtggctgcagtgggcgtgaccacttggctgcagtttctcttctgcttttcctacatcaagcttgcagtaactctcgtgaaatacttccctcaggcttacatgaacttctactacaagagtaccgagggttggtctattggaaacgtcttgctcgatttcactggaggatctttctcactacttcaaatgtttctgcagtcctacaacaacgaccagtggaccctcatctttggcgaccccaccaaatttggcttgggcgtgtttagcattgtgtttgacgttgtattctttatccagcacttctgtctgtatcgcaaaagacccggttacgatcaactgaac

SEQ ID NO: 10314 - DNA, 1101 bp, synthetic construct
  misc_feature 1..1101: note = source = /note="Description of Artificial Sequence: Synthetic coding sequence"
  source 1..1101: mol_type = other DNA
atgataaggaactggctgacaatctttattcttttccccttgaagctggtggaaaaatgtgagtccagcgtctcacttactgtcccacctgttgttaaactcgagaatggctcctccacaaacgtgagcctgacgttgcgcccccccctgaacgcaacattggtcatcacattcgagataacgttcaggtccaaaaacatcaccatactggagcttcccgatgaagtggtagttcccccgggtgtaacaaacagtagcttccaggtaacttcccagaacgtcggacagctcacggtgtacctgcacggtaaccattctaaccagactggccccaggatccgatttcttgtgataaggagttctgcaatcagtattataaatcaggtgattggctggatttactttgtggcgtggagcatctccttctaccctcaggtgattatgaattggaggcggaagtctgtcatcggactgtcattcgacttcgtggccctgaacctgacgggtttcgtggcctacagtgtctttaatattgggttgctgtgggtcccgtatataaaagagcagtttctcctcaagtaccccaacggagttaaccccgttaatagcaatgatgtgtttttctctctgcacgctgttgtcctcaccctcatcatcattgtgcagtgctgcctctatgagagagggggacagagagtctcttggcccgccattggattcttggtcctcgcatggttgttcgcctttgttaccatgatcgtggcggcggtcggggttactacctggcttcagtttctcttttgtttcagctacattaagttggcggtcactctcgtgaaatatttcccacaggcgtacatgaatttctactacaaatccaccgagggctggagcattggaaacgttctgttggattttactggaggctctttcagcctgctgcagatgtttctccagagttacaacaatgaccagtggacccttattttcggcgaccctacaaaatttggtttgggcgtgttttcaattgtcttcgacgttgttttctttatccagcatttttgtctgtacaggaagcggcccggatacgaccaactgaat

SEQ ID NO: 10315 - DNA, 1101 bp, synthetic construct
  misc_feature 1..1101: note = source = /note="Description of Artificial Sequence: Synthetic coding sequence"
  source 1..1101: mol_type = other DNA
atgataaggaactggcttacaatcttcatccttttccccctcaaattagtggaaaaatgcgaatcctcggtctcgttaactgtccctcccgtggtgaagttggaaaacggatcaagtaccaatgtgtcactgaccctgaggcctcctctgaatgctacactggtaatcacatttgagataacattccgatccaagaacatcacaatactggaacttcctgacgaagtggttgtccctcctggggttacgaatagtagcttccaggtaacaagccagaacgttggacagttaacagtataccttcacgggaatcactccaaccagactgggccccgaatccggtttcttgttatccgttcttcggccatttctattattaatcaggtgatcggatggatatacttcgtggcgtggagtatctccttctacccccaggtgatcatgaactggcgccggaaatccgttattggactgagtttcgatttcgttgcactcaatctcacaggctttgtagcctacagcgtgtttaacatcgggctcctttgggtcccatatatcaaagagcaatttctcctaaagtatcccaacggcgtgaatccagtaaattccaatgatgtgttcttctctcttcatgccgtggtcctcacactgataatcatcgtgcagtgttgcctgtacgaaagagggggacagagggtgtcttggcccgccatcgggttcttggtcctcgcatggctttttgccttcgtgacaatgattgttgccgctgtcggcgtgaccacctggctgcagttcctgttttgtttttcctacattaaactggctgtgactctagtgaaatatttccctcaggcctacatgaatttctattacaaatctacggaaggttggtcaatcgggaacgtgctgttagatttcactgggggctcattcagccttctccagatgtttctgcagtcttataacaacgatcagtggacactcatcttcggggaccccaccaagtttggactgggcgtctttagcatcgtgttcgacgtggtgttctttatccagcacttttgcctgtataggaagcgccctgggtacgatcagctgaat

SEQ ID NO: 10316 - DNA, 1101 bp, synthetic construct
  misc_feature 1..1101: note = source = /note="Description of Artificial Sequence: Synthetic coding sequence"
  source 1..1101: mol_type = other DNA
atgataagaaattggctgaccatattcattttgttcccactaaaactggtggagaagtgtgaatctagcgtgagtctaaccgtgcctcccgtagtaaagctggaaaacggttcctccacgaacgtcagtctgactcttcgccctcctttaaacgcgacattggtgattaccttcgaaattacctttcggtcgaaaaatattaccatcctggaattgccggatgaggtcgttgtccctccaggagttacaaactcgtccttccaagttacgtcgcagaatgttggccagctgaccgtctatttgcacggaaaccatagtaaccagacggggccacgtattaggttcctggtgatccgcagctcagccatttcgattatcaatcaggttattgggtggatttattttgtcgcctggtccatttccttctacccgcaagtcattatgaactggcgccgcaagtcggtgataggactctcgtttgatttcgtggccttgaatttgactggatttgttgcatactccgttttcaacattggtcttctttgggttccttatataaaggagcagttcctgctcaaatatcccaatggcgtgaaccccgtaaattctaatgacgtttttttctctctccacgccgtcgtcctcacgttgatcattatcgttcagtgctgtctatacgagaggggcgggcaacgcgtctcttggcccgcaatagggtttcttgtccttgcttggctctttgcttttgtgactatgattgtcgcagcagttggcgtgacgacttggctccagttcctattctgtttctcatatattaaactcgcagttactttagtcaagtatttccctcaagcctatatgaacttctactataagtcgacggagggctggagcatcggtaatgtattgttagattttacggggggaagcttcagcctgctccaaatgttcctgcaatcgtataataacgatcagtggacccttatctttggagatccgacaaaattcggtctgggcgtattctcaatcgtatttgatgtcgttttcttcatacagcatttctgtctttatcgtaagcgtccaggttacgaccagctgaac

SEQ ID NO: 10317 - DNA, 1101 bp, synthetic construct
  misc_feature 1..1101: note = source = /note="Description of Artificial Sequence: Synthetic coding sequence"
  source 1..1101: mol_type = other DNA
atgatcaggaattggctcactatttttatactgtttccactaaagctggtggaaaaatgtgagagcagtgtgagccttacggtgcctcccgtggttaagttagagaacggatcatctaccaacgtaagcctgaccttgcggcctccactgaacgctacactggtaattacattcgagataactttccggagcaagaacatcactatcctggagctgccagatgaagtggtggtacccccaggggtgaccaacagttcctttcaggtgaccagccagaacgtggggcagctgactgtgtacctccacggcaaccatagtaatcagacggggccacgtattcggtttctggtcattagaagctcagcaatttctattattaatcaggttatcggctggatctatttcgtcgcttggtccatatctttctacccccaagtcattatgaattggaggagaaagagtgtgatcggtttgagctttgatttcgtcgcattgaatctgactggtttcgttgcgtactcagtgttcaacatcggccttctgtgggtgccttacataaaggaacagttcttattgaagtacccaaacggcgtgaatccagtcaattccaatgacgtgttcttctcactgcacgcggtcgtgcttacactaatcatcattgtccagtgttgtttgtacgaacgggggggtcagagggtttcatggccagctatcgggtttcttgtgcttgcctggctattcgcttttgtaacaatgatcgtagccgcggtaggcgttactacttggctgcaattcctcttttgttttagctacatcaaactagccgttacactcgttaagtattttcctcaggcctacatgaatttctattataagtccacagagggatggtcgatcgggaacgtgctgctggacttcacaggcggctctttcagtctgctccaaatgtttctccaaagttataataatgaccagtggacactcatcttcggagacccaacgaaatttggccttggggtattttccattgtgttcgacgtagtgttctttattcagcatttttgtctgtatcgaaaaaggcccgggtatgaccagctaaat

SEQ ID NO: 10318 - DNA, 1101 bp, synthetic construct
  misc_feature 1..1101: note = source = /note="Description of Artificial Sequence: Synthetic coding sequence"
  source 1..1101: mol_type = other DNA
atgatcagaaactggctgaccatctttatcctgtttccattgaagctcgtggagaagtgtgagtctagtgtcagcctgactgtgcccccagtggtgaagctggagaatggctcttctaccaacgtttctctcaccttgcggccacctctgaatgcgactctagtgatcactttcgagatcacatttcggtccaaaaacatcacaatcctggaactaccggatgaagtggtagtgcctccaggagttactaactcttcatttcaggtgaccagccagaatgtcgggcaactgactgtgtatctacacggtaatcattccaatcagactggccctcgcatacggttcctggtgatccggagctccgctatctcaattatcaaccaagtgatcggttggatctactttgtcgcatggtctatctccttctatcctcaggtgatcatgaactggaggaggaaatccgtgatagggctatccttcgacttcgtcgctctgaaccttacggggttcgtcgcgtatagtgtgtttaatatcggcctgctgtgggtgccctacattaaggagcagtttctgctgaagtacccaaatggcgttaaccccgtgaacagcaacgacgtcttcttttctctccacgccgtggtcttgacgctgatcatcatcgtgcagtgctgtctgtacgaacgcggagggcagcgggtaagttggccagcaattgggttcctggttctggcctggcttttcgcattcgtgactatgatagtggccgcagtgggcgtgactacgtggctccagttcctgttttgcttctcctacattaagttggcagttaccctcgtgaagtacttcccgcaggcctacatgaacttctattataagtcaacggagggctggtcgatcggaaatgtcttgctcgacttcacagggggttctttttccttgctgcagatgttcctgcaatcatataataacgaccagtggaccttaatattcggagaccctaccaaattcggactgggcgtatttagcatcgtctttgacgtagttttctttattcagcacttctgcttgtacaggaagagacctggttatgatcagctgaac

SEQ ID NO: 10319 - DNA, 1101 bp, synthetic construct
  misc_feature 1..1101: note = source = /note="Description of Artificial Sequence: Synthetic coding sequence"
  source 1..1101: mol_type = other DNA
atgattcggaactggctgaccattttcatcctgtttcccttaaaacttgtggagaagtgtgaaagcagcgtctcccttactgtgccacccgtggtaaaactggagaacggcagtagcactaacgtgagtttgaccttacgtccgcctctgaatgcaacattagtcattacatttgagataaccttccgcagtaaaaacatcacgatcctggaattaccggacgaggttgttgtcccacccggcgttaccaactcatccttccaggtgacctcccagaacgtgggccaactgactgtctatctgcatggcaatcacagtaatcagactggccccaggatcaggtttctcgtgattcgcagcagtgcgatatccatcattaatcaggtcattggctggatatacttcgtggcgtggtctatcagtttttatcctcaggtcattatgaattggagacgcaaaagcgtaattgggctcagttttgacttcgtggccttaaacctgaccggctttgtggcctattctgttttcaacatcggcctactgtgggttccatatataaaggagcagttcctgctgaagtacccaaatggcgtaaacccagttaattccaacgacgtgttttttagcttgcacgctgtagtcctcactctgattattatagtccagtgctgcctttacgagaggggcggtcagagggtgtcgtggcccgctatcggtttcctggtgcttgcctggctgttcgccttcgttactatgatcgtcgctgccgtaggagtgaccacttggctgcagttcctgttttgttttagttatatcaagttggccgtgacactggttaaatactttccacaggcttatatgaatttttactataagagtaccgagggctggtctataggaaatgtgctcctggacttcaccggcggctcctttagtctgctccagatgttcctgcaaagctacaataacgaccagtggaccttaatttttggcgatccaaccaagtttggcttgggagtattcagcatcgtgtttgatgttgtgttctttatccagcacttctgcctgtataggaagagaccgggatatgaccagctgaat

SEQ ID NO: 10320 - DNA, 1101 bp, synthetic construct
  misc_feature 1..1101: note = source = /note="Description of Artificial Sequence: Synthetic coding sequence"
  source 1..1101: mol_type = other DNA
atgatccggaattggttgacaatcttcatcctattcccactgaagttagttgaaaaatgcgaatcttccgtctccctcacagtgccacccgtagtcaaactcgagaatggctcctcaactaatgtatcactgacgttacggccccccctgaacgcgactttggtgatcaccttcgagattacctttaggtctaaaaacatcactattctcgagcttcccgatgaagtggtggttcctccgggggttacgaactcctccttccaggtaacctctcagaatgtgggtcagctcactgtgtatttacacggcaaccactccaaccagacgggaccccggattcgatttcttgtgatcaggtcctccgctatttcaataattaaccaggtgataggctggatttattttgttgcttggagcattagcttttatccgcaggtgattatgaattggagaagaaagtccgtgatcggtctgagcttcgattttgtcgcccttaaccttaccggtttcgttgcttattctgtatttaacataggcctgctgtgggtgccctatatcaaggagcagtttctccttaagtatccgaatggtgttaatcctgtgaattcaaatgacgttttttttagcctacatgccgtggtcctgacgctgattatcatcgtacagtgttgcctgtatgaacgaggcgggcagagggttagctggcccgccatcggatttctggttctcgcctggcttttcgcatttgtcaccatgatagtggccgccgtcggggtgacgacctggttacagttccttttctgcttttcctacatcaaactcgcagttacactggtcaaatactttccacaggcctatatgaacttctattataaaagcactgaaggttggagcatcgggaatgtccttctggattttacaggagggtccttttccttactccagatgtttcttcagtcatacaataatgaccaatggacattaatttttggcgaccctacaaagtttggcctgggcgtgttctccatagttttcgatgtcgtattttttatccagcacttttgcctttacaggaagagacccggctatgatcagctgaat

SEQ ID NO: 10321 - DNA, 1101 bp, synthetic construct
  misc_feature 1..1101: note = source = /note="Description of Artificial Sequence: Synthetic coding sequence"
  source 1..1101: mol_type = other DNA
atgattagaaactggctcactatcttcattctctttcctctgaagctcgttgaaaaatgtgagtcttcagtctctctgaccgtgccaccagttgtcaagttggaaaacggttcttctacaaacgtttcacttacactcaggccaccactcaatgctaccttggtaatcacctttgaaatcacattccgctcaaaaaacattactattctggaattgccagacgaggttgttgtgccaccgggcgtgaccaactcatccttccaggtaacgtctcagaacgtaggccagctcactgtctatttgcatggcaatcactcaaaccagactggacccagaatcagattcttggtgatccgcagttcagctattagcattataaaccaggtgattggttggatctactttgtggcctggtcaatcagtttctaccctcaggtcatcatgaactggagacgcaagtcagttatcggactctcttttgacttcgtggcactgaacctcaccggtttcgtggcttattctgtcttcaacatcggcctgttgtgggtcccatacatcaaggagcagttcctgctcaagtacccaaatggtgtaaaccccgttaactctaacgacgttttcttctccctgcacgccgtggtactgacgctcattataattgtacagtgttgcctgtacgagcgcggcggccaacgcgttagctggccagccattggttttttggttctggcctggcttttcgcatttgttacaatgatagtggcggccgtgggtgtgactacttggcttcagttcctcttctgcttcagttatataaagttggctgtgactctcgtgaagtacttcccacaagcctacatgaacttctactacaagtccactgagggctggagcattggtaatgttctgttggactttacaggtggttccttctctctgttgcagatgtttcttcaatcatacaacaacgatcagtggaccctgatctttggcgaccctaccaagttcggattgggagtcttctcaattgtgttcgacgtggtcttttttattcagcacttttgtttgtaccgcaagaggccaggatacgaccagcttaac

SEQ ID NO: 10322 - DNA, 1101 bp, synthetic construct
  misc_feature 1..1101: note = source = /note="Description of Artificial Sequence: Synthetic coding sequence"
  source 1..1101: mol_type = other DNA
atgataaggaattggctgacaatcttcatactatttccgctcaaattggtcgaaaagtgcgaatcatcggtgagccttaccgtaccccctgttgttaaattggagaacggaagtagcaccaatgtgtcattgaccctcaggccccccttaaacgctaccctggtgattaccttcgaaattacatttcgctcaaagaacatcacaattcttgagctccccgacgaggtggtcgttcctcctggagttacaaacagctcctttcaagtgactagtcagaatgtgggtcaactgaccgtttacctccatggaaaccatagcaatcagaccgggccaaggatcagattcctggttatcagatcctcagccatttccattatcaaccaagttatcggctggatctatttcgtggcctggtcaatctccttttatcctcaggtgatcatgaactggcgaaggaagagtgtgatcggactgagtttcgattttgtggccctgaaccttacaggatttgttgcatatagtgtctttaacatcggcctcctttgggttccctacatcaaggaacagtttctcttgaagtatcctaatggcgtgaaccctgtaaacagtaatgacgtcttcttcagtcttcacgcagtggtgctcaccctgatcataatagtccaatgctgcctgtatgagagaggaggacagcgagtctcatggcctgcgattggcttcctcgtcctggcatggctgttcgccttcgtcacaatgatcgtggctgctgtgggagtcaccacctggctgcagtttcttttctgtttctcgtacatcaaactcgccgtgacccttgtgaagtattttccccaggcctacatgaatttttactacaaatctactgaaggatggtccataggcaatgtgctgctggacttcaccggaggttcgtttagtctgttacagatgttcctgcaaagctataacaacgaccaatggactttgatatttggggaccctaccaaattcggattaggggtcttcagcatagtgttcgatgtggtgtttttcatccagcacttctgtctgtatcgcaaaagaccaggttacgatcagctgaac

SEQ ID NO: 10323 - DNA, 1101 bp, synthetic construct
  misc_feature 1..1101: note = source = /note="Description of Artificial Sequence: Synthetic coding sequence"
  source 1..1101: mol_type = other DNA
atgatcaggaactggcttacaatcttcatcttgttccccctcaagctcgtggagaagtgcgaatcatcagtgtcacttacagtcccaccagtcgtgaagctggaaaacggatcatccaccaatgtctctctgacacttagaccacctctgaacgccaccctggtgatcacattcgagataacctttcgcagtaagaatattacaattctggagctgccagatgaagtcgtcgttcctcctggtgtcacaaactcttccttccaagttacgtcccagaacgtgggacaactgaccgtctatctccatggcaatcactccaatcagacgggacccaggattcggtttctggtgatcaggtccagtgctatcagtattatcaaccaggtaatagggtggatttacttcgtggcttggtccatcagcttttatccacaggtgattatgaactggaggcgaaagtctgttataggacttagcttcgactttgtcgccctgaatctgacgggcttcgtggcgtacagcgtgttcaacatcgggttgctttgggtaccgtatataaaagagcagttcctcctgaagtatcctaacggagtgaatccagtgaattcaaacgacgtcttcttctctctccacgccgtggtgttgactctgattattatagtgcaatgttgcctgtacgagcgcggtggccagcgcgtcagctggcctgctattggtttcctggtgctggcttggctgttcgctttcgtcaccatgatcgtcgccgccgtaggggtgacaacttggctccagttcttgttttgctttagctacattaaattggcggtcacactcgttaaatactttccacaggcttacatgaacttctattacaagtccaccgaaggctggtccattggcaatgttctgttggattttacagggggaagcttttctctgctgcagatgttcctccagagctacaataacgaccagtggaccctgattttcggagatccaacgaaattcggactcggtgtgttttctatcgtgttcgacgtggtattcttcatacagcacttctgcctgtacagaaaaagacccggatatgatcagcttaat

SEQ ID NO: 10324 - DNA, 1101 bp, synthetic construct
  misc_feature 1..1101: note = source = /note="Description of Artificial Sequence: Synthetic coding sequence"
  source 1..1101: mol_type = other DNA
atgatccggaattggctaactatttttatcctgttccctctgaagctcgttgaaaagtgtgagagttcagtgtcgctcaccgtgccccctgtggtgaagttggagaatggatccagtacgaatgtgtccttgaccctccgtcctcctctcaacgcgaccctggttataactttcgaaatcacttttagaagtaaaaatataaccatcctggagctgccagatgaagtggtagttccgccgggggtaactaactccagcttccaggtaacgtctcagaacgtcgggcaactcaccgtgtatctgcacggcaatcacagcaatcagacgggaccccggatacgcttcctggtcatacgatccagcgcgattagtattatcaaccaagtgataggttggatatattttgtggcatggtcgatctcattctacccacaggtgatcatgaattggaggcgcaaaagtgtcatcgggctttcgttcgacttcgtagccctgaatttaacgggcttcgtggcctattctgtttttaatattggtctactctgggtgccctatattaaggaacaattcctgcttaagtaccccaatggcgtgaaccctgttaacagcaacgacgtgttcttctccctgcacgccgttgtgttgacattaatcataattgtacagtgctgcttgtacgagagggggggccaaagggtgagttggccggctataggctttctagtcctggcatggctgtttgcttttgtcaccatgattgtggctgccgtgggagtcactacttggctacagtttttgttttgcttctcttacatcaaactggcagtgaccttggttaaatatttcccacaggcctatatgaatttctattacaagtctaccgaagggtggtcaatcggcaacgtgctgctcgatttcaccgggggctcattcagccttctacagatgttcctgcagtcatataacaacgatcagtggacgttgatctttggtgatcccaccaagtttggacttggcgtgttctccatagtgttcgacgtcgtcttttttattcagcatttttgcttatatcggaagagaccaggatacgatcagttgaac

SEQ ID NO: 10325 - DNA, 1101 bp, synthetic construct
  misc_feature 1..1101: note = source = /note="Description of Artificial Sequence: Synthetic coding sequence"
  source 1..1101: mol_type = other DNA
atgattagaaattggttgaccattttcatactctttccccttaagctggtggaaaaatgtgaatcttctgtaagcttgaccgtgcccccggtcgtgaaactggaaaacggcagcagtaccaatgtgagcctgaccctcaggccgcccttaaatgctaccctggtgataactttcgagatcacgtttcggtctaagaatatcacaattctggagctaccagatgaggttgtggtcccaccgggggtcaccaacagctcctttcaagtcacgagccagaatgtgggacagctgacggtctacctccatggaaatcattcaaatcaaactggtccacgcatcaggtttttggtcatcagatcttcagctattagcattatcaaccaggtgatcgggtggatctattttgtcgcgtggagcatctccttctatccccaggttatcatgaattggcgacgtaaatcagtgatagggttgtcgttcgacttcgtcgcgttaaatcttaccggcttcgttgcatacagcgtgtttaacattggcctgctgtgggttccgtatattaaggaacagttcttgctaaaataccccaacggagtgaacccagtcaactctaatgacgtcttcttttcccttcacgccgtggtccttactttgataatcatagtgcagtgctgtctgtacgaaagaggcgggcagagagtttcatggcctgctatcggatttttggtcctcgcgtggctctttgcgttcgtcacgatgattgtagcggctgtgggggtgaccacctggcttcagtttctgttctgtttttcctatatcaagcttgcggtcaccctggtgaagtacttccctcaggcttacatgaatttttactataaatccactgagggctggtccatcggcaacgtgttgctcgattttactgggggttcctttagcttactgcagatgttcttacagtcctacaataatgaccagtggaccttgattttcggcgatcccactaaatttggtcttggagttttctcgatagtgtttgatgtggttttttttatccagcacttttgtctttatcgtaaacgtcctggctatgaccagctcaac

SEQ ID NO: 10326 - DNA, 1101 bp, synthetic construct
  misc_feature 1..1101: note = source = /note="Description of Artificial Sequence: Synthetic coding sequence"
  source 1..1101: mol_type = other DNA
atgattaggaactggctgaccatctttatactgttccctcttaaactcgtagagaaatgcgaatcctcagtctctcttaccgtgcccccggtggtgaaactggagaatggatccagcaccaacgtctcattaaccttaagacctcctttgaacgccaccctggtcataacctttgaaattacctttagatcaaagaatattacaattctcgagctccccgacgaggtggtcgtgcctccaggtgtcacaaatagttcgtttcaggttacaagccagaacgtgggacagttgacagtctacctccacgggaatcactccaaccagaccggcccgaggatccggttcctggtcattcgcagcagcgctattagcataattaaccaggtgatcggttggatctatttcgtggcatggagtataagtttttatccccaggtaatcatgaactggagaaggaaaagcgtaatcggcctgtcatttgattttgtggcactgaacctgactggattcgttgcctattcggtgttcaacataggcctgctgtgggtgccgtacattaaagagcagttcttattgaaatatccaaatggagtgaatcccgtgaactcaaatgatgtgtttttttcccttcatgcagtggttctgacattgattattatcgttcagtgttgtctgtatgaaaggggagggcagcgtgtgagctggccagctatcgggttccttgtcttagcatggttattcgcattcgtgacaatgattgtagccgctgttggagtgaccacttggttgcagttcctgttttgtttctcatacattaagcttgcagtgaccctagttaagtattttcctcaggcctacatgaatttctactataagagcactgaaggctggtctatcggcaacgtcttgctcgattttacagggggtagcttcagcctcctgcagatgttcctccagtcatacaacaatgatcagtggacgttgatcttcggagatccaaccaagtttggacttggcgtgttcagtatagtttttgacgtggtatttttcatccaacacttttgcttgtatagaaaacggccaggctatgaccaactgaat

SEQ ID NO: 10327 - DNA, 1101 bp, synthetic construct
  misc_feature 1..1101: note = source = /note="Description of Artificial Sequence: Synthetic coding sequence"
  source 1..1101: mol_type = other DNA
atgatccgaaattggcttactatatttattctgtttccactcaagttagttgaaaaatgcgagagtagtgtgtccctcacagtacctccagtggtgaagctggaaaatggttctagcacaaatgtgtcgctgacgctgaggccccctctgaatgcgacgctggtcataacgtttgagatcacttttcggtccaaaaatatcaccattctcgagctgcctgatgaagtcgtggtccctcccggcgtgacaaattcaagtttccaggtgacatcacaaaatgtcggacagctaacggtgtacctgcacggaaaccactctaatcagacgggaccccgtataagatttctggtgatccgaagctccgctattagcattattaaccaggttatcggatggatctactttgtcgcttggtctatatctttctatcctcaggtgattatgaattggcggcggaagagcgtgatcggcctgtcattcgacttcgtcgccctcaatctaactggctttgttgcctatagcgtcttcaacattgggctgttgtgggtgccctacatcaaagagcagtttctgctgaagtaccccaatggggtgaaccctgtgaactccaacgacgtgttcttctccctgcacgcggtcgtattgacgctgattattatcgtgcagtgttgtctatatgaaaggggtggccaacgcgtaagttggccagccataggcttcttggtcttagcttggttgtttgccttcgtcacaatgattgtggcagctgttggcgtaacaacatggctgcagttcctgttttgtttctcctatatcaaactcgcagtgactctcgtgaaatacttcccacaagcctacatgaacttctactacaaatcaactgagggctggagcataggaaacgtactgctcgactttaccggggggtccttcagtcttttgcagatgtttctccagtcatacaataatgaccagtggactcttatcttcggggatcctacaaagttcggactgggagttttttcgatcgtgttcgacgtcgtgttttttatccagcacttctgtctctacaggaagcgcccggggtatgatcaattgaac

SEQ ID NO: 10328 - DNA, 1101 bp, synthetic construct
  misc_feature 1..1101: note = source = /note="Description of Artificial Sequence: Synthetic coding sequence"
  source 1..1101: mol_type = other DNA
atgattagaaactggttaactattttcattttattcccacttaaattagttgaaaagtgtgaaagttcagtttcattaacagtaccaccagtagtcaaacttgaaaatggatctagtacaaatgtttctttaacacttcgaccaccacttaatgctactttagtaattacatttgagattacttttagaagtaaaaatattacaattttagaattaccagatgaagttgttgttccaccaggtgttacaaattcatcatttcaagtaacgtcacaaaatgttggacaattgacagtttacttacatggtaatcatagtaatcaaacagggccaagaatacgttttttagttattagatcttcagccatttcaattattaatcaagttattggatggatttattttgttgcatggtctattagtttttatcctcaagttattatgaattggcgtagaaaatcagttatcggtttatcatttgattttgttgcattaaatttaacgggatttgttgcttatagtgtttttaacattggacttttatgggttccatatattaaagaacaatttttgttaaagtaccctaacggagtaaatccagtgaatagtaatgatgtttttttttcacttcatgctgtagttttaactcttattattattgtacaatgttgtttatacgaaagaggtggacaaagagtttcatggccagctataggtttccttgttcttgcttggttatttgcatttgtaactatgattgtagctgcagttggagtaactacatggcttcaattcttattttgtttctcatatataaaacttgcagttacactcgttaaatattttcctcaagcttacatgaatttttactataaatcaaccgaaggatggtcaataggaaatgttttattagattttactggaggatcatttagtcttttacaaatgtttttacaatcatataataatgatcaatggacattaatattcggagatccaacaaaatttggtcttggagttttctctattgttttcgatgtagtttttttcattcaacatttttgtctttatcgaaaaagaccagggtatgatcaattaaat

SEQ ID NO: 10329 - DNA, 1101 bp, synthetic construct
  misc_feature 1..1101: note = source = /note="Description of Artificial Sequence: Synthetic coding sequence"
  source 1..1101: mol_type = other DNA
atgatccgcaactggttgacaatctttatcctgtttcccctcaagctggtcgagaagtgcgagtcttccgtcagtctgacagttcctcccgtggtcaagctggaaaacggttcctccaccaacgtttctctgacactgcgccccccacttaacgccacactggtgattacctttgaaatcaccttcagaagtaagaatattaccatcctcgagttgcctgatgaggtggtcgtaccccctggcgtgaccaactcttcctttcaggtcactagccaaaacgtcggccagttgaccgtgtacctgcatggaaatcactctaatcagaccggccctagaatacgctttttggtgattcgctccagtgccatcagcataattaaccaagtgatcggctggatctacttcgtcgcatggagcatttcattttaccctcaagtgatcatgaattggcgtcgtaagtccgtcatcggtctgtccttcgacttcgtcgccttgaaccttactggctttgtcgcttacagcgtgttcaacattggtctcctttgggtgccatatattaaggaacagtttctgttgaagtaccctaatggagtgaatcccgtcaatagcaacgatgtcttcttcagccttcacgctgtcgtcttgacacttataatcatcgtacagtgttgtctttatgaaaggggcggacagagggtctcatggcccgccattggattcttggtgctggcctggctgttcgcttttgttaccatgatcgtggcagctgtgggtgtcacaacttggctccagtttcttttttgcttctcttacatcaagctggcagtgactttggtgaaatacttccctcaagcatacatgaacttctactataagagcactgaaggttggtccatcggcaatgtgctgttggattttacaggcggaagtttctctctgctgcaaatgtttttgcaatcttataacaacgaccagtggactctgatatttggtgaccctaccaaattcggacttggtgtatttagcatcgtattcgacgttgtgtttttcattcagcatttctgcctctacagaaaacgccccggatacgaccaactcaat

SEQ ID NO: 10330 - DNA, 1101 bp, synthetic construct
  misc_feature 1..1101: note = source = /note="Description of Artificial Sequence: Synthetic coding sequence"
  source 1..1101: mol_type = other DNA
atgatccggaattggttaacaatttttatcctgtttccactcaagcttgtggaaaagtgcgagtcaagcgtttcgctcactgtccctccggttgtaaagcttgagaacggttcgtcaaccaacgtgtcattgactttgaggcctccactcaatgctacactggttataacgtttgaaattacttttcgttcgaaaaatattaccatccttgaattgcccgatgaagtcgtcgttcctcctggcgttacaaactcctcgttccaagtcacctctcagaatgtcggtcaacttacagtttacttgcatgggaatcacagcaaccaaactgggcctcgaatcaggttcttagttattcgttcttctgctatatcgatcataaatcaggtcattggttggatatacttcgttgcttggtcaatatccttctaccctcaggttataatgaattggagaaggaagtccgtcatcggtctgtccttcgacttcgtcgctctcaacttgacgggcttcgtcgcctatagcgtgtttaacatcggtctgctttgggttccctacataaaggaacaatttctgctcaagtatcctaacggtgtgaatccagtgaattctaatgacgtttttttttccttgcatgcggttgttcttacccttattatcattgtgcaatgctgcctttatgaaagggggggacagagggtatcgtggcctgctataggatttctagtgcttgcatggcttttcgcttttgtcactatgatcgttgctgccgtcggggttactacttggttacagtttcttttttgcttctcttatatcaaactggctgtcaccctagtcaaatatttcccccaagcatatatgaacttttactacaaaagtacagaaggctggtcaatcggcaatgttctgttagacttcactggcgggagtttctcgttgcttcagatgtttctccaaagctataataatgatcagtggacacttatctttggagatcctactaagtttggtcttggcgttttttccattgtttttgatgtggtcttctttatccaacatttctgcctttataggaaacgtccaggatatgaccagttgaac

SEQ ID NO: 10331 - DNA, 1101 bp, synthetic construct
  misc_feature 1..1101: note = source = /note="Description of Artificial Sequence: Synthetic coding sequence"
  source 1..1101: mol_type = other DNA
atgattcgtaactggctcacaatcttcattctctttccactgaagctggtggagaaatgcgagtctagcgtttcactaactgtgccacccgtcgttaagctggagaacggatctagtacaaacgtgtccctaaccctgaggcccccactaaatgctaccttggtgataaccttcgagattacattcaggagcaagaatataaccattctcgagcttcctgatgaggtagtcgtacccccaggtgtgactaactctagctttcaggtgacctcacagaacgtcgggcagttgaccgtctacctgcatgggaatcactcaaatcaaacaggaccccggatccggtttctggtaatcaggagttcagcgattagtatcatcaaccaggtgattggttggatctatttcgtggcgtggtctatctccttttacccacaagttatcatgaactggaggaggaaatccgtcattggcctgtcctttgattttgtggcccttaacctgacaggattcgtggcctatagtgtgtttaatatagggctgctttgggtaccgtatatcaaagagcagttcctactgaaatatcccaacggagtaaatcctgtaaactccaatgacgtgtttttttcgttgcatgccgttgtcctgaccctgatcattatcgtgcagtgctgcctgtacgaaaggggaggacagagggtttcgtggccagctatcggttttttggtgttggcatggctgtttgccttcgttactatgattgtcgctgcagtcggggtgaccacctggctgcagtttctgttctgcttctcttacataaaactggccgtgactctcgtcaagtatttcccccaggcttacatgaacttctattataagtctaccgagggatggagtataggcaatgtgcttctggatttcacaggcgggagctttagcctcctacaaatgtttctacaatcatataacaatgatcagtggacactgatttttggtgatccaacaaaatttgggctaggcgtcttcagtatcgtgttcgacgtcgtctttttcattcagcacttctgtctttaccgcaagcgccccggatatgaccaactgaat

SEQ ID NO: 10332 - DNA, 1101 bp, synthetic construct
  misc_feature 1..1101: note = source = /note="Description of Artificial Sequence: Synthetic coding sequence"
  source 1..1101: mol_type = other DNA
atgatccggaattggctgactatttttatcctgttccctcttaaactcgtggaaaagtgcgagtcgagcgtgagcctcaccgtgccgcctgtcgtgaagctggaaaacggatcatctacgaacgtgagccttactctgcggccgcccctgaatgcgactctggtgattactttcgagatcaccttccgctcaaagaacatcacgatcctggaactgccggacgaagtggtcgtcccgccgggagtgacgaacagctccttccaggtcacttcccagaacgtggggcagctgactgtttacctgcacggcaatcatagcaaccagaccggacctcgcatcagattcctcgtgatcaggtcgagcgccatctcgattatcaatcaagtcatcgggtggatctattttgtggcatggtcaatcagcttttacccgcaagtgattatgaactggcgccgaaagtcggtgataggattgtcgttcgacttcgtggctttgaacctcactggattcgtggcatactccgtctttaacatcggactgctgtgggtgccctatatcaaggagcaattcctgctgaaatacccaaacggagtcaacccagtgaactccaatgatgtgttcttttccctgcacgccgtcgtgctcaccctcatcattatcgtgcagtgctgtctctacgagcggggaggacagagggtgtcatggcctgcgatcggtttcctcgtcctcgcctggctgttcgctttcgtaaccatgatcgttgcggccgtgggtgtgactacttggctgcagttccttttctgcttctcctacatcaaattggccgtcaccttggtgaagtactttccacaggcatacatgaatttctactacaagtcgaccgaaggttggtcaattggcaatgtccttctggactttaccggcggctcgttctcgctgctccaaatgttcctgcagtcttacaataacgaccaatggaccctgatcttcggagatccaaccaaattcggattgggggtgttctccatcgtctttgatgttgtgttcttcatccagcatttttgcctctacagaaagcgcccgggctacgaccaactcaac

SEQ ID NO: 10333 - DNA, 1101 bp, synthetic construct
  misc_feature 1..1101: note = source = /note="Description of Artificial Sequence: Synthetic coding sequence"
  source 1..1101: mol_type = other DNA
atgattagaaactggttgacgatcttcattttgttccccctaaagttggtagaaaaatgcgagtcctccgtcagtctgactgtccctcctgtggttaagttggagaacggttcatctaccaacgtgtccttaacgttgcgacctcccttgaacgccactctggtgatcacatttgagatcacctttcgcagcaagaatattacgatcctagagttaccagatgaggttgttgttccgcccggcgtgaccaacagcagtttccaggtgacgagtcagaatgtgggacaattgactgtttatttgcacggtaaccattctaaccaaaccggcccaaggatccgctttctggtgatccgatccagtgccatctccatcatcaaccaggtcattgggtggatatatttcgtagcctggtccatctcgttctatccccaagtgattatgaattggcgaaggaaatctgtcataggcctgagcttcgatttcgtggctttgaacctgactggcttcgttgcgtactcagtgtttaatatcggtctcctgtgggtgccttacatcaaagaacagttcctgctgaaatatcctaatggagtgaatcccgtcaactctaacgacgtctttttttctcttcatgcggtggtcttaactctcataatcattgtccagtgctgcttgtacgaacgtggcgggcagagggtgtcatggccagcgatcggattcttggtcctcgcctggctatttgcgtttgtcacaatgattgtagcagccgtcggcgtgaccacgtggctgcagtttcttttttgtttcagttacatcaaactcgccgtcaccctcgtcaagtacttcccacaggcttatatgaatttctattacaagtcgacagagggttggtcaatcggtaacgtcctgctggacttcactggcggctccttcagtctgctgcagatgtttctgcagtcctacaacaacgatcagtggactctgatattcggagaccctaccaagttcggcctcggtgtcttttctattgtgtttgatgtggttttctttatccagcacttttgcctttaccgcaagcgtccaggatacgatcaactgaac

SEQ ID NO: 10334 - DNA, 1101 bp, synthetic construct
  misc_feature 1..1101: note = source = /note="Description of Artificial Sequence: Synthetic coding sequence"
  source 1..1101: mol_type = other DNA
atgatccggaactggctgaccatttttattctgtttcccctcaaactagtcgagaaatgcgaatcaagcgtgtcacttactgtccctccagttgtgaaactcgaaaacggaagctccacaaatgtcagtctgacgttacggccacctttgaatgctacactggtaataaccttcgaaattacgttccggtcaaagaacataactatattagaacttccggatgaggtggtagtgccaccaggcgtcacaaatagctcttttcaggttaccagccaaaacgttgggcagttaactgtctatctccacggtaaccactcgaatcagaccggtccaaggatcagattcttagtcattaggtccagcgcgatatctatcatcaaccaggtcatcggttggatttacttcgttgcatggagcatcagcttttatccccaggtgatcatgaattggcgtcgcaaatcagtcatagggctatcctttgactttgtcgctctaaacctgactggcttcgttgcatatagtgtattcaatattggtctgctctgggtgccatatattaaggagcagtttttattaaagtatcctaacggagtcaatcccgtaaactccaatgatgtttttttcagcctgcacgcggttgtgctgacgctgatcataatcgtccagtgttgcctgtatgagagaggagggcagcgagtgtcctggcccgccatcgggttcttggtgctggcctggctgtttgcttttgtgactatgatcgtcgccgccgtgggcgtgacaacatggcttcagtttctgttctgtttttcctacatcaagttggccgtgaccctggtgaagtattttcctcaggcatacatgaacttctattataaatccacagagggatggagtattggcaacgtcctgctggattttacaggcggaagtttttcacttctacagatgtttttgcagtcttacaataacgaccagtggacactaatcttcggtgatcctacgaagtttgggctgggggttttttccattgttttcgatgtggtgttcttcatacagcatttttgtctttacagaaagagacccggctacgaccaattgaac

SEQ ID NO: 10335 - DNA, 1101 bp, synthetic construct
  misc_feature 1..1101: note = source = /note="Description of Artificial Sequence: Synthetic coding sequence"
  source 1..1101: mol_type = other DNA
atgatccggaactggctcacgattttcatcctcttccctttaaaactggttgaaaagtgcgagagctccgtgagcctcacagtaccccccgtcgttaagttggaaaacgggagtagtaccaatgtgtccttgacactgcgtccaccgctgaacgcaacgcttgtgatcacattcgagataaccttccggtcgaaaaacatcaccatcctggagctgccggatgaagtagtcgtgccccccggtgttacaaactcctcgttccaagttacctctcagaatgtgggacagctaactgtgtacctgcacggaaaccacagtaatcagaccggtccgagaattagattcctagtgatccggagtagtgcgatctccatcataaatcaagttattggatggatttacttcgtggcctggagcatctctttctatccgcaggttataatgaattggcgccggaagagtgtcatcggattgagcttcgacttcgtcgcactaaacttgaccgggttcgtcgcttacagcgtgttcaatattggactgctgtgggtgccttatatcaaggaacaattcctgttaaagtaccccaacggcgtaaatccggtgaacagcaacgatgtattcttctccttgcatgccgtggtgttgactctgattattatcgttcagtgctgcctctatgagagaggcgggcaaagggtttcctggccagctattggcttcctcgtgctcgcgtggcttttcgcatttgttaccatgatagttgccgctgtcggtgtgacaacctggttacagttcctgttttgcttctcttacattaagctagccgtcacactcgtgaagtatttccctcaggcatatatgaatttctactataagagcactgaaggctggtctattggcaacgtgctgctcgactttacagggggttccttttcccttctccagatgttcttacagagttacaacaatgatcagtggacgctcattttcggggatcccacaaagttcgggctaggagtgttttccattgtctttgacgtggtgttttttattcaacacttttgtctttacagaaaacggccggggtacgatcaactcaat

SEQ ID NO: 10336 - DNA, 1101 bp, synthetic construct
  misc_feature 1..1101: note = source = /note="Description of Artificial Sequence: Synthetic coding sequence"
  source 1..1101: mol_type = other DNA
atgatacgtaactggctgacaatatttattctcttccccctaaaactagtggagaaatgcgagtctagtgtgagtctcacagtgccacctgtcgtgaaactagagaatggatctagtacgaatgtgtccttgactctgcgcccacctctgaatgctacactagtgattacatttgaaataacatttaggtcaaaaaacataacaatactcgaactccccgatgaagtggtagtaccccctggggttactaactcttcatttcaggtgacatcccagaatgttggacagttaactgtttacctccatgggaatcattctaatcagacaggacccagaatcaggtttttagtgatccgctcttccgccatatcaatcataaaccaagtgattggatggatatattttgtcgcttggtctatctctttttatccacaggttataatgaactggaggcgcaaatcggttatagggctctcatttgatttcgtggcactgaatctcacagggttcgtggcctattctgtgtttaatattgggttgctttgggtaccctatataaaggaacagtttctactcaaatatccaaatggggtaaatccagtgaattcaaacgatgttttcttctccctgcacgccgtcgttctgactctcatcattatcgtacaatgttgcctttatgaacgaggaggacagcgggtgtcctggcccgccatagggttccttgttctcgcttggctcttcgcgttcgtcacaatgatagtggccgcagtcggagtgacaacttggctgcagtttcttttctgcttttcctatatcaaactcgcagtgacactcgtaaaatattttccacaggcatacatgaacttctattataaatcaacagaaggatggagtatagggaacgtgctcctagatttcacagggggatctttctcgctgcttcagatgttcttgcagtcttataataacgatcagtggactctaatattcggagacccaactaaatttggattaggagtatttagtatagtatttgatgtggtgttctttattcagcacttctgtctctacagaaaacggcccggatacgatcagttgaat

SEQ ID NO: 10337 - DNA, 1101 bp, synthetic construct
  misc_feature 1..1101: note = source = /note="Description of Artificial Sequence: Synthetic coding sequence"
  source 1..1101: mol_type = other DNA
atgattcgtaattggcttacaatttttattttattcccgttaaaattagttgagaaatgcgagtcatccgttagtttaacggtaccgcctgttgtcaaactcgaaaacggctctagcacaaacgttagccttactttacgcccccctctgaatgcaacgttggtgattacatttgagattacattcagaagcaagaacatcacaatattagagctaccggacgaggttgtagtcccgccaggcgttacaaatagttcttttcaagtaacatcacagaatgtgggccagctgactgtgtatcttcatggcaatcactctaatcaaaccggcccgcgcattcgttttcttgtaatacgttcctctgccataagcattatcaatcaggtgattggttggatatactttgtcgcttggtcaatctctttttatccgcaagtgataatgaactggcgccggaagtccgttattggactttctttcgattttgtagccttgaatcttacgggcttcgttgcctattcagtattcaacatagggctgctgtgggtgccgtatattaaagaacagtttcttctgaaataccctaatggagttaaccctgtgaattctaacgatgtatttttcagccttcatgccgtcgttctgacgttaattatcatcgttcaatgttgcttgtacgaaaggggggggcaacgtgtatcttggccagctatcggcttcctggtccttgcttggttatttgcattcgtgaccatgattgtcgctgcggttggggtaacaacgtggcttcaatttttattttgtttctcatatatcaagcttgccgtaactcttgtgaaatattttcctcaggcttatatgaatttctactacaaatcaactgaagggtggtcaattggtaatgttctgttagattttacaggaggaagtttttcccttttacagatgtttttacaatcttacaacaacgatcagtggacactgatttttggggaccctactaagtttggattgggagtattctcaatcgtcttcgatgtcgttttttttattcaacatttctgcctttatcgaaaaagacctggctatgatcagctcaat

SEQ ID NO: 10338 - DNA, 1101 bp, synthetic construct
  misc_feature 1..1101: note = source = /note="Description of Artificial Sequence: Synthetic coding sequence"
  source 1..1101: mol_type = other DNA
atgattcggaactggctgactatcttcatcctgttccccctgaagttggttgaaaagtgtgagtcgtcagtatctctgaccgtcccaccagtggtgaagctagagaatggatcctccaccaatgtgtcgttgacccttcggccccccttaaatgcaacactggtaataaccttcgaaataacattccgttctaagaatatcaccatcttggaattgcctgacgaagttgtagtaccccccggtgtgacgaactcctcgttccaagtgactagccagaatgttgggcagctcactgtgtacctacatggcaaccatagcaatcagaccggtccacggatcaggtttctggtgattcggtcctccgccatctcgattattaatcaggtgattggttggatctacttcgtggcatggtccatatctttttatcctcaggtgataatgaactggcgcaggaagtccgtcattgggttgtctttcgatttcgtggccctcaacctgacaggcttcgtggcttactcagtttttaacataggcctcctttgggtaccgtacataaaggaacagttcctactcaagtaccccaatggcgtgaaccctgtgaattcaaacgatgttttttttagcttacatgctgtagtcttgaccctgattatcatcgtacagtgctgcctgtacgagcgagggggccaacgcgtgagttggccggcaattgggtttctggtgctggcctggctgtttgcgttcgtgacaatgatagtggcagctgtcggtgtgaccacctggttacagtttttgttctgcttcagttatatcaagctagccgtgacactagtcaaatatttcccccaagcctacatgaacttctattacaagagtactgagggctggtccattgggaatgtattgctagattttaccggcggcagcttttccttactgcagatgttcttgcagtcctacaacaatgatcagtggacccttatcttcggggaccctacaaaattcggtctcggagtgttctccatcgtatttgacgtggttttctttattcagcatttctgcctctatcgcaagcggcccggatatgatcagttaaat

SEQ ID NO: 10339 - DNA, 1101 bp, synthetic construct
  misc_feature 1..1101: note = source = /note="Description of Artificial Sequence: Synthetic coding sequence"
  source 1..1101: mol_type = other DNA
atgatcagaaactggcttactatcttcatattgttcccactcaaactggtcgaaaaatgcgagtcctccgtaagtctcacagtgccacccgtagttaaactggagaacggaagctccactaacgtgagtctcacactgcggccacccctgaatgctactttggttattacctttgaaatcaccttccggtcaaagaacatcactatcctggaactgcccgacgaggttgtggtccctcctggagtcacaaactcttccttccaggtcacaagccaaaacgtcggacaactcacagtgtatctccacggtaatcactctaaccagacgggccctcggatacgatttctggttattaggtcttccgccatcagtattatcaatcaagtcattggttggatctactttgttgcctggtctatcagtttctacccccaagtgatcatgaattggcgcaggaaatccgtcatcgggctgagttttgattttgtggcactcaatttgaccgggttcgtggcttatagcgtctttaacatcggcctcctgtgggtcccctatataaaagaacagttcctgttgaaataccctaatggggtgaatccagtgaactccaatgatgtgttcttctccttgcacgcagtggtgctcacattgataatcatcgtgcagtgctgtctgtacgaaagaggaggccagcgggtgagctggcctgcgattggctttctggtactggcatggctgtttgcctttgtcactatgatcgtcgcagctgtgggcgttactacctggctccagtttttgttctgcttctcttatattaagctggcagtaaccctggtgaaatattttccccaagcctatatgaacttttactacaaatccaccgagggttggagcataggcaatgttctgctcgactttactggcggctctttttccctcctgcagatgttcctccaaagttacaacaatgatcaatggaccctgatttttggggatcccactaagttcggactcggagtattcagcatcgtgttcgatgtcgtttttttcatccaacacttctgcctctacaggaaacggcctggttacgatcagttgaat

SEQ ID NO: 10340 - DNA, 1101 bp, synthetic construct
  misc_feature 1..1101: note = source = /note="Description of Artificial Sequence: Synthetic coding sequence"
  source 1..1101: mol_type = other DNA
atgatccggaactggctgaccatcttcatcctgttcccactcaagctggtcgaaaagtgtgagtcttccgtgtcgctaactgtgccaccagtggtgaaacttgagaatggcagcagcaccaacgtgagtctaacactgcgccccccgcttaatgctacattggtgatcacgtttgagatcaccttccgctctaaaaacattaccatcttggagctgcccgacgaggttgtggttcctcctggtgtcaccaattctagcttccaggttacatcccaaaatgtaggtcagctgacagtctatctgcacggcaatcattccaaccagaccggcccccgtatccggttcttggtgatcaggagttccgccatctccatcattaaccaggtcattggctggatttacttcgttgcttggtcaatatcattttaccctcaggtgattatgaactggagacggaagtcagtcataggactatccttcgactttgtggcactcaacttaacaggtttcgtggcttacagcgtatttaacattggcctgctttgggtgccctacattaaagagcagttcctgctgaagtatcctaacggagttaatccagtcaattctaacgacgtgtttttttccctgcacgccgtggtgctgacactgatcatcatcgtgcagtgttgcctctacgaacgaggcggccagcgagtaagttggccagccatcggtttcctggttctggcctggctgttcgctttcgtgaccatgatagtggccgccgttggggtgacgacctggctgcagttcctgttttgtttctcctacattaagctcgcagtgacccttgtcaagtatttcccacaggcttacatgaacttttactataagtcgacagaaggctggagcataggtaacgtgctgctggatttcaccggagggagcttcagcctactgcagatgttccttcaatcctataacaatgaccaatggacacttatctttggcgatcccacaaaattcggactcggcgtgttctcaatcgttttcgatgtggtgttcttcatccagcacttttgtctgtatcggaagcggccaggttatgatcaactcaat

SEQ ID NO: 10341 - DNA, 1101 bp, synthetic construct
  misc_feature 1..1101: note = source = /note="Description of Artificial Sequence: Synthetic coding sequence"
  source 1..1101: mol_type = other DNA
atgattaggaattggctcactatcttcattctgtttcctctgaaactcgtggaaaagtgcgagagctccgtgtcactaaccgttccacctgtggttaagctggaaaatggctcttctacaaacgtttccctgaccctcagaccccctttgaatgctacccttgttattacttttgagattacgttcaggagtaaaaacattaccatactggagcttccggacgaggtggtggtgccacccggtgtaactaattctagctttcaggtgacatcacagaatgtcgggcagttgactgtgtatcttcatggtaatcacagcaatcagacagggcctcggatccgttttctcgtgatccgctccagtgccatctctatcatcaatcaggtcatcggctggatctattttgtggcatggagcatttccttttacccacaggtcattatgaattggaggaggaagtccgtcatcggcctgagctttgatttcgtggctctgaaccttaccggcttcgtggcttactcggtgttcaatattggtcttctgtgggtgccctacatcaaggaacaatttctcttgaagtaccccaatggggtgaatcctgtgaactcaaacgacgttttcttttccctccacgctgtcgtcctgactctgataatcattgtgcagtgctgcctgtatgagaggggcggccagagagtgtcgtggcccgcaataggttttctggttctcgcatggctgttcgccttcgtcacaatgattgtagctgccgtgggggtaactacttggctgcagttcctgttttgtttttcttacatcaagcttgctgtcacactcgtgaaatacttcccccaagcctacatgaatttttattacaaatccacagagggttggagcatcggcaacgtactgctggactttaccggcggttctttctccctgctgcagatgtttttgcagtcctataacaatgatcagtggacactaatctttggtgatccgaccaagtttggactaggtgttttctcaatcgtcttcgatgtggtgtttttcatccagcatttttgtctctaccgtaagaggccaggctatgaccaactgaac

SEQ ID NO: 10342 - DNA, 1101 bp, synthetic construct
  misc_feature 1..1101: note = source = /note="Description of Artificial Sequence: Synthetic coding sequence"
  source 1..1101: mol_type = other DNA
atgataaggaactggctgacaattttcatcctgtttccgttgaaactagttgagaagtgcgaatcctcagtttctctgaccgttccccccgtggttaagctagaaaacggctcatctactaatgtctccctcacgctgaggcctccgctcaacgccacccttgtgatcacatttgagatcacttttcgatccaagaacatcaccatactcgagctcccggacgaggtcgtcgtcccaccaggtgtgacgaattcttccttccaagtgacttcccagaatgtgggacagctgacagtttacctccatgggaaccatagcaaccagaccgggccgcggatccggtttctggtcatccgatccagcgcaatttccataattaaccaagttattggctggatttattttgtggcctggagtatttccttctatccacaggtaatcatgaattggcggcgcaagagtgttatcgggctttccttcgatttcgttgccctcaacctgacaggattcgtcgcctacagtgttttcaacattgggttgctgtgggtgccctatatcaaagaacagtttctgctcaaataccccaacggggtcaaccccgtgaacagtaatgatgtgttcttttccctgcatgccgtggtgctgaccttgataatcatcgtccaatgttgcttgtacgaaaggggagggcagagggtcagctggcctgccattggattcctagtgctcgcgtggcttttcgcattcgtgaccatgatcgtggctgccgttggcgtgaccacttggctccaattcctcttctgtttctcttacattaagctcgccgtgactctagtgaagtatttcccacaagcttatatgaatttttattacaagagcaccgagggctggtccatcggaaacgtgctgctggacttcacgggcgggtctttctcactgctgcagatgtttctgcagtcttataataacgatcagtggactctgatattcggagacccgactaagttcggcctgggggtattcagcatcgtgttcgatgtggtctttttcatccagcacttttgcctgtatcggaaacgtccgggttatgaccagcttaac

SEQ ID NO: 10343 - DNA, 1101 bp, synthetic construct
  misc_feature 1..1101: note = source = /note="Description of Artificial Sequence: Synthetic coding sequence"
  source 1..1101: mol_type = other DNA
atgatacgaaattggctgacgatcttcatattgttcccgctaaagctggttgaaaaatgtgagagtagtgtaagcctaactgtgccacctgtggtgaagttggagaacggaagcagtactaacgtgagtctgacattgaggccacccctgaacgccacactggtgattaccttcgagatcactttccgctctaagaacattacgatcctggagctgccagacgaggtggtggtaccacctggagtgaccaactccagcttccaggtcacttcccagaatgtaggtcaactgacagtgtaccttcatggcaatcactcaaaccaaactggcccacgcattcgatttctcgttatacgctcatcagcaatttccattatcaaccaggtaatcggttggatatatttcgtggcgtggtcgatcagtttctatccgcaggtgatcatgaattggagacgcaagtccgttattgggctgtcatttgacttcgtggcgctgaatctgactggtttcgtagcatattcggtgttcaatataggcctactgtgggtgccctacatcaaggagcagttcttactgaagtaccccaatggtgtgaatcccgtgaactcaaacgatgtcttttttagcctgcatgcagtcgtgctaactctgatcattattgtccagtgctgtctttacgagagggggggccagcgcgtgtcctggcccgccataggatttttggtgctcgcgtggctatttgctttcgtaaccatgatcgtggccgccgtcggtgtcactacatggctgcaattcttgttttgcttctcctatattaagctagcggtgaccctggttaaatacttcccccaggcctatatgaatttctactacaaatcaacagaagggtggtctatcggaaacgtgcttctagatttcaccggcgggagcttttctttgttacaaatgtttctgcaaagttataacaatgatcagtggaccctgatcttcggggaccccactaaattcggtctgggcgtgttctctattgtttttgacgttgtgttctttatccagcatttctgtctctacagaaaacgaccaggctacgatcagcttaac

SEQ ID NO: 10344 - DNA, 1101 bp, synthetic construct
  misc_feature 1..1101: note = source = /note="Description of Artificial Sequence: Synthetic coding sequence"
  source 1..1101: mol_type = other DNA
atgatacgcaactggttaacgatctttatcttattccccctgaaacttgtggaaaagtgcgagagttccgtctccctgacagttccccccgttgtgaaactggagaatgggtcctcaaccaatgttagcctgacactgagacctccattgaacgctactctcgttatcacctttgagatcacgttccggtcgaagaatattacaatactcgaactcccagacgaagtggtagtgcccccgggcgtgacgaacagttcgtttcaagtaacctcccagaacgttggccagctgaccgtgtatctgcacggaaatcatagcaaccaaaccggacccaggattcgatttctcgtcatcaggtccagcgccatttccattatcaaccaggtaataggctggatttactttgtggcctggagcatctcgttttacccacaagtaatcatgaactggagaaggaaatctgtcataggtctgtcgttcgattttgtcgcactgaatctgaccgggttcgtagcctattctgtttttaacatcgggctgctgtgggtgccatatatcaaggagcagtttcttttgaaatatcctaacggcgtgaaccccgtgaatagcaacgatgtctttttctccctccacgctgttgtccttacgctgattatcattgtgcagtgctgcctgtatgagcggggaggacagagggtctcatggccagccataggatttctggtcctggcctggctgttcgccttcgtcacaatgatagtagcggcggtgggagttactacctggctacagtttcttttttgcttctcttacatcaagttggcagtcacactggttaaatacttcccgcaggcttacatgaatttctactacaaatctacggagggctggtccattgggaacgtgctcttggactttaccggtggcagcttctcactgctgcagatgtttcttcagagttacaataatgaccagtggacactaatatttggagatcccacaaaattcggcctgggtgtattttccattgtttttgatgtggtcttctttatccagcatttttgcctgtatagaaagcgcccgggttacgaccaactgaac

SEQ ID NO: 10345 - DNA, 1101 bp, synthetic construct
  misc_feature 1..1101: note = source = /note="Description of Artificial Sequence: Synthetic coding sequence"
  source 1..1101: mol_type = other DNA
atgatccggaactggctcaccatctttattctattccccttgaagctggtggagaagtgcgagtcgagcgtgtcgctgacagtccccccggtagttaaactagagaatggtagctcaacgaatgtgtccctaacgctgcggccccccttgaatgccactctggttatcacgttcgagataacgtttcgatcgaagaacatcacgattctcgagttgccggacgaagtggtagtgcctccaggagtcaccaactcgagcttccaagttacgtcgcagaacgttggacagcttaccgtttacctccacggcaatcatagcaaccagacaggtccccgaatcaggttcctggtgatccggagttcggctattagcatcattaaccaggttattgggtggatttattttgtagcgtggtcaataagcttttacccacaagtgataatgaactggcgtcggaagtcagtgataggactgtcgtttgactttgttgcacttaacttgaccggttttgtcgcctactcggttttcaacattggtttgctgtgggtgccgtatattaaggagcagttcctgttgaaatacccaaatggcgtgaatccggtgaactcgaacgacgtttttttctcgctgcacgccgtggtgctcactttaattatcattgttcagtgctgcttgtatgaacgaggtggccagcgcgtatcctggccagccattggcttcctggtcttggcgtggctttttgcatttgtaactatgatagtggccgccgttggcgtcacgacgtggctgcaattcttattctgcttcagctatatcaagctagccgtcacattggtaaaatatttcccccaggcgtacatgaacttctactacaagtcgaccgaggggtggtcaataggcaacgttttgctcgacttcacgggcggaagttttagtctgctgcagatgttcctgcagtcgtacaataatgaccaatggacgttgatttttggagacccaacaaagttcggccttggcgttttctccatcgtgttcgacgttgttttcttcatccaacacttctgtctataccgaaagcggccgggctacgaccagctgaac

SEQ ID NO: 10346 - DNA, 1101 bp, synthetic construct
  misc_feature 1..1101: note = source = /note="Description of Artificial Sequence: Synthetic coding sequence"
  source 1..1101: mol_type = other DNA
atgatacggaactggctgaccatttttatcctgtttcctctgaaactagtagaaaaatgtgaaagcagtgtgtctttaaccgtcccgcccgttgtcaagctggaaaacggctcctctacaaatgtttcattgactcttcggccgcccctcaatgctactctagtaattaccttcgagattacattccgctctaagaatatcaccatccttgagctcccagatgaggtggtagtcccgccaggcgtgaccaattcttcatttcaggtgacatctcaaaatgtgggccagctgacagtgtatctgcatgggaaccactcgaatcagactggccctcgcatacgctttctcgttataaggtcctccgccataagcattattaaccaggttattggttggatatactttgtggcttggtctatctccttttatccacaggttatcatgaattggcgacggaagtctgtgattggcctctctttcgattttgtagccctgaacctgacaggtttcgtggcctattctgtgttcaacatcgggctgctgtgggtgccctacattaaggagcagtttttgctaaaataccccaatggcgtcaatccagtcaatagcaacgatgtcttcttttctctccatgccgtcgtgcttaccctgattattattgtgcagtgttgcttgtacgagcgcggcggacaacgagtaagttggccagccattggcttcctggtgctggcctggctcttcgccttcgtgactatgatcgttgctgctgtcggcgtcacaacttggctccagtttctcttctgtttctcctatatcaagctggccgtcacacttgtgaaatacttcccacaggcatacatgaacttctattataagagtaccgaaggttggtccatcggtaacgttctgctggatttcaccggcggctccttttctttgttgcaaatgttcctccagagctataataatgaccagtggacgctaattttcggcgaccccacaaagtttgggctgggcgtctttagcatagtctttgacgtggttttcttcattcagcatttctgtctttataggaaacgcccggggtacgaccagttaaac

SEQ ID NO: 10347 - DNA, 1101 bp, synthetic construct
  misc_feature 1..1101: note = source = /note="Description of Artificial Sequence: Synthetic coding sequence"
  source 1..1101: mol_type = other DNA
atgatcaggaactggcttaccatcttcattctgtttccactaaaattggtagaaaagtgcgagagttctgtttccctgaccgtgcctcctgtggtgaaattggaaaacggatcctcaacgaacgtgtccctgacactccgccccccactgaatgctacccttgtcattacgttcgagatcacctttcgttctaagaacatcaccattctcgaattgcccgacgaagttgtggttcctccaggtgtgaccaacagtagcttccaggtgacctcccaaaacgtgggtcagctgaccgtatacctgcatggtaatcactctaatcagaccggcccaaggatccgttttctggtgatccggtcttccgcgatttctatcatcaaccaggttatcgggtggatttactttgtggcctggagtatctcattctacccccaagtgataatgaattggcgccggaagtccgtgattggactgagtttcgatttcgttgctttgaatcttaccggtttcgtagcatacagtgtattcaacatcggcctcctatgggtcccatatattaaggagcaatttctgcttaaatatccaaacggcgtgaatccggttaactcgaacgatgtctttttttccctgcacgctgtcgtgcttacgctgattatcattgtacagtgttgcctatacgaacggggtgggcaacgagtgtcctggccagcgatcggatttctggttctggcttggctgttcgcctttgttactatgatcgtggccgccgtgggcgttaccacctggcttcagtttttattttgtttttcctatattaagctagctgtgacattggtgaaatatttccctcaggcctacatgaacttctattacaaaagcacagaggggtggtcaattggaaatgtattgctcgattttactggtgggagctttagtctgctgcagatgtttctccagtcctacaacaatgaccagtggaccctgatctttggtgaccccacaaaatttggcctcggtgtatttagcatcgtgtttgacgttgtctttttcatccaacacttttgtctttataggaagaggcccgggtatgaccagttgaat

SEQ ID NO: 10348 - DNA, 1101 bp, synthetic construct
  misc_feature 1..1101: note = source = /note="Description of Artificial Sequence: Synthetic coding sequence"
  source 1..1101: mol_type = other DNA
atgatcagaaattggctcaccatttttatcttatttcctctgaagttagtggagaagtgtgagtcatcagtgtctttgacggtgcctccagttgtcaagctggagaacggttcttctacaaacgtatccctcaccctgcgaccccccctcaatgcaaccctagtgatcaccttcgagattacattccgcagtaagaatatcacaatcctcgagctccccgacgaggtggtggtccctcccggagtaacaaactcatcctttcaagtgacctcccagaacgtgggtcagttgaccgtttatttacatggcaaccatagcaaccaaactgggcctagaataaggtttttggtcattaggagcagcgcaatttctattattaatcaggttattgggtggatttacttcgtggcttggtcaatttctttttatccccaagttattatgaactggcggagaaagtctgtgatcggactgtcatttgacttcgtcgcgctaaacctgactggattcgtcgcatactcagtgtttaacattgggttgctgtgggtaccctacattaaggagcagtttctcctgaaataccccaacggagtcaatccagtgaattcaaatgatgtgttcttcagtctgcacgcggtagttcttacacttatcattattgtccagtgctgcttgtatgagcgcgggggccaaagggtgagctggccagcgatcggctttcttgtacttgcctggctgtttgccttcgttacaatgattgtcgcggctgtcggggtcacaacttggctgcagtttctcttttgtttctcgtacattaagctcgcagtgacgctcgttaagtatttccctcaggcttacatgaacttctattataagagtactgaggggtggagcatcgggaatgtgttgctcgatttcacaggcggatcattctccttgctacagatgttcctgcagtcctacaacaacgaccagtggactcttatttttggcgatccgacaaaattcggactcggcgtgtttagcattgtgttcgacgtggtcttcttcatacagcatttttgcctgtatcggaagcggccgggttacgaccagttaaac

SEQ ID NO: 10349 - DNA, 1101 bp, synthetic construct
  misc_feature 1..1101: note = source = /note="Description of Artificial Sequence: Synthetic coding sequence"
  source 1..1101: mol_type = other DNA
atgatccgcaattggctcacaatttttatcctgttcccactgaagctggtcgagaaatgcgaatcaagcgtctccttaacagttcccccagtggtgaaactggaaaacgggtccagcacaaatgtgagtttaactctcagacccccactgaatgccacactcgtgataaccttcgaaataaccttccgaagcaagaatattaccattttagaactgcccgacgaggtagtggtacctccaggagtgactaactcctccttccaggtgactagccagaacgttggacagttaaccgtgtacttgcacggaaaccacagtaatcagaccggacctcgcatcaggttcctggttatacgtagcagcgccatcagtatcataaaccaagtcattggctggatatatttcgtggcctggtccataagtttctatccccaggttattatgaactggaggaggaaaagcgtgataggcctcagcttcgattttgtggcactgaacttaaccggctttgtggcctactcagtgtttaatatcggcctactgtgggtgccctacatcaaagagcagtttctgcttaaatacccaaacggcgtgaatcccgtcaatagcaacgatgtgtttttcagcctgcatgcagtggtcctaaccctgattataattgttcagtgttgcctgtacgaacggggcggtcaacgagtatcttggccagccattggctttttggtgcttgcatggctgtttgctttcgtgaccatgattgtggccgccgtgggcgtcacaacctggttacagtttctcttctgtttttcctacattaaactggccgtcactctggtgaagtatttcccacaggcttatatgaatttttattataaaagcacagagggatggagtatcggcaatgtcctgctggatttcactgggggaagtttctccctgctgcagatgtttctgcagagctacaacaacgatcaatggacactgatcttcggagacccaaccaagtttggcctgggggttttcagcatcgtgtttgatgttgttttttttatacagcacttctgcctatacagaaagcgacccggctacgaccagctgaac

SEQ ID NO: 10350 - DNA, 1101 bp, synthetic construct; identical to SEQ ID NO: 10340
  misc_feature 1..1101: note = source = /note="Description of Artificial Sequence: Synthetic coding sequence"
  source 1..1101: mol_type = other DNA

SEQ ID NO: 10351 - DNA, 1101 bp, synthetic construct
  misc_feature 1..1101: note = source = /note="Description of Artificial Sequence: Synthetic coding sequence"
  source 1..1101: mol_type = other DNA
atgatccgaaattggctcacaatattcattctgtttcctctgaagctcgtggagaagtgcgagagttccgtcagtcttaccgtaccaccggtggtgaagcttgagaacgggtcttcaacaaacgtgagtttgacgcttagaccaccgctgaatgcgacactggtgattacatttgagattacatttaggtctaagaacatcacaattcttgaactacctgatgaagtcgtggtgcctcccggtgtgacgaacagcagcttccaggttacctcccagaatgttgggcagcttaccgtatacctgcacgggaatcactcgaatcaaacaggtccaaggattcggttcttagtcatcaggagctctgctatttcaatcataaaccaggtcattggctggatctacttcgttgcctggtcgattagtttctacccccaggttatcatgaattggcgtcggaagtccgtcattggcttgtcgtttgactttgtggcgcttaatctgaccggtttcgttgcatactccgtgttcaatattggcctgctttgggtcccctatattaaggagcagttcctcttgaaataccccaacggcgtcaaccctgtcaactcaaacgatgtattctttagtctacacgccgtggtgctaaccctgatcattattgtccagtgctgcctgtacgagagagggggtcagcgcgtatcctggcctgcaatagggttcttggtgcttgcctggcttttcgcctttgtgaccatgatcgtggcagcagtcggtgtgacaacatggctccagttcctgttttgtttctcttatattaaactggcagtcaccctggtcaagtatttcccacaggcctatatgaatttctactacaaatcaacagaaggttggtccatcggtaatgtccttctagactttacaggggggagctttagtttacttcagatgtttctgcagagctacaataatgatcaatggactctcatcttcggggatcccaccaaattcgggctgggagtattcagcatcgtgtttgatgtagtgttcttcatccagcacttctgtctataccggaaacgcccaggctacgatcagctgaat

SEQ ID NO: 10352 - DNA, 1101 bp, synthetic construct
  misc_feature 1..1101: note = source = /note="Description of Artificial Sequence: Synthetic coding sequence"
  source 1..1101: mol_type = other DNA
atgatcaggaactggttaacaatattcattctatttcctctgaaactcgtggaaaaatgcgaatcctcagtgtctctcactgtgccacccgtcgtgaaactggaaaatggatccagtacaaacgtatccttgactctccgcccaccactgaatgccactctcgtgattactttcgaaataacattcaggtctaaaaatatcactatcctggagctgccagacgaagtcgtagtcccccctggagtgacaaattcctcctttcaggtcacgtcccagaatgtcggacagttgactgtatacttgcatggaaaccactccaaccagacggggccccggatacgctttctagtgattaggtcctccgccatttctattatcaatcaggtgatagggtggatctacttcgtcgcttggtctatttctttctatccacaggtgatcatgaactggaggcggaaatcggtcattggactcagtttcgatttcgtcgctctcaatctcactgggtttgtggcctatagtgtctttaatattggactattatgggtgccatacatcaaggaacagtttctgctcaaatacccaaatggggtgaacccagttaatagtaatgatgtcttttttagtctccatgctgtagttctcactttaataattatagtccagtgctgtctctatgagcgcgggggacagcgggtttcctggcctgccatagggttcctcgtgctcgcgtggctctttgcctttgtcactatgatcgtggccgctgtgggggtcacaacatggcttcagtttctattctgttttagttatattaaactcgcagtcacgcttgtgaaatattttccccaagcttatatgaacttctattacaaatcaacagaaggatggtcaataggaaatgtcctgctagactttactgggggatcgttctccttgttgcagatgttcttgcagtcctataacaacgatcagtggactctaattttcggagacccaactaaatttgggcttggggtgttttccatcgtgttcgatgtagtgttcttcatacagcatttttgcctatatcgaaaaagacctgggtacgatcaactaaat

SEQ ID NO: 10353 - DNA, 1101 bp, synthetic construct
  misc_feature 1..1101: note = source = /note="Description of Artificial Sequence: Synthetic coding sequence"
  source 1..1101: mol_type = other DNA
atgatacgaaactggttaactatttttattttattccctctgaaactagtggagaagtgtgagagttccgtcagtttaacagtgccacctgttgttaagctggaaaacggtagttcaaccaacgtgtcactcacccttaggcctcccctgaatgctactctggttattaccttcgaaatcacatttagaagcaagaacattacaattctcgaactgcctgatgaagttgttgtgcctccgggagttaccaactccagcttccaggtcacatcccaaaacgtcggacaactgaccgtgtacctgcatgggaatcacagcaaccagactggtcctagaatcagatttctggttatccgtagctcagccatctcaatcattaaccaagtcatcggatggatctactttgtggcctggagtattagtttctacccccaggtgatcatgaactggcgtcgaaagtcagtgattggcttgtcatttgacttcgtggcccttaaccttaccggctttgtggcatactccgtctttaacatcgggctgctgtgggtcccatacatcaaggagcaattccttctgaaataccccaatggagtcaacccagtcaactccaacgacgtgtttttctctctgcacgcagtggtcctcacactgatcatcattgttcagtgttgtctgtatgagcgcggcggccagagggtaagctggccagcaatcgggtttctcgttctggcttggttattcgctttcgtgacaatgatcgtcgccgcagtcggcgtgaccacctggttgcaatttctgttttgcttcagctacatcaagctcgcagttaccttagttaagtactttccgcaggcgtacatgaatttttactataagtcaaccgaaggatggtccatcggcaatgtgctgcttgacttcacagggggatccttttctctcctccaaatgtttttgcagagttataataacgatcagtggaccctcatctttggggatcccacaaaattcggcttgggagtcttcagtatagtcttcgacgtcgttttctttatccaacacttttgcctttacagaaagagacctggctatgatcaattgaat

SEQ ID NO: 10354 - DNA, 1101 bp, synthetic construct
  misc_feature 1..1101: note = source = /note="Description of Artificial Sequence: Synthetic coding sequence"
  source 1..1101: mol_type = other DNA
atgatccggaactggctcactatcttcattctgttccccctaaagcttgtcgagaaatgcgagtcaagcgtcagtttgacagtgcctccagtggtgaagctggaaaatggaagctccaccaatgtgtcactgactttacgtccaccattaaacgccacactggtgatcacttttgagatcaccttccgctccaaaaatatcacaatactagaactgcccgatgaagtagtggtccctcccggcgtgaccaattccagtttccaggttactagtcagaacgtcgggcagctaaccgtgtatttgcacgggaatcatagcaaccagactgggccccgcattcgttttcttgtgatacgctcatccgcgatctcgatcattaaccaagtcattggttggatctatttcgtggcttggtcaatctccttctacccacaggtcatcatgaattggagaagaaaatccgtcatagggcttagctttgatttcgttgccctgaacctgacgggcttcgttgcctattctgtgtttaatataggactactgtgggtaccttacatcaaggaacagttcctgctgaaataccccaacggcgtgaatcctgtgaactctaatgacgtgttcttcagcttgcacgcagttgtgctcactctcattattatcgtgcagtgttgtttgtacgagagaggaggtcaacgtgtttcgtggcccgcaattggcttcctggtgctcgcttggctgtttgcttttgtgactatgatagtggcggcggtaggggtcaccacctggctgcagtttttgttctgtttctcatatataaagcttgccgtgacgctggtgaagtactttccccaagcgtacatgaacttttattataagtccaccgagggttggtcgattggcaacgtcctgcttgattttactggcggatcattttcccttttacagatgttcttgcaaagctacaacaatgaccagtggactctgatcttcggcgaccccaccaaattcggcctgggcgtgtttagcatcgttttcgatgtggtcttctttattcaacacttttgcctgtacaggaagcggcctggctatgaccaactcaac

SEQ ID NO: 10355 - DNA, 1101 bp, synthetic construct
  misc_feature 1..1101: note = source = /note="Description of Artificial Sequence: Synthetic coding sequence"
  source 1..1101: mol_type = other DNA
atgattagaaactggttaaccatatttatcttattccctctcaagctggtcgagaagtgtgagagcagtgtgagtctgacagtgccccccgtggtgaaactcgaaaatggtagcagtaccaacgtctctctgaccctgcgtccaccgctcaatgccacactggtcattacctttgaaattaccttccgaagcaagaacatcacaattcttgagttaccagacgaggtagtggtacctcccggcgtgacaaacagcagcttccaggtgacctcccagaatgtcggccagctcactgtttaccttcatggaaatcactctaatcagaccggccccagaatccggttcctggttatccggtccagcgccattagcattataaatcaggttataggatggatttacttcgtcgcatggtcgattagtttttatccacaagttataatgaattggcgacggaaaagcgtgatcggactttcttttgatttcgtagccttgaacctgacaggcttcgtggcctattcagtcttcaatatcggtcttctctgggttccatacatcaaagagcagtttttgctcaagtacccaaatggcgtgaatcctgtcaactctaacgacgtgttcttttctttgcacgctgtggttctgactcttattattatcgtgcagtgttgcctgtatgagagggggggacagagagtatcgtggcccgctattgggttcctcgtactggcctggctgtttgcgtttgtgaccatgattgtggccgccgttggggtcaccacatggcttcagtttctgttttgtttcagctacattaaactcgccgtgacgctcgtaaagtattttccccaggcatacatgaatttctattataaaagcacagagggctggtccatcgggaatgtgctcctcgactttacaggcgggtccttctcccttctgcagatgttccttcaatcctataacaatgatcagtggactctaatctttggggacccaaccaagttcggcctgggagtctttagtatcgtgtttgatgttgtgtttttcatccagcatttttgcctgtaccgtaagcgccctgggtatgaccaactgaat

SEQ ID NO: 10356 - DNA, 201 bp, synthetic construct
  misc_feature 1..201: note = source = /note="Description of Artificial Sequence: Synthetic coding sequence"
  source 1..201: mol_type = other DNA
atgcgcatccattacttactgttcgccttgttattcttgtttctggtgcccgtaccaggacacggcgggataatcaatacactgcagaagtattattgtcgggtgcgcggcggcaggtgtgcagtgctgtcttgcttaccgaaggaggagcagataggaaagtgttccactcggggaaggaagtgctgtagacggaaaaag

SEQ ID NO: 10357 - DNA, 201 bp, synthetic construct
  misc_feature 1..201: note = source = /note="Description of Artificial Sequence: Synthetic coding sequence"
  source 1..201: mol_type = other DNA
atgagaatccactacttgctcttcgcgctgctgtttcttttcttggtgccagtgcctggccacggtggcatcatcaacacccttcaaaagtattactgtagagtccggggaggtaggtgcgccgtgctgagctgcctgccgaaggaagaacagatcgggaagtgctcgacccgcgggcgcaagtgctgccggcgcaagaag

SEQ ID NO: 10358 - DNA, 201 bp, synthetic construct
  misc_feature 1..201: note = source = /note="Description of Artificial Sequence: Synthetic coding sequence"
  source 1..201: mol_type = other DNA
atgcgaattcattaccttctctttgctctgctgttcctttttctggtgccagtgcctggccacggtgggattattaatacactccagaagtactattgtagagtccggggaggtcggtgtgcagtgctcagttgcctaccaaaggaggagcagattggaaaatgctctaccaggggccgcaaatgttgccggagaaaaaaa

SEQ ID NO: 10359 - DNA, 201 bp, synthetic construct
  misc_feature 1..201: note = source = /note="Description of Artificial Sequence: Synthetic coding sequence"
  source 1..201: mol_type = other DNA
atgagaatacactacctcctgtttgcacttttgttccttttcctggtgcccgttccgggtcacggaggaatcatcaatacccttcagaaatactattgtcgcgttcggggcgggcgatgcgctgtgcttagttgtttgcccaaagaggagcagatcgggaagtgctctacgcgcggcagaaaatgctgtagaagaaaaaag

SEQ ID NO: 10360 - DNA, 201 bp, synthetic construct
  misc_feature 1..201: note = source = /note="Description of Artificial Sequence: Synthetic coding sequence"
  source 1..201: mol_type = other DNA
atgcggatccactatctgctattcgcccttctcttcctgttcctcgtcccagtgcctggacatggcgggatcatcaacacactgcagaaatattattgtcgcgtgcgaggggggagatgtgccgtgttgtcctgtctgccaaaggaagagcagatcggcaaatgctcaaccaggggtcgcaaatgttgcaggcgcaagaaa

SEQ ID NO: 10361 - DNA, 201 bp, synthetic construct
  misc_feature 1..201: note = source = /note="Description of Artificial Sequence: Synthetic coding sequence"
  source 1..201: mol_type = other DNA
atgagaatccattatttgctcttcgcacttctgttcctttttctggtgccagtacctggccacggaggcatcatcaatacactgcagaaatactactgtagggttagaggaggccgctgtgctgtgctgtcctgtctgcccaaggaggaacaaatcggtaaatgcagcacaaggggaagaaagtgctgtcgcagaaagaag

SEQ ID NO: 10362 - DNA, 201 bp, synthetic construct
  misc_feature 1..201: note = source = /note="Description of Artificial Sequence: Synthetic coding sequence"
  source 1..201: mol_type = other DNA
atgcgcatacactaccttctgttcgccctgctttttctgttcctggtgcccgtgccagggcatggaggtatcataaacacccttcagaagtattactgtcgtgtcaggggaggcaggtgtgcagtgctgtcatgcctccccaaggaggaacaaattggaaaatgctctactagagggagaaaatgctgtagacggaagaag

SEQ ID NO: 10363 - DNA, 201 bp, synthetic construct
  misc_feature 1..201: note = source = /note="Description of Artificial Sequence: Synthetic coding sequence"
  source 1..201: mol_type = other DNA
atgagaattcattacctgctgtttgccctcttgttcctgttcttggtgccagtcccggggcacggaggaatcatcaacaccttgcaaaagtattactgtcgtgttaggggaggccgctgtgcggtgctgtcatgcctccctaaagaagagcagatcggcaaatgctccactcgaggacggaagtgctgcaggcgtaagaaa

SEQ ID NO: 10364 - DNA, 201 bp, synthetic construct
  misc_feature 1..201: note = source = /note="Description of Artificial Sequence: Synthetic coding sequence"
  source 1..201: mol_type = other DNA
atgagaattcactatttgttgtttgccttgctgttcctgtttctggtgcctgtcccgggccatgggggcattatcaacaccctgcaaaagtactactgccgggtaagaggcggacggtgcgccgtgctgagctgtctgccaaaagaagagcagatcgggaagtgttccactcgagggaggaaatgttgccgccgtaaaaaa

SEQ ID NO: 10365 - DNA, 201 bp, synthetic construct
  misc_feature 1..201: note = source = /note="Description of Artificial Sequence: Synthetic coding sequence"
  source 1..201: mol_type = other DNA
atgcgaattcactacctgctttttgcccttctgttcctttttctggtcccggtgcccggacatggaggaattatcaacacgctgcagaagtactactgccgcgtccgcgggggtaggtgcgcagtgctgtcctgtctcccaaaggaggaacaaatcgggaaatgcagcactcgtggtcgaaagtgttgtcgtaggaagaaa

SEQ ID NO: 10366 - DNA, 201 bp, synthetic construct
  misc_feature 1..201: note = source = /note="Description of Artificial Sequence: Synthetic coding sequence"
  source 1..201: mol_type = other DNA
atgcggatccactatctgctgtttgccttgctgttcctgttcctggttccagtgcctgggcacggcggaattatcaataccttacagaagtattattgtagagttcggggcggccgatgcgcagtgctgtcctgtttacccaaggaagagcagattgggaagtgtagtacacgcggcagaaagtgctgccgtaggaaaaaa

SEQ ID NO: 10367 - DNA, 201 bp, synthetic construct
  misc_feature 1..201: note = source = /note="Description of Artificial Sequence: Synthetic coding sequence"
  source 1..201: mol_type = other DNA
atgcgtatccattaccttctcttcgccttgctgttcctctttcttgtcccagtgccgggccacgggggaatcatcaacaccctccagaagtactactgccgcgttcggggtggacggtgcgctgtgctctcgtgcctgcctaaggaggaacaaatcggcaagtgcagcactcggggaaggaaatgttgccggcggaagaag

SEQ ID NO: 10368 - DNA, 201 bp, synthetic construct
  misc_feature 1..201: note = source = /note="Description of Artificial Sequence: Synthetic coding sequence"
  source 1..201: mol_type = other DNA
atgcggatccactacctcctttttgccttgttgttcctgtttctcgtgcccgtgccaggacatgggggaatcatcaacacccttcagaaatactactgtcgcgtcagaggtgggcgctgtgcagtgctgtcctgccttccaaaggaagagcaaattggtaaatgctccactaggggacgcaagtgttgtaggcgcaagaag

SEQ ID NO: 10369 - DNA, 201 bp, synthetic construct
  misc_feature 1..201: note = source = /note="Description of Artificial Sequence: Synthetic coding sequence"
  source 1..201: mol_type = other DNA
atgagaatccactaccttctgttcgcgctcctattcctcttcctagtccctgtgccgggtcatggcggcataatcaacaccttgcagaagtactactgtcgagttcgaggtggccgctgtgcggtcttgtcctgcctgcccaaggaggagcagattggcaaatgcagcactaggggccgtaagtgttgccgcagaaagaag

SEQ ID NO: 10370 - DNA, 201 bp, synthetic construct
  misc_feature 1..201: note = source = /note="Description of Artificial Sequence: Synthetic coding sequence"
  source 1..201: mol_type = other DNA
atgaggatacattacctccttttcgcactcttgtttctcttcctggtgcctgtgcctggacacggtggaatcataaacaccttgcagaagtactactgtcgtgtgaggggtgggcggtgcgccgtcctgtcctgtctgccaaaggaagagcagattggaaagtgctccaccagaggtcgcaagtgttgccgtcgcaaaaag

SEQ ID NO: 10371 - DNA, 201 bp, synthetic construct
  misc_feature 1..201: note = source = /note="Description of Artificial Sequence: Synthetic coding sequence"
  source 1..201: mol_type = other DNA
atgcgcatacattatctcctcttcgcactcctgtttctattcctggtacctgtccctggacacgggggaatcataaacacactccagaaatattattgtcgcgtgcgcggagggagatgcgccgtgctgtcatgcctaccaaaagaagaacagattgggaaatgctccactcgcggaaggaaatgctgcaggcgcaaaaaa

SEQ ID NO: 10372 - DNA, 201 bp, synthetic construct
  misc_feature 1..201: note = source = /note="Description of Artificial Sequence: Synthetic coding sequence"
  source 1..201: mol_type = other DNA
atgagaatccattacctgctgttcgctctgcttttcctcttcctggtcccagtccccgggcacggtgggattattaataccttgcagaagtactactgcagagtcaggggaggacggtgtgcagtcttgagctgccttcccaaggaggagcagatcggcaagtgcagtaccagagggcggaagtgttgccgccgaaagaag

SEQ ID NO: 10373 - DNA, 201 bp, synthetic construct
  misc_feature 1..201: note = source = /note="Description of Artificial Sequence: Synthetic coding sequence"
  source 1..201: mol_type = other DNA
atgcggattcattaccttctgttcgcattgctgtttttgttcttggtgccggtccccgggcacggtggtattataaacactttacagaagtactactgcagagtacggggcggacgttgcgccgttcttagttgtctaccaaaagaagagcagattggcaagtgttctacccgagggcgtaaatgttgccgccggaagaaa

SEQ ID NO: 10374 - DNA, 201 bp, synthetic construct
  misc_feature 1..201: note = source = /note="Description of Artificial Sequence: Synthetic coding sequence"
  source 1..201: mol_type = other DNA
atgcggatacactaccttctgttcgccctccttttcctcttcttggtgcccgtgcctggacatggtgggattatcaatacattacagaagtattattgccgtgtgcggggaggtcgttgcgcagttttgtcgtgtttgccaaaggaggaacagattggcaaatgcagcactaggggaaggaagtgttgcagacggaaaaaa

SEQ ID NO: 10375 - DNA, 201 bp, synthetic construct
  misc_feature 1..201: note = source = /note="Description of Artificial Sequence: Synthetic coding sequence"
  source 1..201: mol_type = other DNA
atgcggatacactatctgctgttcgcccttctgttcttgttcttggtgcccgtcccagggcatggcggcataataaacacgcttcaaaaatactactgcagagttaggggcggcaggtgtgcagtcctcagctgcctcccaaaggaagaacagatcggcaaatgtagtactcgcggccggaagtgttgcagacgaaagaaa

SEQ ID NO: 10376 - DNA, 201 bp, synthetic construct
  misc_feature 1..201: note = source = /note="Description of Artificial Sequence: Synthetic coding sequence"
  source 1..201: mol_type = other DNA
atgcggattcattacttgctctttgccctgctctttctcttcttagttccagtacccggtcatggcgggatcataaacaccctccaaaaatattactgccgagtgcgcggtggccgttgtgcagtgctcagctgtcttcccaaggaagaacaaattggaaaatgttcaacacgcggacgaaagtgttgtagacggaagaag

SEQ ID NO: 10377 - DNA, 201 bp, synthetic construct
  misc_feature 1..201: note = source = /note="Description of Artificial Sequence: Synthetic coding sequence"
  source 1..201: mol_type = other DNA
atgagaattcattaccttctcttcgcactgctgtttttgttcctagtgcctgtccccggacatggaggcataattaatacactccagaaatattactgtagggtgaggggcggcagatgtgccgtcctgagttgccttcctaaggaggagcaaatcgggaagtgcagcactagggggagaaagtgctgcagacgtaaaaaa

SEQ ID NO: 10378 - DNA, 201 bp, synthetic construct
  misc_feature 1..201: note = source = /note="Description of Artificial Sequence: Synthetic coding sequence"
  source 1..201: mol_type = other DNA
atgagaatccactatctcttattcgcgttacttttcctgttccttgtgcctgtacctggtcatggcgggatcattaacaccctgcagaagtactattgccgggtccgcggaggacgatgcgctgttttatcctgtctgcctaaggaggaacaaattggcaaatgcagcaccagagggcggaaatgttgtagacgaaagaag

SEQ ID NO: 10379 - DNA, 201 bp, synthetic construct
  misc_feature 1..201: note = source = /note="Description of Artificial Sequence: Synthetic coding sequence"
  source 1..201: mol_type = other DNA
atgcggatccactacctgctctttgctcttttatttctatttcttgtacctgtccccggacacggagggataatcaacactctacaaaagtattactgccgagtgcgtggaggccgttgcgccgtcttgtcttgtctgcccaaggaagagcagatcggaaagtgctccactcgcggcagaaaatgttgcaggcgtaaaaag

SEQ ID NO: 10380 - DNA, 201 bp, synthetic construct
  misc_feature 1..201: note = source = /note="Description of Artificial Sequence: Synthetic coding sequence"
  source 1..201: mol_type = other DNA
atgcggatccactaccttctcttcgcgctgctgtttctgttcctcgtgccggtgccaggacacggcggcatcatcaacactctgcagaagtattactgtcgcgtccggggtggtcggtgcgcggtgttgtcctgccttccaaaggaggagcaaatcggaaagtgcagcacccgcgggcgtaaatgctgcaggagaaagaaa

SEQ ID NO: 10381 - DNA, 201 bp, synthetic construct
  misc_feature 1..201: note = source = /note="Description of Artificial Sequence: Synthetic coding sequence"
  source 1..201: mol_type = other DNA
atgaggattcattatttgctttttgccttgttattcctctttcttgtgcctgtacctggacacggtggaattatcaacactcttcagaagtactattgcagggtgagagggggtagatgtgcggtactttcttgtctcccaaaagaggaacaaattggaaagtgttccactcgtggcaggaagtgctgtagacgaaagaag

SEQ ID NO: 10382 - DNA, 201 bp, synthetic construct
  misc_feature 1..201: note = source = /note="Description of Artificial Sequence: Synthetic coding sequence"
  source 1..201: mol_type = other DNA
atgaggatccactacctgctctttgcactcctgtttcttttcctcgtgccagtgccgggacacggtggaattatcaataccctccagaaatactattgtagagttcgcggaggacgatgcgccgtcctttcgtgtttgccaaaggaagagcagatcggtaagtgttcgactcgtggcagaaagtgttgtcgaagaaaaaag

SEQ ID NO: 10383 - DNA, 201 bp, synthetic construct
  misc_feature 1..201: note = source = /note="Description of Artificial Sequence: Synthetic coding sequence"
  source 1..201: mol_type = other DNA
atgcggatccactatctgttgttcgccctcttgtttctgtttctcgtgccagttccaggtcacggtggcattatcaatactttgcagaagtactattgcagagtgcggggaggccgatgcgcagttttgtcttgcttgcccaaggaagaacagatagggaagtgcagtacaaggggcaggaagtgctgcagaaggaagaag

SEQ ID NO: 10384 - DNA, 201 bp, synthetic construct
  misc_feature 1..201: note = source = /note="Description of Artificial Sequence: Synthetic coding sequence"
  source 1..201: mol_type = other DNA
atgcgtatacattatctactatttgcgctattatttctatttttagtaccggttccgggtcatggtggtataataaatacgttacaaaaatattattgtcgtgttcgaggtggtcgttgtgcggttctatcgtgtctaccgaaagaagaacaaataggtaaatgttcgacgcgtggtcgtaaatgttgtcgacgaaaaaaa

SEQ ID NO: 10385 - DNA, 201 bp, synthetic construct
  misc_feature 1..201: note = source = /note="Description of Artificial Sequence: Synthetic coding sequence"
  source 1..201: mol_type = other DNA
atgcgcatccactacttgttgttcgctctgctgtttttgtttcttgtgccagtgccgggacacgggggaattatcaacactcttcagaaatactactgcagagtgcgcgggggacgctgcgcagtgctgagctgcttgccgaaggaagagcaaattggtaagtgctcgacccgggggcggaagtgttgtcgcagaaagaag

SEQ ID NO: 10386 - DNA, 201 bp, synthetic construct
  misc_feature 1..201: note = source = /note="Description of Artificial Sequence: Synthetic coding sequence"
  source 1..201: mol_type = other DNA
atgcgtattcactatttgctctttgcccttttgtttcttttcctggtgccggtgccaggacatggtggtattatcaacaccttgcagaagtactactgtagggtgagaggaggacgttgtgcagtgctctcctgcctgcctaaagaagagcagatcggaaaatgttcaactcgcggtcggaaatgttgcaggcgcaagaag

SEQ ID NO: 10387 - DNA, 201 bp, synthetic construct
  misc_feature 1..201: note = source = /note="Description of Artificial Sequence: Synthetic coding sequence"
  source 1..201: mol_type = other DNA
atgagaattcactatctgctgtttgcccttctgttcctgttccttgtccccgtccctggtcacggcgggatcattaacactctccaaaaatactactgtcgagttcgagggggacgatgtgcagtgctgtcatgtcttccaaaggaagaacagattggcaaatgtagcacaaggggtagaaagtgctgccgtcgaaagaaa

SEQ ID NO: 10388 - DNA, 201 bp, synthetic construct
  misc_feature 1..201: note = source = /note="Description of Artificial Sequence: Synthetic coding sequence"
  source 1..201: mol_type = other DNA
atgcgtatccattacttactgtttgcactccttttcctgtttctggtccccgtccccgggcatgggggaattattaacactttacagaagtattactgtcgggtgcgcgggggacgctgcgctgtgttatcctgccttcccaaggaggagcagattggaaagtgctcgaccagaggaaggaaatgttgccgacggaaaaag

SEQ ID NO: 10389 - DNA, 201 bp, synthetic construct
  misc_feature 1..201: note = source = /note="Description of Artificial Sequence: Synthetic coding sequence"
  source 1..201: mol_type = other DNA
atgcggatccactacctgctattcgctttgctgttcctcttccttgtaccagtccccggtcacggcggaataattaacacactgcagaagtattactgtagggtgaggggaggccgttgcgctgtcctgtcttgtctgcccaaagaggagcagatcggtaaatgcagcacacgcggacgaaagtgttgtcggcggaagaaa

SEQ ID NO: 10390 - DNA, 201 bp, synthetic construct
  misc_feature 1..201: note = source = /note="Description of Artificial Sequence: Synthetic coding sequence"
  source 1..201: mol_type = other DNA
atgagaatccactatctactgtttgccttgttgtttctgttcctggttcctgttcccgggcacggtggaatcatcaacacactgcaaaagtattattgccgagttaggggtgggcgctgcgctgtcctcagctgcctgccgaaggaggagcagattggtaaatgtagcacccgggggagaaaatgctgccgccgaaaaaaa

SEQ ID NO: 10391 - DNA, 201 bp, synthetic construct
  misc_feature 1..201: note = source = /note="Description of Artificial Sequence: Synthetic coding sequence"
  source 1..201: mol_type = other DNA
atgcgtatccattacctgctctttgccctgctgtttctgtttctggttccagtgcctggccatgggggcataattaataccctgcagaagtactattgtcgggtccgaggcggtcgctgcgctgttctgtcctgcctgcctaaggaggagcagatcggtaagtgttccacccgcggacgaaagtgctgccgccgcaagaag

SEQ ID NO: 10392 - DNA, 201 bp, synthetic construct
  misc_feature 1..201: note = source = /note="Description of Artificial Sequence: Synthetic coding sequence"
  source 1..201: mol_type = other DNA
atgcgcatccattacctgctgttcgcgctgttgttcctgtttcttgtgccggtcccaggacatggaggaatcatcaacaccctgcagaaatactactgccgcgtgaggggagggcggtgcgccgtgctttcgtgtctgccgaaggaagagcagataggcaagtgttcgactagaggacgcaaatgttgccgccgcaaaaag

SEQ ID NO: 10393 - DNA, 201 bp, synthetic construct
  misc_feature 1..201: note = source = /note="Description of Artificial Sequence: Synthetic coding sequence"
  source 1..201: mol_type = other DNA
atgcgcattcactatcttctctttgccttactctttctttttctagtaccagtgcctggacacgggggaataatcaacacattacagaaatattattgtcgggtacggggaggaagatgtgcagtactttcttgccttcccaaagaagaacagatcgggaagtgctctacacgcggacgcaaatgctgcagaaggaaaaag

SEQ ID NO: 10394 - DNA, 201 bp, synthetic construct
  misc_feature 1..201: note = source = /note="Description of Artificial Sequence: Synthetic coding sequence"
  source 1..201: mol_type = other DNA
atgagaatccattacctgttgttcgccctgctcttcctgtttctcgtgccggtgcctggccacggaggcatcatcaacacccttcagaaatactactgccgcgtcagagggggtaggtgtgcggtgctgtcgtgcctgccaaaagaagagcaaattggaaagtgctccactcggggacgcaagtgttgccgccggaagaag

SEQ ID NO: 10395 - DNA, 201 bp, synthetic construct
  misc_feature 1..201: note = source = /note="Description of Artificial Sequence: Synthetic coding sequence"
  source 1..201: mol_type = other DNA
atgcgcatccattatctcctctttgccctgctattcctgttcctggtccctgtgccgggtcacggcggcatcattaacaccctacagaagtactactgccgcgttcggggcgggaggtgcgctgtgctctcatgtctcccaaaggaggagcagatcggcaaatgttccactcgcggaagaaaatgctgtcgtcgcaagaag

SEQ ID NO: 10396 - DNA, 201 bp, synthetic construct
  misc_feature 1..201: note = source = /note="Description of Artificial Sequence: Synthetic coding sequence"
  source 1..201: mol_type = other DNA
atgagaatccactatctcctcttcgcactcctcttcttgtttctggtccctgtccctggtcacggaggtatcatcaatacactgcaaaagtactactgcagagtcagaggtggacgctgtgccgtgctgagctgcctccctaaggaggaacagatcggtaaatgctctactagaggcagaaaatgctgccgcagaaaaaaa

SEQ ID NO: 10397 - DNA, 201 bp, synthetic construct
  misc_feature 1..201: note = source = /note="Description of Artificial Sequence: Synthetic coding sequence"
  source 1..201: mol_type = other DNA
atgagaattcattacctgcttttcgcgctgctcttcctgttcctcgtgccagtacccggacatgggggaataataaatacccttcagaagtattattgccgagtgagaggagggcgatgcgcggtgctctcatgtctgcctaaagaagaacagatcggcaagtgtagcacacggggccgcaagtgctgcaggagaaagaaa

SEQ ID NO: 10398 - DNA, 201 bp, synthetic construct
  misc_feature 1..201: note = source = /note="Description of Artificial Sequence: Synthetic coding sequence"
  source 1..201: mol_type = other DNA
atgcgcatccactatctcttgttcgcgttactttttttattcttggttccggtgcccggccacgggggtataataaacactcttcagaagtattattgccgggtgcgcggcgggagatgtgccgttttatcttgtttgcctaaggaagagcaaattgggaagtgttccactcgtggaagaaaatgctgtagaagaaagaag

SEQ ID NO: 10399 - DNA, 201 bp, synthetic construct
  misc_feature 1..201: note = source = /note="Description of Artificial Sequence: Synthetic coding sequence"
  source 1..201: mol_type = other DNA
atgcggatccattacctgctcttcgcccttctctttctttttcttgtgcctgtgcctggtcacggtggaatcattaacactctgcaaaagtactactgtagagtgagaggaggtcgttgtgcagtgcttagctgtctgcccaaagaagaacagattggcaagtgttcaacgcgcggcagaaagtgttgtagaagaaagaaa

SEQ ID NO: 10400 - DNA, 201 bp, synthetic construct
  misc_feature 1..201: note = source = /note="Description of Artificial Sequence: Synthetic coding sequence"
  source 1..201: mol_type = other DNA
atgcgcatccactaccttctgttcgcacttttgttcctgtttctcgtgccggtgccaggacatggcggtattatcaacacccttcaaaagtactactgcagagttcgtgggggcaggtgcgccgtgctcagctgtctcccgaaagaggaacagatcgggaaatgctccaccagaggccgcaaatgttgccgccgcaagaag

SEQ ID NO: 10401 - DNA, 201 bp, synthetic construct
  misc_feature 1..201: note = source = /note="Description of Artificial Sequence: Synthetic coding sequence"
  source 1..201: mol_type = other DNA
atgaggatccattacttgctttttgctctgctgttcctgttcctcgtcccggtgccaggacacggtggaatcattaacactttgcaaaagtactattgcagagtgcgtgggggccgttgcgccgtgttgagctgcctccccaaagaagagcagataggaaagtgttccaccagaggccggaaatgttgccgccgcaagaaa

SEQ ID NO: 10402 - DNA, 201 bp, synthetic construct
  misc_feature 1..201: note = source = /note="Description of Artificial Sequence: Synthetic coding sequence"
  source 1..201: mol_type = other DNA
atgcgaattcattacctgctttttgcgttgcttttcctgtttctcgtgcctgtgccgggtcatggcggaataatcaacacccttcagaagtactactgccgtgtgagaggcggaagatgtgcggtcctgtcatgccttcccaaagaagaacaaatcggaaaatgcagcactagagggcggaaatgttgtaggagaaagaag

SEQ ID NO: 10403 - DNA, 201 bp, synthetic construct
  misc_feature 1..201: note = source = /note="Description of Artificial Sequence: Synthetic coding sequence"
  source 1..201: mol_type = other DNA
atgcgcatccattacctcctgtttgccctgctgtttctgtttctggttccagtgcctggacacggcggtatcatcaacaccctgcagaagtactactgcagagtgcggggtggcagatgcgccgttctgagctgtctgccgaaggaagagcaaattggtaagtgtagtacccgtggacggaagtgctgccgccgtaaaaag

SEQ ID NO: 10404 - DNA, 201 bp, synthetic construct
  misc_feature 1..201: note = source = /note="Description of Artificial Sequence: Synthetic coding sequence"
  source 1..201: mol_type = other DNA
atgcgcatccactacctcctctttgccctcttgttccttttcctggtaccagtccctggacacggcggaatcattaataccctgcaaaagtattactgtagagtgaggggaggcagatgtgctgttttgtcttgtctgcctaaggaagagcagatcgggaaatgtagtacacgaggaagaaagtgctgcaggaggaagaaa

SEQ ID NO: 10405 - DNA, 201 bp, synthetic construct
  misc_feature 1..201: note = source = /note="Description of Artificial Sequence: Synthetic coding sequence"
  source 1..201: mol_type = other DNA
atgcggatccactaccttcttttcgctcttctgtttcttttcctggtccctgtgcccggacacggtggaattatcaacactctgcagaagtactactgtcgcgtgcgcggtgggcgttgtgcggtgctttcgtgtctccctaaagaagaacaaatcggtaaatgttcaacccggggacgcaagtgctgtcggaggaagaag

SEQ ID NO: 10406 - DNA, 201 bp, synthetic construct; identical to SEQ ID NO: 10359
  misc_feature 1..201: note = source = /note="Description of Artificial Sequence: Synthetic coding sequence"
  source 1..201: mol_type = other DNA

SEQ ID NO: 10407 - DNA, 201 bp, synthetic construct
  misc_feature 1..201: note = source = /note="Description of Artificial Sequence: Synthetic coding sequence"
  source 1..201: mol_type = other DNA
atgaggatacattacctattgttcgccttacttttcctctttctcgttccagtccctggacatggaggaattattaatactttgcaaaagtactattgccgtgttcgcggaggtcggtgtgcggttcttagctgcctaccgaaggaagagcaaattgggaaatgttccacaaggggtcgaaaatgctgtcgacgcaaaaag

SEQ ID NO: 10408 - DNA, 201 bp, synthetic construct
  misc_feature 1..201: note = source = /note="Description of Artificial Sequence: Synthetic coding sequence"
  source 1..201: mol_type = other DNA
atgcgaatccattacttgctgttcgcactactgttcctgttcctcgtgcccgtccccggacacggagggatcattaatacattgcagaagtactactgccgggtgcgaggaggccgctgtgccgtcctgagttgcctaccaaaggaagagcagattgggaagtgctctacacgtggacgcaagtgctgccgacggaagaaa

SEQ ID NO: 10409 - DNA, 201 bp, synthetic construct
  misc_feature 1..201: note = source = /note="Description of Artificial Sequence: Synthetic coding sequence"
  source 1..201: mol_type = other DNA
atgagaatccattacctgctttttgcattgcttttcctcttcttggtgccagtgccagggcacggaggtatcattaacaccctgcaaaagtattactgtcgtgtgagaggcggtaggtgtgccgtgctctcgtgtctgcccaaggaggagcaaattggcaagtgctccactaggggtcgcaaatgctgtaggcggaagaag

SEQ ID NO: 10410 - DNA, 201 bp, synthetic construct
  misc_feature 1..201: note = source = /note="Description of Artificial Sequence: Synthetic coding sequence"
  source 1..201: mol_type = other DNA
atgcggatccattacctgctgtttgcccttctgtttttgttcttggtgccggtgcctggtcatggtgggataatcaataccctgcagaagtactactgtcgcgtgcgaggtggccgttgcgcagtgctctcctgtctcccaaaggaagagcaaattgggaagtgttccactagaggaaggaagtgctgtagaagaaagaag

SEQ ID NO: 10411 - DNA, 201 bp, synthetic construct
  misc_feature 1..201: note = source = /note="Description of Artificial Sequence: Synthetic coding sequence"
  source 1..201: mol_type = other DNA
atgaggatccactacctgctgtttgctttactattcctgtttttggtgcctgtgcctgggcatggaggcatcattaatacgctgcagaagtactactgtcgcgtacgcggaggcagatgcgccgtgctcagctgcttgccaaaggaggagcagattggaaagtgctccacacggggcaggaagtgctgtcgacgcaagaaa

SEQ ID NO: 10412 - DNA, 201 bp, synthetic construct
  misc_feature 1..201: note = source = /note="Description of Artificial Sequence: Synthetic coding sequence"
  source 1..201: mol_type = other DNA
atgagaatccattacctgctgtttgcactcttatttttgttcttggtgcctgtcccgggccacggaggcattattaataccttacagaagtactattgcagagtaagaggagggcgctgtgcagtattgagctgcttgccgaaggaagagcagattggcaagtgttcaacacgtggaaggaaatgttgccgccgcaaaaag

SEQ ID NO: 10413 - DNA, 201 bp, synthetic construct
  misc_feature 1..201: note = source = /note="Description of Artificial Sequence: Synthetic coding sequence"
  source 1..201: mol_type = other DNA
atgagaatccattaccttttgttcgccctgctcttcctctttctggtcccggtgccaggccacgggggaatcatcaacaccttgcagaagtactattgcagagttaggggtggacggtgcgctgtgttgagctgcctgcctaaagaagagcaaataggaaagtgctccactcgggggcgcaagtgttgtagacgcaaaaag

SEQ ID NO: 10414 - DNA, 201 bp, synthetic construct
  misc_feature 1..201: note = source = /note="Description of Artificial Sequence: Synthetic coding sequence"
  source 1..201: mol_type = other DNA
atgaggatccattacctcctctttgcattgctgttcttgtttctggtgcccgtacccggccatggaggtatcataaatacactacagaaatattattgccgcgtccggggcggcaggtgtgccgtgctttcttgccttccaaaggaagaacagatcgggaaatgcagtacgcgcggccggaagtgctgcaggaggaaaaag

SEQ ID NO: 10415 - DNA, 201 bp, synthetic construct
  misc_feature 1..201: note = source = /note="Description of Artificial Sequence: Synthetic coding sequence"
  source 1..201: mol_type = other DNA
atgagaatacattatttgttatttgctttattgtttctattcttagttccagttccaggacatggaggtattattaatactcttcaaaaatattattgtagagttagaggaggaagatgtgcagttttaagttgtttaccaaaagaggaacaaattggaaaatgttcaactagaggaagaaagtgttgtagaagaaaaaag

SEQ ID NO: 10416 - DNA, 201 bp, synthetic construct
  misc_feature 1..201: note = source = /note="Description of Artificial Sequence: Synthetic coding sequence"
  source 1..201: mol_type = other DNA
atgaggattcattatttgctgtttgcactgttgtttctgttcctggtcccagtgcctgggcacggaggcataataaacactctgcagaagtactactgccgcgtgagagggggtcggtgtgccgtgctgtcatgcctgcccaaggaagaacagatcggcaagtgctccacacgtggacgcaaatgctgcaggcgcaagaag

SEQ ID NO: 10417 - DNA, 201 bp, synthetic construct
  misc_feature 1..201: note = source = /note="Description of Artificial Sequence: Synthetic coding sequence"
  source 1..201: mol_type = other DNA
atgcgcattcactacctactgttcgcactattattcttatttttagtacctgttcccggtcatggtggcattataaataccttacagaagtattattgccgagtgagaggtggccgctgcgcggtgctttcctgtcttcccaaagaggagcagatcggcaaatgtagcacacgcgggagaaagtgctgccgccggaagaag

SEQ ID NO: 10418 - DNA, 201 bp, synthetic construct
  misc_feature 1..201: note = source = /note="Description of Artificial Sequence: Synthetic coding sequence"
  source 1..201: mol_type = other DNA
atgcggatccattacctgctgtttgcgctgctgttcttgttcctggtgccagtgccgggacatggaggcattatcaacactctgcagaagtactactgtcgggtgcggggcggccgctgcgccgttctgtcatgcctgccaaaggaagagcaaatcggaaaatgctccacccgcgggcgaaagtgctgtcgaagaaaaaag

SEQ ID NO: 10419 - DNA, 201 bp, synthetic construct
  misc_feature 1..201: note = source = /note="Description of Artificial Sequence: Synthetic coding sequence"
  source 1..201: mol_type = other DNA
atgcggatccattacctgctttttgccctcctgttcctcttccttgtgcccgtccctgggcacggcggaatcattaacactcttcagaagtattactgcagggttcgcggtggaagatgcgccgtgctgtcgtgccttccgaaagaagagcagatcggaaagtgttccaccagaggaaggaagtgctgtcgccgtaagaaa

SEQ ID NO: 10420 - DNA, 201 bp, synthetic construct
  misc_feature 1..201: note = source = /note="Description of Artificial Sequence: Synthetic coding sequence"
  source 1..201: mol_type = other DNA
atgcgaatccattacctgctgttcgccctcctcttcctgtttctggtcccggtgccagggcacggcggaatcatcaacactcttcaaaagtattactgtagagtgaggggaggacggtgcgcagtgctgtcctgcttgcccaaagaagagcaaatcggtaagtgctcgactcggggccggaagtgttgtcggcgcaagaag

SEQ ID NO: 10421 - DNA, 201 bp, synthetic construct
  misc_feature 1..201: note = source = /note="Description of Artificial Sequence: Synthetic coding sequence"
  source 1..201: mol_type = other DNA
atgcggattcattaccttctgtttgcactcctgtttctgttcttggtcccggtgcccgggcatggcggtatcataaacactctgcaaaagtactactgtcgcgttcgaggaggtcggtgcgccgtgttgtcatgtctgccaaaggaggaacagatcgggaaatgctccaccagaggccgaaagtgttgccggcgcaagaag

SEQ ID NO: 10422 - DNA, 201 bp, synthetic construct
  misc_feature 1..201: note = source = /note="Description of Artificial Sequence: Synthetic coding sequence"
  source 1..201: mol_type = other DNA
atgagaattcactatctactcttcgccctgctcttcctgtttttagtgccagtgccgggacacggtgggatcataaacaccctgcaaaagtactattgccgggtgcgcggcggccgatgcgccgtattgagctgtctgcctaaggaagagcagatcggtaagtgttccaccagaggccggaagtgctgcaggagaaaaaag

SEQ ID NO: 10423 - DNA, 201 bp, synthetic construct
  misc_feature 1..201: note = source = /note="Description of Artificial Sequence: Synthetic coding sequence"
  source 1..201: mol_type = other DNA
atgaggattcactatctgctcttcgccttgttattcctattccttgttccagtgcctggccatgggggaatcatcaataccctccagaagtactactgtagggttagaggcggtaggtgcgcagttctgagctgccttcctaaagaggagcagattggaaaatgcagcacacggggacgtaaatgttgccggcgcaagaaa

SEQ ID NO: 10424 - DNA, 201 bp, synthetic construct
  misc_feature 1..201: note = source = /note="Description of Artificial Sequence: Synthetic coding sequence"
  source 1..201: mol_type = other DNA
atgcgtatacattacctcctgtttgcgctcctgtttctcttcttggtgccagtgccgggacacggcggaatcattaacaccttgcagaaatactattgtcgggttaggggaggccggtgcgccgtgctgagctgcctgcctaaagaggaacaaatcggtaagtgttccactcgcggcagaaaatgctgccggagaaagaag

SEQ ID NO: 10425 - DNA, 201 bp, synthetic construct
  misc_feature 1..201: note = source = /note="Description of Artificial Sequence: Synthetic coding sequence"
  source 1..201: mol_type = other DNA
atgagaatccactacctcctgttcgcccttttgtttctgttcttggtgccggtcccgggtcatggtgggatcatcaacaccctgcagaaatactactgtcgggtgaggggaggtcgctgcgcggttctgtcctgtctgcctaaggaggaacaaattggcaaatgttcgaccagaggtcgtaagtgctgcaggagaaagaag

SEQ ID NO: 10426 - DNA, 201 bp, synthetic construct
  misc_feature 1..201: note = source = /note="Description of Artificial Sequence: Synthetic coding sequence"
  source 1..201: mol_type = other DNA
atgcggatccattacttgctgttcgccctgctttttctgttcttggtcccggtccctggacacggaggaatcattaacaccctgcagaagtactactgtcgtgtgcgcggaggtcggtgtgcagtgctctcgtgcctcccaaaggaggaacagatcggaaagtgctctactcgcggacggaagtgctgtcgcaggaagaaa

SEQ ID NO: 10427 - DNA, 201 bp, synthetic construct
  misc_feature 1..201: note = source = /note="Description of Artificial Sequence: Synthetic coding sequence"
  source 1..201: mol_type = other DNA
atgcgaatccattacctcctttttgcactcctctttttgtttcttgtgccggtgccaggccacggaggtatcataaacactcttcaaaagtactactgcagagtgcgcggcgggcgctgcgcagtgctgtcgtgtctgcctaaggaagaacaaattggaaagtgcagcacccgcggtagaaaatgttgtcggcggaaaaaa

SEQ ID NO: 10428 - DNA, 201 bp, synthetic construct
  misc_feature 1..201: note = source = /note="Description of Artificial Sequence: Synthetic coding sequence"
  source 1..201: mol_type = other DNA
atgcgcatccattacctcctttttgcactgctgtttctatttctagtcccagtccccgggcatggcggaataattaatacccttcagaaatattactgtagagttagaggcggaaggtgtgcagtcttatcctgccttcccaaggaggaacaaatcggaaaatgctctacccggggacggaagtgttgtagacggaaaaag

SEQ ID NO: 10429 - DNA, 201 bp, synthetic construct
  misc_feature 1..201: note = source = /note="Description of Artificial Sequence: Synthetic coding sequence"
  source 1..201: mol_type = other DNA
atgcgcatccattacctgctcttcgcgctcctgttcctgttcctggtgccagtccctggtcatggggggattatcaacaccctgcaaaagtactactgcagagttcgagggggacgctgcgccgtgctctcatgtcttccaaaagaagagcagattggaaaatgtagcaccagaggacggaagtgctgccgccgcaagaag

SEQ ID NO: 10430 - DNA, 201 bp, synthetic construct
  misc_feature 1..201: note = source = /note="Description of Artificial Sequence: Synthetic coding sequence"
  source 1..201: mol_type = other DNA
atgaggatacactacctgttgttcgctttgttgtttttgtttcttgtgccggttcctgggcatggaggaatcattaataccttgcagaaatattactgtcgggtgcggggcggtcgctgcgcggtgttgtcttgcctgccaaaggaggaacagatcggcaaatgcagtaccagaggccgaaagtgttgcaggcgcaagaag

SEQ ID NO: 10431 - DNA, 201 bp, synthetic construct
  misc_feature 1..201: note = source = /note="Description of Artificial Sequence: Synthetic coding sequence"
  source 1..201: mol_type = other DNA
atgcgcatccattacctcttgttcgctcttctcttcttgttccttgttcccgtcccaggacacggtggcattatcaatacattgcagaaatattactgccgcgttaggggcggaagatgcgccgtgttgtcctgcctgcctaaggaagagcagatcggcaagtgttccacacgcggtaggaagtgttgtcgtagaaagaag

SEQ ID NO: 10432 - DNA, 201 bp, synthetic construct
  misc_feature 1..201: note = source = /note="Description of Artificial Sequence: Synthetic coding sequence"
  source 1..201: mol_type = other DNA
atgcgaatccactaccttttgtttgcactgctgtttctgttcctggtccccgtgccagggcatggtggaatcatcaacaccctccagaagtattactgcagagtgaggggaggtagatgcgccgtgctgtcgtgtttgcctaaggaggaacaaatcggaaaatgtagcactcggggtagaaaatgctgtagacgcaagaag

SEQ ID NO: 10433 - DNA, 201 bp, synthetic construct
  misc_feature 1..201: note = source = /note="Description of Artificial Sequence: Synthetic coding sequence"
  source 1..201: mol_type = other DNA
atgcgaatacattatttgctgttcgccctgttgttcctatttttggtgccggtgcccgggcacggggggattatcaacacactccagaagtattactgcagagtccgtggtggtcgatgtgctgtgctgtcatgccttccaaaggaagagcaaataggaaaatgctccacgaggggccggaagtgctgccgaaggaagaag

SEQ ID NO: 10434 - DNA, 201 bp, synthetic construct
  misc_feature 1..201: note = source = /note="Description of Artificial Sequence: Synthetic coding sequence"
  source 1..201: mol_type = other DNA
atgcggatccattatctgttgtttgccctgcttttcctctttctggtacctgtgcccggacatggaggaattatcaacactctgcagaagtattactgtcgggtccgcgggggacgctgtgccgtcctgagttgcctgcctaaagaggagcagatcgggaagtgtagcactagaggcagaaaatgttgtcgccgaaagaaa

SEQ ID NO: 10435 - DNA, 201 bp, synthetic construct
  misc_feature 1..201: note = source = /note="Description of Artificial Sequence: Synthetic coding sequence"
  source 1..201: mol_type = other DNA
atgcggattcactacctgcttttcgctctgctgttcctcttcttggtacctgttccaggccacgggggcatcattaacacgctgcagaagtattactgtcgcgtccgcggggggagatgcgctgtgctgtcttgcttaccaaaagaggagcaaattggcaagtgctccacacgcggtcgaaagtgctgtcgcaggaaaaag

SEQ ID NO: 10436 - DNA, 201 bp, synthetic construct
  misc_feature 1..201: note = source = /note="Description of Artificial Sequence: Synthetic coding sequence"
  source 1..201: mol_type = other DNA
atgcggatccattacctcctgttcgccctgctgttcttgttcctcgtgcctgtgcccggacatggcggaatcatcaataccctgcagaagtactattgtagggtgcggggaggaagatgcgctgtcctgtcctgcctgcctaaggaggaacagattggtaagtgttcaaccaggggcagaaagtgttgcagacggaagaaa

SEQ ID NO: 10437 - DNA, 201 bp, synthetic construct
  misc_feature 1..201: note = source = /note="Description of Artificial Sequence: Synthetic coding sequence"
  source 1..201: mol_type = other DNA
atgaggattcattatctcctcttcgctctgttattcctatttttagtgccagtgccaggccacggaggaataattaatactctgcagaagtattactgtcgcgtgcgtggaggaagatgcgccgtcctctcatgtctgcccaaagaggaacagataggcaagtgcagcacccgaggacggaaatgttgccggcgcaaaaag

SEQ ID NO: 10438 - DNA, 201 bp, synthetic construct
  misc_feature 1..201: note = source = /note="Description of Artificial Sequence: Synthetic coding sequence"
  source 1..201: mol_type = other DNA
atgagaattcactacctgctttttgcgctcctctttctgttccttgttcctgtgccaggccatggtggaataatcaacaccctgcaaaagtactactgtcgggtcagaggaggacgctgcgccgtgctttcgtgccttcccaaagaagagcagattggtaaatgttcgacccgcggtcggaagtgttgtcggagaaagaag

SEQ ID NO: 10439 - DNA, 201 bp, synthetic construct
  misc_feature 1..201: note = source = /note="Description of Artificial Sequence: Synthetic coding sequence"
  source 1..201: mol_type = other DNA
atgaggatccattacctccttttcgcattgctgttcctctttctcgtgcctgtccccggacacgggggaatcatcaacactcttcagaagtactactgtcgggtccggggaggacgatgtgctgtgctgtcctgcctgccgaaggaggaacaaattggtaaatgctcaaccagaggacggaagtgctgtcggcgcaagaaa

SEQ ID NO: 10440 - DNA, 201 bp, synthetic construct
  misc_feature 1..201: note = source = /note="Description of Artificial Sequence: Synthetic coding sequence"
  source 1..201: mol_type = other DNA
atgaggatccactacctgctcttcgcactcctctttttgtttctcgtccccgtcccagggcacggaggcattattaacaccctgcagaaatattactgtcgcgtccgagggggccgttgtgctgtcctgtcctgtctccccaaggaagaacagatcggcaagtgctccaccaggggcaggaagtgctgtcgacgaaagaaa

SEQ ID NO: 10441 - DNA, 201 bp, synthetic construct
  misc_feature 1..201: note = source = /note="Description of Artificial Sequence: Synthetic coding sequence"
  source 1..201: mol_type = other DNA
atgagaattcattacctgctgtttgcactcctttttctgttcttggtacctgtccccggtcacggcggcataatcaacacgctgcaaaagtactactgtcgagtgcgcggcggtcgatgtgccgtgctttcctgcttgccgaaggaggaacagattggcaagtgttcaacccggggtaggaaatgttgtcgacgcaagaag

SEQ ID NO: 10442 - DNA, 201 bp, synthetic construct
  misc_feature 1..201: note = source = /note="Description of Artificial Sequence: Synthetic coding sequence"
  source 1..201: mol_type = other DNA
atgaggatccattacttgctgtttgcgctcctgtttcttttccttgtcccagtgcctggacacggtgggattatcaatactcttcagaaatactactgtcgggtgaggggtggacgctgtgcagtgctgtcatgtctgcctaaagaagaacagattggaaagtgtagcactcgcgggagaaagtgttgtagaaggaagaaa

SEQ ID NO: 10443 - DNA, 192 bp, synthetic construct
  misc_feature 1..192: note = source = /note="Description of Artificial Sequence: Synthetic coding sequence"
  source 1..192: mol_type = other DNA
atgagagtcctttatctattgttctcgtttctgttcatttttttgatgccgctgcctggggtcttcggtgggatcggagatcctgtcacatgtcttaaatccggagccatttgtcatcccgtgttctgccctcgcagatataagcagatcggcacctgcgggctccctgggacaaagtgttgcaaaaagccc

SEQ ID NO: 10444 - DNA, 192 bp, synthetic construct
  misc_feature 1..192: note = source = /note="Description of Artificial Sequence: Synthetic coding sequence"
  source 1..192: mol_type = other DNA
atgcgggtcttgtacttactattttcttttctttttatctttttgatgcctttgccaggggtgtttggtgggatcggtgacccagtgacttgccttaagagcggagcaatctgtcacccagtgttctgtccacgtagatataaacagatcggtacttgtgggcttcccggaacaaagtgctgcaagaagcct

SEQ ID NO: 10445 - DNA, 192 bp, synthetic construct
  misc_feature 1..192: note = source = /note="Description of Artificial Sequence: Synthetic coding sequence"
  source 1..192: mol_type = other DNA
atgagggtgctgtatctcctgtttagctttctatttatcttcctgatgcccctgcccggcgtgttcggcggcataggtgacccggtaacctgtctgaaatccggggctatttgtcacccggtattttgccctcggcgctacaagcagatcgggacatgtggcctgcctggtaccaaatgttgcaagaaacca

SEQ ID NO: 10446 - DNA, 192 bp, synthetic construct
  misc_feature 1..192: note = source = /note="Description of Artificial Sequence: Synthetic coding sequence"
  source 1..192: mol_type = other DNA
atgcgtgtcctgtatctactcttctcttttctttttatttttttgatgccactacccggagtcttcggtggcatcggagatcccgtgacttgtttgaagtctggggccatctgccatccagttttctgcccgcgtcgttacaagcagataggcacctgcggcttgcctggtactaagtgctgcaagaagcct

SEQ ID NO: 10447 - DNA, 192 bp, synthetic construct
  misc_feature 1..192: note = source = /note="Description of Artificial Sequence: Synthetic coding sequence"
  source 1..192: mol_type = other DNA
atgagagtcctgtaccttctgttttcgttccttttcattttcctcatgccccttccaggagtgtttggaggtattggcgacccggtgacttgccttaaatcgggtgccatttgtcatccggtgttttgtcctagaaggtacaagcaaatcggaacctgtggactccctggtactaaatgttgtaagaagccc

SEQ ID NO: 10448 - DNA, 192 bp, synthetic construct
  misc_feature 1..192: note = source = /note="Description of Artificial Sequence: Synthetic coding sequence"
  source 1..192: mol_type = other DNA
atgagagtcctgtacctgctgttcagttttctgtttatctttctaatgcctctaccaggggtgtttggcggaatcggtgatccggtaacatgcttaaaatccggagcaatctgtcacccagttttctgccctcggcgttataaacaaatcggaacttgtgggctccctggcactaagtgctgcaaaaaacct

SEQ ID NO: 10449 - DNA, 192 bp, synthetic construct
  misc_feature 1..192: note = source = /note="Description of Artificial Sequence: Synthetic coding sequence"
  source 1..192: mol_type = other DNA
atgcgcgtgctgtatctgttattctccttcctctttatatttctgatgccattaccaggtgttttcgggggaatcggggacccagtgacgtgtctcaaatccggggctatctgccatcccgtcttctgtcccagacgatacaaacaaattggcacttgtgggctcccaggcacaaaatgctgtaagaagcca

SEQ ID NO: 10450 - DNA, 192 bp, synthetic construct
  misc_feature 1..192: note = source = /note="Description of Artificial Sequence: Synthetic coding sequence"
  source 1..192: mol_type = other DNA
atgagagtcctgtaccttctgttttcctttctgttcatcttcctgatgcccctcccaggagtcttcggcgggatcggggatccagtgacctgcctgaagagcggagctatctgccatcctgtgttctgcccgcgccgatacaagcagatcggcacctgcgggctgcctggaaccaaatgttgcaagaaacca

SEQ ID NO: 10451 - DNA, 192 bp, synthetic construct
  misc_feature 1..192: note = source = /note="Description of Artificial Sequence: Synthetic coding sequence"
  source 1..192: mol_type = other DNA
atgagagtcctatatttattgttctcgtttctgttcattttcctaatgccactccccggggtcttcgggggaatcggagacccagttacatgtctgaaatccggagcaatctgccatcctgtgttttgtcctcgccggtataagcagatcggaacatgtggactacccgggacaaaatgctgtaaaaagccc

SEQ ID NO: 10452 - DNA, 192 bp, synthetic construct
  misc_feature 1..192: note = source = /note="Description of Artificial Sequence: Synthetic coding sequence"
  source 1..192: mol_type = other DNA
atgcgcgtgttgtacctcctcttctcgttcctgttcatctttctgatgccgctgccaggcgtgtttggaggaatcggggacccagtcacctgcctgaaaagcggcgccatctgtcatccggtgttttgtccgcgacggtacaagcaaatcggaacgtgtggactccctggaactaaatgctgcaagaaacca

SEQ ID NO: 10453 - DNA, 192 bp, synthetic construct
  misc_feature 1..192: note = source = /note="Description of Artificial Sequence: Synthetic coding sequence"
  source 1..192: mol_type = other DNA
atgagggtgctgtacctccttttctcattcctctttatcttcctcatgccgctacctggggtctttgggggaatcggagacccagtgacatgtctcaaatctggagcaatctgtcatccagtgttctgtccccggcgatataaacagataggaacatgtgggctccccgggactaaatgctgtaagaaaccc

SEQ ID NO: 10454 - DNA, 192 bp, synthetic construct
  misc_feature 1..192: note = source = /note="Description of Artificial Sequence: Synthetic coding sequence"
  source 1..192: mol_type = other DNA
atgagggtgttgtacctactgtttagcttcctgtttatctttcttatgccattgcccggggtgttcggcggtatcggagaccccgtaacgtgcctgaaaagtggtgcaatctgccatcctgtcttctgtcccagaagatataagcagatagggacctgtggactccctggaacaaagtgctgtaaaaaaccc

SEQ ID NO: 10455 - DNA, 192 bp, synthetic construct
  misc_feature 1..192: note = source = /note="Description of Artificial Sequence: Synthetic coding sequence"
  source 1..192: mol_type = other DNA
atgcgggtcctctatctgctgtttagtttccttttcatcttcttaatgcccctgccgggagtgtttggcggaatcggcgatcccgttacatgcctaaagagcggggccatttgccaccccgttttttgccccagaagatataaacagatcggtacctgcggactgccagggacaaagtgctgcaagaagccg

SEQ ID NO: 10456 - DNA, 192 bp, synthetic construct
  misc_feature 1..192: note = source = /note="Description of Artificial Sequence: Synthetic coding sequence"
  source 1..192: mol_type = other DNA
atgcgcgtgctctaccttctgttcagcttcttgtttatctttctgatgcccctgccgggagttttcggcgggatcggtgacccggtcacttgtctgaagtcgggagcaatctgccatccggtcttttgcccccgccggtacaagcagattggaacctgcggattgccggggactaagtgctgcaaaaaaccc

SEQ ID NO: 10457 - DNA, 192 bp, synthetic construct
  misc_feature 1..192: note = source = /note="Description of Artificial Sequence: Synthetic coding sequence"
  source 1..192: mol_type = other DNA
atgcgcgtgctctacctgcttttttcctttctcttcatcttcctcatgcctctcccgggagtgttcgggggcatcggcgacccggtgacttgtctgaagtcgggcgccatctgccacccggtcttttgcccacggcgctacaaacagattggaacctgtggtctgccgggaacgaagtgctgcaaaaaaccg

SEQ ID NO: 10458 - DNA, 192 bp, synthetic construct
  misc_feature 1..192: note = source = /note="Description of Artificial Sequence: Synthetic coding sequence"
  source 1..192: mol_type = other DNA
atgagggttttgtacctgctgttcagctttctatttatcttcctcatgccgcttcctggcgtgtttggaggcataggggaccccgtgacttgcctcaaatctggggcaatctgccacccagtgttctgcccccgccggtataagcagataggtacttgtggccttcccggcacgaaatgctgtaaaaagcca

SEQ ID NO: 10459 - DNA, 192 bp, synthetic construct
  misc_feature 1..192: note = source = /note="Description of Artificial Sequence: Synthetic coding sequence"
  source 1..192: mol_type = other DNA
atgcgagtgctttatctgctgttttcatttttgttcatcttcttgatgcctttgccaggcgtatttgggggcattggagatcctgtgacctgtttgaaatcaggagcaatctgccacccagtgttctgtccccgtaggtataaacagatcggcacctgtggcctgccagggactaagtgctgcaagaaaccc

SEQ ID NO: 10460 - DNA, 192 bp, synthetic construct
  misc_feature 1..192: note = source = /note="Description of Artificial Sequence: Synthetic coding sequence"
  source 1..192: mol_type = other DNA
atgcgggtcctttacttactgtttagtttcctgttcatctttctaatgcctctccctggagtctttggcggcatcggcgaccctgtgacatgcctgaagtcaggagccatctgccaccccgttttctgtccaaggcggtacaagcagatcggcacatgtggcctccctgggactaaatgttgtaagaagcca

SEQ ID NO: 10461 - DNA, 192 bp, synthetic construct
  misc_feature 1..192: note = source = /note="Description of Artificial Sequence: Synthetic coding sequence"
  source 1..192: mol_type = other DNA
atgagagtcctttacttgctgttcagtttcctcttcatttttctgatgccacttccgggagtgttcggcgggattggcgaccccgtgacgtgtcttaaaagcggtgccatttgccacccagtgttctgcccgcgcaggtataagcagatcggtacctgcggactgcccggcactaaatgctgcaaaaagcct

SEQ ID NO: 10462 - DNA, 192 bp, synthetic construct
  misc_feature 1..192: note = source = /note="Description of Artificial Sequence: Synthetic coding sequence"
  source 1..192: mol_type = other DNA
atgagggttctctatctcctgttttcctttctcttcatctttttgatgcccctgccgggagtctttggcgggattggagatcctgtgacttgtttgaagtcgggggctatttgtcatcccgtcttttgccctcgaagatataagcagatcggcacatgcggtttgcctggtaccaaatgttgtaaaaagccc

SEQ ID NO: 10463 - DNA, 192 bp, synthetic construct
  misc_feature 1..192: note = source = /note="Description of Artificial Sequence: Synthetic coding sequence"
  source 1..192: mol_type = other DNA
atgcgggtcttgtacctcctattctcctttctgtttatttttctgatgcccctgcccggggtgttcggtggcataggggaccctgtgacatgcctcaagtccggcgctatttgtcatcctgtgttctgccccaggcggtacaagcagatcggaacctgtggactaccaggtacaaagtgttgcaagaagccc

SEQ ID NO: 10464 - DNA, 192 bp, synthetic construct
  misc_feature 1..192: note = source = /note="Description of Artificial Sequence: Synthetic coding sequence"
  source 1..192: mol_type = other DNA
atgagagtgctctacctgctcttttcctttcttttcatttttctcatgcctctgcccggtgtgtttggaggcatcggtgaccccgtgacctgcctgaagtcgggtgcaatttgccatccggtgttctgtcctcgacggtacaagcaaataggaacctgcgggcttcctgggactaagtgctgcaaaaagcct

SEQ ID NO: 10465 - DNA, 192 bp, synthetic construct
  misc_feature 1..192: note = source = /note="Description of Artificial Sequence: Synthetic coding sequence"
  source 1..192: mol_type = other DNA
atgagagtgctttaccttctgttctccttcctgttcatttttctcatgcctctccctggcgtgttcggtggcattggagatcccgtcacttgcctcaagtcgggagcaatctgccatcctgtcttttgtccccgaagatacaaacaaatcggtacctgtggcctgccgggaactaaatgttgtaaaaagcca

SEQ ID NO: 10466 - DNA, 192 bp, synthetic construct
  misc_feature 1..192: note = source = /note="Description of Artificial Sequence: Synthetic coding sequence"
  source 1..192: mol_type = other DNA
atgcgtgtgctatacctcctgttctcatttctctttatctttctgatgccactgccaggcgtttttggtggaatcggcgatcctgtaacatgcctgaagagcggggccatttgccatcctgtgttctgtccccgaaggtacaagcaaatcggtacatgtggcctccccgggacgaaatgctgtaaaaaacct

SEQ ID NO: 10467 - DNA, 192 bp, synthetic construct
  misc_feature 1..192: note = source = /note="Description of Artificial Sequence: Synthetic coding sequence"
  source 1..192: mol_type = other DNA
atgcgtgttctgtacctcctgttttcttttttatttatctttctcatgcctctccccggtgtgttcggtgggataggagaccctgtgacatgtctcaaaagtggagcaatttgtcaccccgtattctgcccgagaaggtacaaacaaatcggtacctgcgggctgcccggcacaaaatgttgcaagaagccc

SEQ ID NO: 10468 - DNA, 192 bp, synthetic construct
  misc_feature 1..192: note = source = /note="Description of Artificial Sequence: Synthetic coding sequence"
  source 1..192: mol_type = other DNA
atgcgggtgctctacctcctgttttcgttccttttcatcttcctgatgccattgcctggagtgttcggagggattggcgaccccgtgacctgcctgaagtccggagccatctgccacccggtcttttgcccgcgcagatacaaacagatcggaacttgtggcctgccgggtaccaaatgttgcaagaagcca

SEQ ID NO: 10469 - DNA, 192 bp, synthetic construct
  misc_feature 1..192: note = source = /note="Description of Artificial Sequence: Synthetic coding sequence"
  source 1..192: mol_type = other DNA
atgcgagtgctgtatctgctttttagcttcctgttcatctttctcatgcctctgccaggagtctttggtggaatcggcgatccagtgacgtgtcttaaatcgggagcgatttgccaccctgtgttctgcccgagacgctacaaacaaatcggaacctgtggactgccaggtactaagtgttgtaagaagccg

SEQ ID NO: 10470 - DNA, 192 bp, synthetic construct
  misc_feature 1..192: note = source = /note="Description of Artificial Sequence: Synthetic coding sequence"
  source 1..192: mol_type = other DNA
atgagggtcctttacttgctgtttagctttctcttcatcttcctgatgcctctccccggggtatttggcggcataggagacccagtaacttgtctgaaatctggtgcgatctgccatccagtcttctgtcctcggcgatacaagcagatcggcacttgcggcttgcctgggaccaagtgttgcaagaaacct

SEQ ID NO: 10471 - DNA, 192 bp, synthetic construct
  misc_feature 1..192: note = source = /note="Description of Artificial Sequence: Synthetic coding sequence"
  source 1..192: mol_type = other DNA
atgcgagtcctctacctgctgttttcctttctgtttatcttcctgatgccattgcctggggtctttgggggtatcggagatccagttacttgccttaagtccggtgcaatttgtcacccggtgttttgtcccagacggtacaagcaaatcggtacctgtggactccctggaacgaagtgttgcaagaagcct

SEQ ID NO: 10472 - DNA, 192 bp, synthetic construct
  misc_feature 1..192: note = source = /note="Description of Artificial Sequence: Synthetic coding sequence"
  source 1..192: mol_type = other DNA
atgcgcgtgctgtaccttctgttctcctttctctttatctttctcatgccattgcctggagtctttggcggcattggtgacccagtgacctgcctgaagtcgggcgcaatctgtcatcctgtgttttgccctcgtcggtataaacaaattggcacctgcgggctgccaggaaccaagtgttgcaagaaaccc

SEQ ID NO: 10473 - DNA, 192 bp, synthetic construct
  misc_feature 1..192: note = source = /note="Description of Artificial Sequence: Synthetic coding sequence"
  source 1..192: mol_type = other DNA
atgagagtcctgtacctgctgttttcgtttcttttcatattcctcatgcctctccccggcgtctttggtggcattggcgatcccgtgacatgcctgaaatctggagccatctgtcacccagtgttctgtcctagaaggtataagcaaataggaacctgcgggctcccaggaacgaagtgttgtaaaaaaccc

SEQ ID NO: 10474 - DNA, 192 bp, synthetic construct
  misc_feature 1..192: note = source = /note="Description of Artificial Sequence: Synthetic coding sequence"
  source 1..192: mol_type = other DNA
atgcgggtcctgtacctcctcttctcattcctgtttatcttcctcatgccgctgccaggggtttttggtggcatcggggacccggtgacttgcttgaagtccggagcgatttgtcacccagtgttctgcccgagacgatacaaacagatcggaacctgcggcctgccgggtacgaagtgctgtaaaaagcct

SEQ ID NO: 10475 - DNA, 192 bp, synthetic construct
  misc_feature 1..192: note = source = /note="Description of Artificial Sequence: Synthetic coding sequence"
  source 1..192: mol_type = other DNA
atgagggtcttatacctgctcttttccttcctgtttatttttcttatgcctcttccgggcgtattcggaggaattggggatccggtcacatgcttgaagtctggtgccatttgccaccccgtcttctgcccacgcagatataagcagatcggtacctgtggccttccgggcaccaagtgttgcaagaagccc

SEQ ID NO: 10476 - DNA, 192 bp, synthetic construct
  misc_feature 1..192: note = source = /note="Description of Artificial Sequence: Synthetic coding sequence"
  source 1..192: mol_type = other DNA
atgagagtcctgtacttgctcttttccttcctgttcatctttttaatgcccctgccaggtgtgtttgggggcataggagatccggtcacctgtttgaagtctggagccatctgccaccccgtgttttgcccaaggagatacaagcaaattgggacctgtgggctccctggcaccaagtgttgtaagaaacct

SEQ ID NO: 10477 - DNA, 192 bp, synthetic construct
  misc_feature 1..192: note = source = /note="Description of Artificial Sequence: Synthetic coding sequence"
  source 1..192: mol_type = other DNA
atgagggtgctttatctcctgttctccttcctcttcatcttcttgatgccactacccggcgtttttggcgggataggtgatccggtgacctgcctgaagtccggagccatttgccatccagtgttctgtcctcgccgatataaacagatcggtacgtgcggcctacccggtacgaagtgttgtaagaagccc

SEQ ID NO: 10478 - DNA, 192 bp, synthetic construct
  misc_feature 1..192: note = source = /note="Description of Artificial Sequence: Synthetic coding sequence"
  source 1..192: mol_type = other DNA
atgcgggtgctttacctgctgttctcgtttctgtttatcttccttatgcctctgcctggagtgtttggcggcataggagatccagtcacctgcctgaagtccggggcaatttgccatcccgtcttttgcccaagacgttacaagcaaattggcacttgtggacttcccggtactaaatgttgtaaaaagcct

SEQ ID NO: 10479 - DNA, 192 bp, synthetic construct
  misc_feature 1..192: note = source = /note="Description of Artificial Sequence: Synthetic coding sequence"
  source 1..192: mol_type = other DNA
atgagagtgctgtacctcctcttcagctttctcttcatttttttgatgcccctgcctggcgtattcgggggaatcggcgatcccgtgacgtgcctgaagtctggtgccatctgccatccggtgttctgtcctcgacgatataagcagatagggacctgcggactcccgggcacaaagtgttgcaaaaaacca

SEQ ID NO: 10480 - DNA, 192 bp, synthetic construct
  misc_feature 1..192: note = source = /note="Description of Artificial Sequence: Synthetic coding sequence"
  source 1..192: mol_type = other DNA
atgcgagttctgtaccttttgttctccttccttttcatttttctcatgcctctgcccggggtgtttggcggcatcggggaccctgttacatgtctaaaatcgggcgccatctgccatccggtgttctgcccaagacgatacaagcagataggcacatgtggccttcctgggacgaagtgttgcaagaagcca

SEQ ID NO: 10481 - DNA, 192 bp, synthetic construct
  misc_feature 1..192: note = source = /note="Description of Artificial Sequence: Synthetic coding sequence"
  source 1..192: mol_type = other DNA
atgcgggtgttgtatttactgtttagttttcttttcatctttttaatgccactacctggggtgtttggtgggattggggaccccgtaacctgtctcaaatccggcgcgatttgtcaccccgtcttttgcccgagaaggtataagcagatcggaacgtgcggacttcccggcaccaagtgctgcaaaaagccc

SEQ ID NO: 10482 - DNA, 192 bp, synthetic construct
  misc_feature 1..192: note = source = /note="Description of Artificial Sequence: Synthetic coding sequence"
  source 1..192: mol_type = other DNA
atgcgtgtcttgtatctgctcttcagtttcctgttcatctttttgatgcccttgcccggcgtcttcggcggaatcggagaccctgtgacttgtctgaagagtggtgctatctgccatccagtgttctgtccccgtcgctacaagcaaatcggtacctgcggtttgcctggtacaaagtgctgtaagaagccc

SEQ ID NO: 10483 - DNA, 192 bp, synthetic construct
  misc_feature 1..192: note = source = /note="Description of Artificial Sequence: Synthetic coding sequence"
  source 1..192: mol_type = other DNA
atgcgggtcctttaccttcttttctcgtttctcttcatattccttatgcctctgccaggagtgttcggcgggattggcgacccagtcacttgccttaagtccggagcaatttgccatccggtgttttgtccacgaaggtacaagcagattggtacttgtggcctgccaggaaccaagtgttgtaagaagcct

SEQ ID NO: 10484 - DNA, 192 bp, synthetic construct
  misc_feature 1..192: note = source = /note="Description of Artificial Sequence: Synthetic coding sequence"
  source 1..192: mol_type = other DNA
atgagggttctctacttgctcttttccttcctttttattttcctgatgcccctgcctggtgtcttcggcggcatcggtgatccagtgacctgcctgaaatctggtgcaatctgccacccggtgttctgccctcgccgctacaaacagataggaacctgtggtctgccgggtactaaatgttgtaaaaagcca

SEQ ID NO: 10485 - DNA, 192 bp, synthetic construct
  misc_feature 1..192: note = source = /note="Description of Artificial Sequence: Synthetic coding sequence"
  source 1..192: mol_type = other DNA
atgcgcgtgctgtacctcctcttctcattcctgttcatcttcctcatgccactgccaggtgtgttcggcggaatcggagatcctgttacttgcttgaagtccggggccatctgccaccccgtgttctgtccgagacggtacaagcaaattggaacctgcggcttgccgggaaccaaatgttgcaagaaaccg

SEQ ID NO: 10486 - DNA, 192 bp, synthetic construct
  misc_feature 1..192: note = source = /note="Description of Artificial Sequence: Synthetic coding sequence"
  source 1..192: mol_type = other DNA
atgcgggtgctctatctactgttcagctttctatttatcttcctgatgccattgcccggcgtttttggaggaatcggggatccagtgacttgcctgaagagcggtgcaatctgccacccagtattttgcccacgtagatacaagcagataggcacttgtggcctgcctggaaccaagtgttgcaagaagccc

SEQ ID NO: 10487 - DNA, 192 bp, synthetic construct
  misc_feature 1..192: note = source = /note="Description of Artificial Sequence: Synthetic coding sequence"
  source 1..192: mol_type = other DNA
atgagagtgctctaccttctgttttcgttccttttcatcttcctgatgcccctgccgggtgtattcggtggaatcggtgaccctgtgacctgcttgaagtccggcgccatctgtcacccagtgttttgtccacggcgctacaagcagattgggacttgcggactgcctggaactaagtgctgcaaaaaaccg

SEQ ID NO: 10488 - DNA, 192 bp, synthetic construct
  misc_feature 1..192: note = source = /note="Description of Artificial Sequence: Synthetic coding sequence"
  source 1..192: mol_type = other DNA
atgcgcgttctgtaccttctgttttccttcctgttcatcttcctgatgcccttgccaggggtgttcggcgggatcggagatcccgtcacctgtctcaagtcgggcgccatctgccacccagtgttctgcccgcgccggtacaaacagatcggtacttgtggcctgccaggcaccaagtgctgcaagaaacca

SEQ ID NO: 10489 - DNA, 192 bp, synthetic construct
  misc_feature 1..192: note = source = /note="Description of Artificial Sequence: Synthetic coding sequence"
  source 1..192: mol_type = other DNA
atgcgagtgctgtaccttttgttttcgtttcttttcatcttcctgatgcctctccctggtgtgtttgggggtattggtgaccctgtgacgtgcctcaagtccggtgcaatctgtcatcctgtgttttgcccacggagatacaagcaaattgggacttgtgggcttccgggtaccaaatgttgtaaaaagcct

SEQ ID NO: 10490 - DNA, 192 bp, synthetic construct
  misc_feature 1..192: note = source = /note="Description of Artificial Sequence: Synthetic coding sequence"
  source 1..192: mol_type = other DNA
atgcgcgttctgtacctgctgttttccttcttgttcattttcctcatgcccctccccggcgtgttcggaggcattggggacccagtcacatgcttaaagagcggggccatttgccaccctgttttctgtcccaggcgctataaacagatagggacatgcggactgcccggtacaaagtgctgtaaaaagcca

SEQ ID NO: 10491 - DNA, 192 bp, synthetic construct
  misc_feature 1..192: note = source = /note="Description of Artificial Sequence: Synthetic coding sequence"
  source 1..192: mol_type = other DNA
atgagagtgttatacttgctgttcagtttcctttttatttttctgatgcccctgccaggcgtttttggcgggataggggatccagttacctgcctgaagagcggcgctatatgccaccccgtgttctgcccaaggcggtacaagcagattggcacttgcggcctacctggcacaaaatgctgtaaaaaaccc

SEQ ID NO: 10492 - DNA, 192 bp, synthetic construct
  misc_feature 1..192: note = source = /note="Description of Artificial Sequence: Synthetic coding sequence"
  source 1..192: mol_type = other DNA
atgcgagtgctatatcttctgttttcgtttctttttatttttttgatgccattgccgggagttttcggcggaattggagacccagttacttgtttgaagtcaggcgccatctgtcatccagtattttgtccgagacgatataagcaaatcgggacatgtggactcccgggaacaaaatgctgtaaaaaacca

SEQ ID NO: 10493 - DNA, 192 bp, synthetic construct
  misc_feature 1..192: note = source = /note="Description of Artificial Sequence: Synthetic coding sequence"
  source 1..192: mol_type = other DNA
atgcgggtgctttacttgttgttctccttcctgtttatctttttgatgcccctgcctggagtctttggcggaatcggggatccggtgacctgcctgaagtcgggcgcaatctgtcatccagtgttctgccctagacgttacaagcagattggtacttgtgggttgccaggtactaaatgttgcaagaagcct

SEQ ID NO: 10494 - DNA, 192 bp, synthetic construct
  misc_feature 1..192: note = source = /note="Description of Artificial Sequence: Synthetic coding sequence"
  source 1..192: mol_type = other DNA
atgcgcgtgctttatctgctgttctccttcctctttatctttctcatgccactgccgggagttttcggaggcattggtgatccagtgacttgcctgaagagcggcgcgatctgtcaccctgtgttttgtccaagaagatacaaacagatcggaacgtgcgggctgccaggaaccaaatgctgcaagaagccg

SEQ ID NO: 10495 - DNA, 192 bp, synthetic construct; identical to SEQ ID NO: 10466
  misc_feature 1..192: note = source = /note="Description of Artificial Sequence: Synthetic coding sequence"
  source 1..192: mol_type = other DNA

SEQ ID NO: 10496 - DNA, 192 bp, synthetic construct
  misc_feature 1..192: note = source = /note="Description of Artificial Sequence: Synthetic coding sequence"
  source 1..192: mol_type = other DNA
atgcgcgtgttgtacctgctgttcagcttcctgtttatcttcctcatgcctctgcctggggtgtttggcggaatcggcgaccctgtgacttgccttaaatcaggggccatttgccacccagtgttttgcccccgcaggtataagcagatcggaacctgcggcctccctggcactaagtgctgtaaaaagccg

SEQ ID NO: 10497 - DNA, 192 bp, synthetic construct
  misc_feature 1..192: note = source = /note="Description of Artificial Sequence: Synthetic coding sequence"
  source 1..192: mol_type = other DNA
atgcgggtattgtacctgttgttcagtttcctatttatttttcttatgcctctgcccggcgtgttcggcggcatcggtgatcccgttacgtgcttaaaaagcggagccatctgccaccccgtattctgcccaaggcgatataaacagatcggtacctgtggcttgccaggcaccaaatgctgtaagaagcct

SEQ ID NO: 10498 - DNA, 192 bp, synthetic construct
  misc_feature 1..192: note = source = /note="Description of Artificial Sequence: Synthetic coding sequence"
  source 1..192: mol_type = other DNA
atgagagttctctacctgctgttctctttccttttcatcttcttgatgccgttgcccggcgtcttcggtggtataggtgaccccgtaacgtgcctgaagagcggggcaatatgccatccagtcttctgtccacggcgctacaaacagataggaacctgtggccttccaggcactaagtgctgtaagaagccg

SEQ ID NO: 10499 - DNA, 192 bp, synthetic construct
  misc_feature 1..192: note = source = /note="Description of Artificial Sequence: Synthetic coding sequence"
  source 1..192: mol_type = other DNA
atgagggtgctgtacctgttgttctccttcctgtttatcttcctcatgccgctgccgggagtttttggaggcatcggggacccagtcacttgcctcaaaagcggtgccatatgtcacccagtgttctgtcctcgtcggtacaaacagatcggaacctgcgggcttcccggaaccaagtgctgcaagaagccg

SEQ ID NO: 10500 - DNA, 192 bp, synthetic construct
  misc_feature 1..192: note = source = /note="Description of Artificial Sequence: Synthetic coding sequence"
  source 1..192: mol_type = other DNA
atgagagtgctctacctcttgttctcgttcctctttatctttctgatgccccttccgggggtctttggaggaatcggagatccagtcacgtgtctcaaatcgggtgcaatttgccatcctgtgttttgtcctcggaggtacaagcaaataggtacttgtggactgcctggcaccaagtgctgcaagaagcca

SEQ ID NO: 10501 - DNA, 192 bp, synthetic construct
  misc_feature 1..192: note = source = /note="Description of Artificial Sequence: Synthetic coding sequence"
  source 1..192: mol_type = other DNA
atgagagtgctctaccttctctttagctttttgtttatcttccttatgcctttgcctggggtgttcggaggaataggagatccagtgacctgtcttaagtccggggcaatttgtcatcccgttttctgcccccggcgctacaagcaaataggaacttgtggccttccggggactaagtgttgcaaaaaaccg

SEQ ID NO: 10502 - DNA, 192 bp, synthetic construct
  misc_feature 1..192: note = source = /note="Description of Artificial Sequence: Synthetic coding sequence"
  source 1..192: mol_type = other DNA
atgcgggtcctgtaccttctgttttcgttcctgttcatcttcttgatgccgctcccgggcgtattcggaggaattggtgacccagtgacctgcctcaaatcaggggccatctgccaccctgtgttttgcccaagacgatacaagcagatagggacttgcggactgcccggaaccaaatgttgcaagaagccg

SEQ ID NO: 10503 - DNA, 192 bp, synthetic construct
  misc_feature 1..192: note = source = /note="Description of Artificial Sequence: Synthetic coding sequence"
  source 1..192: mol_type = other DNA
atgcgtgttctgtacctgctgttctcctttctgttcatattccttatgcctttgcctggagtcttcggaggaataggcgaccctgtaacctgtctcaagtctggggccatttgccaccctgtgttctgtccaagaaggtataagcagatagggacatgtggcctgccaggcaccaaatgctgcaaaaagccc

SEQ ID NO: 10504 - DNA, 192 bp, synthetic construct
  misc_feature 1..192: note = source = /note="Description of Artificial Sequence: Synthetic coding sequence"
  source 1..192: mol_type = other DNA
atgcgagtactatatttattattttcgtttctatttatatttttaatgccgttaccgggtgtttttggtggtataggtgatccggttacgtgtttaaaatcgggtgcgatatgtcatccggtattttgtccgcgtcgatataaacaaataggtacgtgtggtctaccgggtacgaaatgttgtaaaaaaccg

SEQ ID NO: 10505 - DNA, 192 bp, synthetic construct
  misc_feature 1..192: note = source = /note="Description of Artificial Sequence: Synthetic coding sequence"
  source 1..192: mol_type = other DNA
atgcgagttctctacctcctgttctcatttttgttcatctttctgatgccactgcctggtgtgttcggaggaatcggagatccggtcacgtgtctgaagtccggcgcaatctgccaccccgtgttctgcccgagacggtacaagcagataggtacttgtgggctgcccggcaccaaatgctgcaaaaagccg

SEQ ID NO: 10506 - DNA, 192 bp, synthetic construct
  misc_feature 1..192: note = source = /note="Description of Artificial Sequence: Synthetic coding sequence"
  source 1..192: mol_type = other DNA
atgcgagttttgtatctgctcttctccttcctgtttatcttcctgatgccccttccaggagttttcggcgggatcggggatcccgtgacctgtctgaaatcaggagcgatttgccatcctgtcttttgccctagacgatataagcagatcgggacatgcggcctgccgggtacaaaatgctgcaagaaacct

SEQ ID NO: 10507 - DNA, 192 bp, synthetic construct
  misc_feature 1..192: note = source = /note="Description of Artificial Sequence: Synthetic coding sequence"
  source 1..192: mol_type = other DNA
atgagggtgctttacctgctgttcagcttcctctttatattcctcatgccactgcccggggtgttcgggggcatcggagatcccgtcacatgcctgaagtctggagcaatatgccaccccgtgttctgtcccagacggtacaagcagattgggacctgcgggctccccggcaccaagtgctgcaagaaaccc

SEQ ID NO: 10508 - DNA, 192 bp, synthetic construct
  misc_feature 1..192: note = source = /note="Description of Artificial Sequence: Synthetic coding sequence"
  source 1..192: mol_type = other DNA
atgcgcgttttgtacttgttgttttccttcctgtttatctttcttatgcctctgcccggcgtcttcgggggaattggagatccagtgacgtgtctgaagtcaggtgccatctgtcatccggtgttctgcccacggaggtataagcagatagggacctgtgggctgcctggaactaaatgctgtaagaagcca

SEQ ID NO: 10509 - DNA, 192 bp, synthetic construct
  misc_feature 1..192: note = source = /note="Description of Artificial Sequence: Synthetic coding sequence"
  source 1..192: mol_type = other DNA
atgagagtgctctatctcttgttctctttcctctttatcttcctgatgccactccccggtgtatttggcgggattggggatccagtcacatgcttgaagtctggggcaatatgtcaccctgtattctgtcctagacgttataagcagattggcacatgtggtctccctggcactaagtgctgtaagaaacct

SEQ ID NO: 10510 - DNA, 192 bp, synthetic construct
  misc_feature 1..192: note = source = /note="Description of Artificial Sequence: Synthetic coding sequence"
  source 1..192: mol_type = other DNA
atgagagtcctttacctgcttttctcatttcttttcatattccttatgccgctgcctggagtgttcggggggattggcgaccccgtgacctgtctcaagtcgggggccatctgtcaccctgtcttttgcccacgaaggtacaagcagattggaacctgtggtctgccaggtaccaagtgctgtaaaaagcca

SEQ ID NO: 10511 - DNA, 192 bp, synthetic construct
  misc_feature 1..192: note = source = /note="Description of Artificial Sequence: Synthetic coding sequence"
  source 1..192: mol_type = other DNA
atgagagtactttatttattattttcttttttatttatttttttaatgccattaccaggagtttttgggggaattggtgatccagtaacttgtttaaaatcgggagcaatttgtcatccagttttctgtccaagacgttataaacaaattggaacatgtggattaccaggaacaaaatgttgtaaaaaacca

SEQ ID NO: 10512 - DNA, 192 bp, synthetic construct
  misc_feature 1..192: note = source = /note="Description of Artificial Sequence: Synthetic coding sequence"
  source 1..192: mol_type = other DNA
atgcgcgtactatacctactatttagttttctgtttatattcctaatgcctttacctggtgtttttggaggcataggagaccctgtgacttgcctgaaatcaggggcaatttgccaccctgttttctgcccacgccgttacaaacagataggaacctgcgggcttcccggtactaaatgctgtaagaaaccg

SEQ ID NO: 10513 - DNA, 192 bp, synthetic construct
  misc_feature 1..192: note = source = /note="Description of Artificial Sequence: Synthetic coding sequence"
  source 1..192: mol_type = other DNA
atgagggttctgtatctcctgttcagttttctctttatttttctgatgcccctacctggagtgttcggaggaattggagaccctgtcacctgccttaagtctggggcaatctgtcatcctgttttttgtcccaggcgatacaagcaaataggaacctgcggtttgcctggcaccaaatgctgtaagaaacca

SEQ ID NO: 10514 - DNA, 192 bp, synthetic construct
  misc_feature 1..192: note = source = /note="Description of Artificial Sequence: Synthetic coding sequence"
  source 1..192: mol_type = other DNA
atgagagtcctctacctgcttttctcatttctctttatctttcttatgcccctgccgggtgtgttcggcggtataggggatcctgttacctgccttaagtccggcgccatttgtcatcccgtgttctgtccgcgccggtacaagcaaattggaacttgtgggctgcctggcaccaagtgttgcaaaaaacca

SEQ ID NO: 10515 - DNA, 192 bp, synthetic construct
  misc_feature 1..192: note = source = /note="Description of Artificial Sequence: Synthetic coding sequence"
  source 1..192: mol_type = other DNA
atgcgggtgttgtacctcctcttttcctttcttttcatctttctgatgccactgcccggagttttcggtggaatcggagatcctgtgacctgtctgaagtcaggagcaatatgccatccagtgttttgccctcgtcgctacaagcaaattggaacctgtggtctgccaggaacgaagtgttgtaagaaacca

SEQ ID NO: 10516 - DNA, 192 bp, synthetic construct
  misc_feature 1..192: note = source = /note="Description of Artificial Sequence: Synthetic coding sequence"
  source 1..192: mol_type = other DNA
atgagggtcctttacctgctcttttcatttctctttatcttcctgatgccgctgccgggagttttcggaggaatcggagatccggtgacgtgtttgaaatccggcgcgatctgccacccagtgttctgcccgcgccggtacaaacagattggcacctgtgggcttccgggaactaagtgctgcaagaagccg

SEQ ID NO: 10517 - DNA, 192 bp, synthetic construct
  misc_feature 1..192: note = source = /note="Description of Artificial Sequence: Synthetic coding sequence"
  source 1..192: mol_type = other DNA
atgagggtcctgtacctgttgttctccttcctgttcatctttctgatgccacttccgggagtcttcggaggaatcggcgacccggtgacctgtttgaagagcggagccatctgccacccggtcttctgcccaagacggtataaacagatcggcacttgtgggctgcctggaaccaagtgttgtaaaaagcct

SEQ ID NO: 10518 - DNA, 192 bp, synthetic construct
  misc_feature 1..192: note = source = /note="Description of Artificial Sequence: Synthetic coding sequence"
  source 1..192: mol_type = other DNA
atgcgggtgctgtatctgctgtttagcttcttgttcatctttctgatgccgttaccgggcgtgttcggtgggatcggcgatccggttacctgcctgaagtctggagcaatatgccacccggtgttctgcccacgccgctacaaacaaatcggcacctgtggcctgccagggacaaagtgctgtaaaaaacct

SEQ ID NO: 10519 - DNA, 192 bp, synthetic construct
  misc_feature 1..192: note = source = /note="Description of Artificial Sequence: Synthetic coding sequence"
  source 1..192: mol_type = other DNA
atgcgcgtgctgtacctgctgttcagcttcctctttatcttcctgatgccgttgccgggagtctttggcggaatcggcgacccggtgacttgcctgaaatccggagcgatctgccatccagttttttgtccaaggcggtacaaacagatcggaacctgcggactgccaggaaccaaatgttgcaagaagcca

SEQ ID NO: 10520 - DNA, 192 bp, synthetic construct
  misc_feature 1..192: note = source = /note="Description of Artificial Sequence: Synthetic coding sequence"
  source 1..192: mol_type = other DNA
atgagagtgctttaccttctgtttagcttcctcttcatctttcttatgccgttgcccggcgtctttggtggtattggagatccagtcacctgtctcaagtcgggggccatttgccatcctgttttctgcccgagacggtacaagcaaataggaacttgtggactgcctggtacgaagtgctgtaagaaacca

SEQ ID NO: 10521 - DNA, 192 bp, synthetic construct
  misc_feature 1..192: note = source = /note="Description of Artificial Sequence: Synthetic coding sequence"
  source 1..192: mol_type = other DNA
atgcgcgtgttgtacctcctgttctcgtttctgttcatctttctgatgccgcttccgggggtgttcggaggaattggagatccagtcacgtgcctgaaatcaggtgccatctgtcacccggttttctgccctagacgatacaagcagatcggcacttgtggcctgccggggactaaatgctgtaagaagccg

SEQ ID NO: 10522 - DNA, 192 bp, synthetic construct
  misc_feature 1..192: note = source = /note="Description of Artificial Sequence: Synthetic coding sequence"
  source 1..192: mol_type = other DNA
atgcgggtcctgtacctgctgtttagctttctatttattttcctgatgccactgccaggcgtattcggaggaatcggagatccggtgacctgtctcaagtccggcgcgatttgccaccccgtcttctgccctcggcgctataaacagatagggacttgcgggctgcccgggacaaagtgttgcaaaaagcca

SEQ ID NO: 10523 - DNA, 192 bp, synthetic construct
  misc_feature 1..192: note = source = /note="Description of Artificial Sequence: Synthetic coding sequence"
  source 1..192: mol_type = other DNA
atgagagtattatatctcctcttctcgttcctattcatcttcttgatgcccctgccaggagtcttcggaggcattggggacccagtgacatgcttaaagagcggcgctatctgtcaccccgttttctgcccccggcgttataaacagataggtacatgtggtcttcctgggactaagtgttgcaaaaagccc

SEQ ID NO: 10524 - DNA, 192 bp, synthetic construct
  misc_feature 1..192: note = source = /note="Description of Artificial Sequence: Synthetic coding sequence"
  source 1..192: mol_type = other DNA
atgcgtgtcttgtacctgctgttttcattccttttcatattcctgatgccgttaccaggggttttcggcggaatcggtgatccagttacatgtctgaaaagtggggctatttgccatcctgtgttttgtccacgtaggtacaaacagattggtacctgtgggctgcccggcactaagtgctgtaaaaagccg

SEQ ID NO: 10525 - DNA, 192 bp, synthetic construct
  misc_feature 1..192: note = source = /note="Description of Artificial Sequence: Synthetic coding sequence"
  source 1..192: mol_type = other DNA
atgagagtgctctacctgctgttctcgttccttttcatcttcctgatgccgctcccgggagtgttcggcggaattggcgatcctgtcacttgcctgaaatcaggtgcaatctgtcacccagtgttttgcccgcggaggtacaagcagattggtacgtgcggattgcccggtactaagtgctgtaagaaaccc

SEQ ID NO: 10526 - DNA, 192 bp, synthetic construct
  misc_feature 1..192: note = source = /note="Description of Artificial Sequence: Synthetic coding sequence"
  source 1..192: mol_type = other DNA
atgcgtgttctgtaccttttattcagcttcttgttcatattcttgatgcctctgccaggggtcttcgggggcatcggtgacccagtgacttgcctcaagtctggcgccatctgtcatcctgtcttctgcccccgaagatacaagcagattggcacatgcggtttaccaggcacaaagtgttgtaagaagcct

SEQ ID NO: 10527 - DNA, 192 bp, synthetic construct
  misc_feature 1..192: note = source = /note="Description of Artificial Sequence: Synthetic coding sequence"
  source 1..192: mol_type = other DNA
atgcgcgttttgtacctgttgttttccttcctgttcatttttctgatgcctcttcccggggtgttcggtgggataggtgatccggtcacgtgtctcaagtcgggagcaatatgtcatcccgtgttctgtccaagaaggtacaagcagatcggaacctgcggccttcctggtactaaatgctgcaagaagccg

SEQ ID NO: 10528 - DNA, 192 bp, synthetic construct
  misc_feature 1..192: note = source = /note="Description of Artificial Sequence: Synthetic coding sequence"
  source 1..192: mol_type = other DNA
atgcgggtcctgtatttgctgttctctttcctcttcattttcctgatgccactgcccggtgtctttggtggcattggcgatccagtcacttgcctcaagagcggcgcaatttgccatccagttttctgtccccgaaggtacaagcagatcggtacctgcggcttgcccggaacaaaatgttgtaagaaacct

SEQ ID NO: 10529 - DNA, 192 bp, synthetic construct
  misc_feature 1..192: note = source = /note="Description of Artificial Sequence: Synthetic coding sequence"
  source 1..192: mol_type = other DNA
atgcgcgtgctgtacctcttgttcagcttcctgttcattttcctgatgccgctgccgggggtctttggtggaatcggggaccctgtgacttgtctgaagagcggagcaatctgccacccggtgttctgccctcggaggtacaaacagatcggaacttgtggactgccaggaacgaagtgctgtaaaaagcct

SEQ ID NO: 10530 - DNA, 846 bp, synthetic construct
  misc_feature 1..846: note = source = /note="Description of Artificial Sequence: Synthetic coding sequence"
  source 1..846: mol_type = other DNA
atgcgcggaatgaaacttttgggagcccttctggctctcgccgcattactacagggggccgtatcccttaaaatagccgcctttaacatacagactttcggagaaacaaaaatgagtaatgccacactagtgtcatatatagttcagatactctcaaggtatgatatcgctctagtccaggaagtccgtgattcccatctgacagccgtcggaaaactgctggataatcttaatcaagatgcccccgatacatatcactatgtagtttcagagccactagggagaaacagttacaaagaacggtatctattcgtttatcgaccagatcaggttagtgccgtggatagttactactatgacgatgggtgtgaaccatgcggaaacgacactttcaatcgggaacctgctatcgtccgttttttttcacggtttacagaagtgcgggaatttgccatagtacccctgcacgctgctcccggagatgcagtagctgagatagatgccctttatgatgtgtatcttgatgtgcaggagaaatgggggctggaggatgtaatgttaatgggggatttcaacgcgggatgctcatacgtgaggccaagtcagtggtctagtattagactatggacttctcctacattccagtggttgataccagactctgctgatacaactgccacacccactcactgcgcctacgacaggatagtggttgcaggaatgctcctacgcggagccgtagtgcccgattctgctctgccatttaatttccaggctgcgtatgggctgagtgatcagcttgcccaggctatatctgatcattacccggtggaagtcatgctcaaa

SEQ ID NO: 10531 - DNA, 846 bp, synthetic construct
  misc_feature 1..846: note = source = /note="Description of Artificial Sequence: Synthetic coding sequence"
  source 1..846: mol_type = other DNA
atgcggggaatgaagctgctgggggcgctgctggctctcgccgcgctactgcagggtgcagtgagcctgaagattgccgcattcaacattcaaaccttcggtgagacgaagatgtctaacgccacactggttagctatatcgtccagattttgtccagatatgacatagccctggttcaagaggtgcgagattcacatctgaccgccgtgggtaagttgctggacaacctgaaccaggacgcccctgacacctatcattatgttgtcagtgagccactcggtcgtaattcctacaaagagaggtacttatttgtatacaggcctgatcaagtctccgccgttgattcttactattacgacgatggttgtgagccgtgtgggaatgacacttttaacagagaacctgccattgttcgtttcttttcccgattcacggaggtacgcgagttcgcgatcgtgccactccacgccgcgccaggtgacgccgtggctgaaattgatgctctgtacgatgtgtacctggatgttcaagagaaatggggcctggaagacgttatgctgatgggtgatttcaatgccggctgttcgtacgttcgccccagccagtggagctctatccgcctgtggacgtccccgacttttcaatggctgattccagattcggccgatactaccgcaactccaacccactgcgcgtacgaccgtattgtagttgcaggtatgctgctgcgcggtgctgtcgtgccggacagcgcgctgcctttcaattttcaagcggcttatggcctgagtgatcagctggctcaggccatatccgatcactatccagttgaagttatgctgaaa

SEQ ID NO: 10532 - DNA, 846 bp, synthetic construct
  misc_feature 1..846: note = source = /note="Description of Artificial Sequence: Synthetic coding sequence"
  source 1..846: mol_type = other DNA
atgcggggcatgaagctgctgggggcacttttggcactggcagcattgctccagggtgccgtgtccctcaagatcgcggctttcaatatccaaactttcggagaaaccaagatgtccaacgccactctggttagctacatcgtgcaaattctgtcgcggtacgatatcgcactggtgcaggaggtccgggattcgcacctgactgccgtgggcaagttgctggacaacctgaaccaggacgccccggacacctatcattacgtcgtcagcgaaccattgggaagaaactcctacaaggaacgatacctgttcgtctacagaccggaccaggtgagcgccgtcgatagctactactatgacgacggatgtgagccttgcgggaatgacactttcaaccgggagccggccatcgtgagattcttctcaaggtttacggaagtgcgggagttcgctatcgttcctctccacgccgcaccgggagatgccgtggctgaaatcgacgcattgtacgacgtttaccttgatgtgcaagagaagtggggactcgaggacgtgatgctgatgggggactttaatgccggctgctcctacgtgcgcccgagccagtggtcatctatccgcctttggacctcgcctacttttcagtggctcattccggatagcgcagacaccaccgctacccccacccactgcgcgtacgaccgtatcgtcgtggctggaatgctgctgaggggcgctgtggtgccggactccgcccttcctttcaatttccaagctgcgtacggcctgtcggatcagctcgctcaagccataagcgatcattaccccgtggaagtgatgctgaag

SEQ ID NO: 10533 - DNA, 846 bp, synthetic construct
  misc_feature 1..846: note = source = /note="Description of Artificial Sequence: Synthetic coding sequence"
  source 1..846: mol_type = other DNA
atgaggggaatgaagctcctgggggcgctcctggcacttgcggcacttctgcaaggcgctgtgtccctcaagattgcagcgtttaacattcagacttttggagaaaccaaaatgtcgaacgcaaccctcgtgagctacatcgtccagattctctcgcgctacgacatagcactggtgcaagaagtgcgggactcacatctcaccgcggtcggaaaactccttgacaacctgaatcaagatgcccctgatacgtaccattacgtggtcagcgagccacttggcagaaacagctacaaggaaagatatctctttgtgtaccggcctgaccaggtatcagcagtcgattcatactactacgatgatggctgtgaaccttgcggtaacgatactttcaaccgtgagcccgccattgtccgcttcttctcgcgctttactgaagtgagggaatttgcaatcgtgccactgcacgccgcccccggcgacgccgtggcagaaattgacgcactgtacgatgtctacttggacgtgcaggaaaagtgggggcttgaggacgtcatgcttatgggagactttaacgcagggtgttcgtacgtccgcccctctcagtggtcatcaataagactgtggacctcccctacttttcagtggctcatcccagattctgccgacacgaccgcaactcctacgcattgcgcgtacgatagaatcgtggtggccggaatgcttctcagaggagcggtggtccccgattccgcactcccttttaacttccaagccgcatacggacttagcgatcaactggcacaagcgattagcgaccattacccggtggaggtcatgctcaag

SEQ ID NO: 10534 - DNA, 846 bp, synthetic construct
  misc_feature 1..846: note = source = /note="Description of Artificial Sequence: Synthetic coding sequence"
  source 1..846: mol_type = other DNA
atgaggggaatgaagttgctcggtgcactgttggcactggcagcattgctgcaaggtgcagtttctttgaaaatcgcagccttcaacatccagacctttggagaaaccaagatgagtaacgcaactctggtgagctacattgtccagattctgtcgcgctacgatattgccctggtgcaagaggtcagggattcccacctgaccgcagtgggcaaattgcttgataacctgaaccaggatgcacctgacacgtaccactacgtggtcagcgagcctctcgggcgcaattcgtacaaggaacggtaccttttcgtctaccggccagatcaagtgtcagcggtggattcgtattactatgacgacggatgtgagccttgtggcaacgacacgtttaaccgcgaaccagccattgtccgatttttctcccgctttaccgaagtgcgagaattcgccatcgttccgcttcatgcggcaccaggtgacgcagtcgcggaaattgacgctctgtacgacgtttacctcgatgtgcaagaaaagtggggactcgaagatgtgatgctgatgggtgatttcaacgcaggatgctcgtatgtgcgtccatcccagtggtcctcaataagattgtggacctcgcctactttccaatggcttattcctgatagcgctgataccaccgcaactccgacccactgtgcatacgatcgcattgtggtggcaggcatgctcctgcggggagccgtcgtcccggattccgcacttccttttaactttcaagcagcctacggcctgtccgatcaactggctcaagcgattagcgaccactaccctgtggaagtgatgcttaag

SEQ ID NO: 10535 - DNA, 846 bp, synthetic construct
  misc_feature 1..846: note = source = /note="Description of Artificial Sequence: Synthetic coding sequence"
  source 1..846: mol_type = other DNA
atgcgcggaatgaagctcctcggtgcccttctggctctggccgcactgctccaaggtgcggtgtcgctgaagatcgccgcctttaacatacagactttcggagaaaccaaaatgtcgaacgcaaccctggtcagctacattgtgcagatcctctcacgatacgacatcgccctggtgcaggaggtgagagactctcaccttactgcagtgggaaagttgctcgacaacctcaaccaggacgccccggatacttatcactacgtcgtctccgaaccgctgggccgcaactcttacaaagaacggtacctgttcgtgtacaggccagatcaggtttccgccgtcgatagctactactacgatgacggatgcgaaccatgtggcaatgatactttcaacagagagccggcgatcgtgcgctttttcagccgcttcacggaggtgagggagttcgcaatcgttccgctccacgctgctccgggcgacgctgtggcggaaatcgatgcgctgtacgacgtctacctggacgtgcaagagaagtgggggctggaagatgtcatgctgatgggagactttaacgcaggctgctcatacgtcagaccgtcgcaatggagctcaattcggctgtggacttccccaactttccagtggctcattccagattccgctgatactactgctactccaacgcattgcgcctacgaccggatcgtggtggccggaatgctgctcagaggcgctgtcgtgccggactctgccctgcccttcaactttcaggccgcgtacggactctcggaccagctggcccaggcgatctcggaccactaccctgtggaggtgatgctgaag

SEQ ID NO: 10536 - DNA, 846 bp, synthetic construct
  misc_feature 1..846: note = source = /note="Description of Artificial Sequence: Synthetic coding sequence"
  source 1..846: mol_type = other DNA
atgaggggaatgaagctgcttggggctctgctggcactggcagcactgctccaaggagctgtgtcattgaaaattgcagctttcaacatccaaacttttggtgagactaagatgtcgaacgcaaccttggtcagctatattgtgcaaatcttgtccagatacgacatcgcacttgtccaggaagtccgtgattcgcatcttaccgccgtcggaaagctcctggacaatttgaatcaagacgcgcctgatacttaccactacgtggtgtcggaacctctcggacggaactcgtacaaggaacgctacctgttcgtgtaccgcccagaccaggtgtcagccgtcgactcgtactactatgatgacggatgcgagccctgtggaaacgacaccttcaacagagagccggcgattgtgcggttctttagcaggtttactgaagtccgagagttcgcaatcgtgcccctccatgcggcccctggtgacgccgtggccgaaattgatgccctttacgatgtgtaccttgacgtgcaggaaaagtggggtttggaggacgtgatgcttatgggcgatttcaatgcaggctgttcgtacgtcagaccctcgcagtggtcctcgattcgcctgtggacttcacctacgtttcaatggctgatacctgactcggcggatactactgcgactcctacccactgtgcctacgacagaattgtagtggcaggcatgctcttgaggggcgcggtggtgcctgactcggcactgccttttaacttccaagcagcatacggactgagcgatcagctcgcacaggctatttcggatcattatcccgtggaagtgatgctcaag

SEQ ID NO: 10537 - DNA, 846 bp, synthetic construct
  misc_feature 1..846: note = source = /note="Description of Artificial Sequence: Synthetic coding sequence"
  source 1..846: mol_type = other DNA
atgcgcggaatgaagttgctgggagcccttctcgcactcgcagcgctcttgcaaggcgcagtctccctgaagatcgcagcctttaacattcagacttttggagaaaccaagatgtcgaatgcaaccctcgtatcctacattgtgcaaattctgtcgcggtacgatattgcgttggtccaagaggttagagatagtcacctcacggccgtgggaaagctgctcgataacctgaaccaggacgcaccagacacgtaccactatgtcgtgagcgaacctctgggaagaaactcgtacaaagaacgttacctttttgtgtaccgcccggatcaagtcagcgcagtcgattcgtattactacgacgatggttgcgaaccctgtggaaacgacacctttaacagggagcctgcgattgtgaggttcttttcccgattcactgaggtgcgagagtttgcaatcgtgcctctgcatgcggcccccggtgacgcagtggccgaaatcgacgctctgtacgacgtctacctggatgtgcaagaaaaatggggccttgaagatgtgatgctgatgggtgatttcaatgcggggtgttcgtacgtaagaccgagtcagtggtcaagcatcagactgtggacctcaccaacttttcagtggctgatccctgattcggctgacactactgccacgccaacccattgtgcatacgatcggattgtggtggcaggtatgttgctgcggggggcagtagtcccagatagcgctctgccattcaattttcaagcagcctacggcttgtccgatcagctggcacaggccatatctgatcattaccctgtcgaggtgatgcttaag

SEQ ID NO: 10538 - DNA, 846 bp, synthetic construct
  misc_feature 1..846: note = source = /note="Description of Artificial Sequence: Synthetic coding sequence"
  source 1..846: mol_type = other DNA
atgagaggcatgaaattgctgggcgcgcttttggccctggcagcgcttctgcaaggcgcggtcagcctgaaaatagccgccttcaatatccaaacctttggcgaaaccaagatgtcaaatgcgaccctggtgtcatacattgtgcagattctgtcaaggtacgacattgctcttgtgcaggaagttcgggatagccacctgacagctgtgggcaagctccttgataacctcaaccaggatgccccggacacctaccactacgtcgtttcagagccactggggcgcaactcctacaaagaaagatacctgtttgtatacagacccgatcaggtgtcggcagtagactcctactattatgatgacggttgtgagccttgtgggaacgatacattcaatcgagaacccgccattgtcaggtttttcagccgatttactgaggtgcgggagttcgcgatcgtgccacttcatgccgccccaggtgatgcagtcgcggagattgacgccctgtacgacgtgtatctggatgtgcaggagaagtggggacttgaggacgtgatgctgatgggcgacttcaacgcagggtgctcctacgtccgtcctagccagtggtccagcattaggctgtggacaagcccaactttccagtggttgatccccgactcagctgataccactgcaacccctacgcactgtgcctacgataggatcgtggttgctggtatgctgctcaggggcgctgttgttcccgactccgccttacccttcaattttcaggcagcctacgggctatcagaccagctcgcacaggccattagcgaccactaccccgttgaggtgatgctgaag

SEQ ID NO: 10539 - DNA, 846 bp, synthetic construct
  misc_feature 1..846: note = source = /note="Description of Artificial Sequence: Synthetic coding sequence"
  source 1..846: mol_type = other DNA
atgaggggaatgaaattattgggagctctattggctctcgctgctcttctacaaggagctgtaagtctcaagattgcagcattcaacattcaaaccttcggagagactaagatgagtaatgcaactctcgttagttatatagtccaaatactcagtagatatgacattgctcttgttcaggaagttcgcgactcacatctgacggctgtcggtaaactgttggataaccttaatcaggatgcacctgatacatatcattacgttgtctccgagcctctgggccgcaattcatacaaagaaagatatctctttgtgtataggccagatcaagtttcggctgtggattcgtattattatgatgacggatgcgaaccgtgtggtaacgatacttttaatcgtgaaccagcaattgtcagatttttctcccgattcactgaggtccgagagttcgccattgttccactccacgcggctccgggagatgctgtggcagagattgatgctttgtatgacgtgtatttggatgttcaggagaaatggggtctcgaggatgtgatgcttatgggtgatttcaatgctgggtgtagttatgtcagaccatctcagtggtcgagtattaggttatggacttcgccgacctttcaatggttgattcctgattctgccgacactacagccacgccaacccattgcgcatacgatagaatcgttgttgcgggaatgttgttgaggggtgctgttgtgccagattctgctctcccattcaattttcaagcggcctatggtttatcagatcaactcgcccaagccataagcgatcactatccagtagaagtcatgttgaag

SEQ ID NO: 10540 - DNA, 846 bp, synthetic construct
  misc_feature 1..846: note = source = /note="Description of Artificial Sequence: Synthetic coding sequence"
  source 1..846: mol_type = other DNA
atgcggggcatgaaactccttggagcgcttcttgcactcgcagccctgcttcaaggggcggtttcattgaagatagcagcgttcaacatacagacatttggagaaacaaaaatgtcaaatgcgacgctggtttcatacattgtgcagattcttagtaggtatgacatcgcattagtgcaagaagtaagagattcacatctcacagcggtcggcaaattgctggacaacttaaaccaagatgcgcccgatacgtatcattacgtggtttcagaacctctgggccgtaacagctataaggagcgatacttatttgtgtatcgccctgaccaggtcagcgctgtagattcatattactatgacgatggttgtgagccttgcggaaatgatacatttaacagggaaccagcaattgtgagatttttttcaaggtttacggaagtaagagagtttgcgattgttccgttgcatgctgcccccggggacgctgtcgcggaaattgacgcactatatgatgtttacttggacgtgcaagaaaaatggggattggaagacgtaatgttgatgggtgacttcaacgctggttgttcttatgtgcgtccaagccagtggtcctctataaggctgtggactagtccaacctttcagtggctgatcccggattcagccgatacgacagcgacccctacgcactgtgcttacgacagaatcgtggtagcagggatgttattgcggggcgcggtagtgccggactcagcgctgccattcaactttcaagccgcctatggcctgagcgatcagctggcccaagcgatttcggatcactatccagttgaagtaatgttaaaa

SEQ ID NO: 10541 - DNA, 846 bp, synthetic construct
  misc_feature 1..846: note = source = /note="Description of Artificial Sequence: Synthetic coding sequence"
  source 1..846: mol_type = other DNA
atgcgtggaatgaagctgctcggcgcacttctggcactcgccgctttattgcagggtgctgtcagtctgaaaatagcggccttcaatatccagacgtttggtgaaactaaaatgtccaacgctactttggtcagctatatcgtacagatccttagtaggtatgatattgccttggttcaggaggttcgagatagtcacctgacggcagtgggcaagctcctggacaatttaaaccaggacgctccagacacctatcactatgtagttagcgaaccccttggaagaaattcttacaaggagagatacttgttcgtctatcgacccgatcaggtaagtgccgtcgactcttactactatgacgacggttgcgagccctgcgggaacgatacatttaacagggaaccggccattgtgagattcttttctcgatttacagaggtgagagagtttgcaatagtgcccctgcacgccgcaccaggtgacgcggttgcggagatcgacgcactctatgacgtgtaccttgacgttcaggaaaaatggggactagaggacgtcatgttgatgggcgactttaatgccgggtgttcgtacgtgcgtccaagtcagtggagctccatcagactctggacatcaccaaccttccagtggcttatcccagacagcgcagacaccaccgcgactccaacacactgtgcctacgatagaattgtggtggcaggcatgctgctgcgaggcgcggtggttccagacagcgctctgcccttcaatttccaggccgcttacggactaagcgatcagctcgctcaggcgatatcagatcattatcccgtcgaggtgatgcttaag

SEQ ID NO: 10542 - DNA, 846 bp, synthetic construct
  misc_feature 1..846: note = source = /note="Description of Artificial Sequence: Synthetic coding sequence"
  source 1..846: mol_type = other DNA
atgaggggtatgaagctgctgggcgccctcctggcactggccgcgttgctacaaggtgccgtgtctctaaaaattgcggccttcaacatccaaactttcggcgagaccaaaatgtctaacgccactctggtgtcttatattgtacagattctttcacggtatgacatcgctttggtgcaggaagtgcgcgattcccacttaacagccgtcggtaaactgctggacaacctgaaccaggatgcccctgatacttaccattatgtcgtttctgaaccgttaggaaggaactcttacaaggagaggtatctgtttgtatatcgacctgaccaggtcagcgccgtggattcttactattatgacgacggttgtgaaccctgtgggaacgatacctttaaccgggaaccagctattgtgcgcttcttctcaagattcacggaagtgagggagttcgctatcgtgccgctccacgctgccccaggggatgctgtggcagagatcgacgccctctacgacgtctacctggatgtccaggagaagtggggtctggaggacgtcatgctgatgggagactttaatgcggggtgctcatatgtaagacccagtcaatggtcctccataaggctatggacgagcccgacatttcagtggttgatacccgattcggctgatactacagcgacccctacacattgtgcctatgaccgcatcgttgttgcagggatgttgctccggggtgctgttgtcccggactctgcattgcccttcaacttccaggcagcgtacggactcagtgatcaactggctcaggccattagtgaccattatccagtagaggtcatgctgaag

SEQ ID NO: 10543 - DNA, 846 bp, synthetic construct
  misc_feature 1..846: note = source = /note="Description of Artificial Sequence: Synthetic coding sequence"
  source 1..846: mol_type = other DNA
atgcgcggaatgaaactgctgggagccctccttgccctggccgcgctcctccagggagccgtctcgcttaagatcgccgctttcaacatccaaaccttcggggagactaagatgtcgaatgccaccctcgtgtcgtacatcgtgcagatcctgtcacggtacgacatcgcgctggtgcaagaagtaagagacagccacttgaccgccgtgggaaagctcctggacaatctcaaccaagacgcgccggatacctaccactacgttgtttccgaacctctgggacgcaactcctacaaggagcgataccttttcgtttatcgtccggatcaggtgtcggctgtggattcatactactacgacgacggatgcgaaccgtgcggcaatgatactttcaacagggaaccagcgatcgtccggttcttttcacggtttacggaagtgcgggagttcgcgatagtgccgctccacgcagcaccgggcgacgcggtggcagaaatcgatgccctttacgatgtctaccttgacgtgcaggagaaatgggggctggaggacgtgatgctgatgggagacttcaacgctggttgctcctacgtccgaccttcgcagtggtcctccatccggctctggacctcacccacgtttcaatggctcatcccagactccgcagacactacggcgaccccgactcactgtgcatacgatcgaatcgttgtcgcggggatgctgctcagaggggcagtggtgccagattcggccctgcctttcaactttcaggctgcctatggcctctccgaccaattggctcaggcgatttcagaccattacccggtcgaggtgatgctgaag

SEQ ID NO: 10544 - DNA, 846 bp, synthetic construct
  misc_feature 1..846: note = source = /note="Description of Artificial Sequence: Synthetic coding sequence"
  source 1..846: mol_type = other DNA
atgcgcggcatgaaactccttggagctttgctcgctctcgccgcactgctgcaaggcgctgtctccctgaagatcgcagcgttcaatatccagacgttcggagagacgaaaatgtcgaatgcaactctggtgagctatatcgtccagatacttagtagatatgatatcgccttggtccaagaagtgcgagattctcatctgacagccgtaggtaagctactggacaacctaaaccaggacgcccccgacacatatcactatgttgtgagcgagcccctgggaagaaactcatacaaagagaggtatctgtttgtgtaccgtcccgatcaggtgtctgccgtggatagctattattacgacgatggatgtgaaccatgcggcaacgacacgttcaaccgggaacctgcaatagtgcggttcttttctcgcttcactgaagttcgcgaattcgccatcgtccccctccacgccgcccctggcgacgctgtggccgagatagatgctctatatgatgtgtaccttgatgtccaggagaaatgggggctggaggatgtgatgctgatgggagatttcaacgccggatgtagctatgtgaggccttcccagtggtcatccattagactctggacttctcccaccttccaatggctcatccctgactccgccgacacaaccgccactccgacacactgcgcttatgacaggattgtagtagccggaatgttgctgcgcggcgctgtcgtgcctgattctgcactgcccttcaacttccaggcagcatacggtttgtccgaccagttggcccaggcaatatccgaccattaccctgtggaagtcatgctgaag

SEQ ID NO: 10545 - DNA, 846 bp, synthetic construct
  misc_feature 1..846: note = source = /note="Description of Artificial Sequence: Synthetic coding sequence"
  source 1..846: mol_type = other DNA
atgcggggtatgaagctcctgggtgcgctcctggcactggcagccctgctgcagggagcagtgtcgcttaagattgcggcgttcaacattcaaacgtttggcgaaactaaaatgagcaatgctacccttgtgtcgtacattgtccaaattcttagccgatacgatattgcgctcgtccaggaggtcagagattcgcatctcactgcggtcggcaagttgttggacaatctgaatcaggatgccccggacacctatcattacgtggtcagcgagcctcttggacgtaacagctacaaggagagatacctcttcgtgtaccgccccgaccaagtctctgcagtcgactcgtactactacgatgacggttgtgagccttgtggtaatgatacttttaaccgggaacctgccattgttcgtttcttttcccggtttaccgaagtcagagaatttgccattgtgccgcttcacgcagcaccaggagatgctgtggccgaaatcgatgcactgtacgatgtctacctggatgtgcaggaaaagtggggactcgaagatgtgatgcttatgggagactttaatgccggctgctcctacgtgcgaccaagccagtggagctctattagactgtggacttcgcctacctttcaatggcttattcctgactccgctgacaccaccgcaactcctactcactgcgcatacgaccgcatcgtggtcgccggaatgcttctgaggggggcagtggtgcccgacagcgctttgcccttcaattttcaagccgcatacggactgtccgatcaactggcacaagcaatctcagatcattaccctgtcgaggtgatgcttaag

SEQ ID NO: 10546 - DNA, 846 bp, synthetic construct
  misc_feature 1..846: note = source = /note="Description of Artificial Sequence: Synthetic coding sequence"
  source 1..846: mol_type = other DNA
atgcgcggcatgaagctccttggcgcactgttggctctggccgccctcctccaaggtgcggtgtctctgaaaattgcggccttcaacatacaaaccttcggagaaaccaagatgtctaacgctactcttgtgtcgtatatcgtccaaattcttagccgctacgatatcgccctggtgcaagaagtgcgggacagccatctgacggctgtggggaagctgcttgataacctcaaccaggacgcaccagacacttatcattacgtcgtgagtgaacccctgggacgcaattcctacaaagaacggtaccttttcgtgtacaggccggaccaggtgtcggcggtggactcgtattactacgacgatggttgcgaaccatgcggaaacgatacgtttaatcgcgaaccggccatcgtgaggttcttctcccggttcactgaagtccgggaattcgcgatcgtcccactccatgccgcgcctggagatgcagtggccgaaatcgacgctctgtatgatgtgtacctggacgttcaggagaagtgggggctggaggacgtgatgcttatgggagacttcaatgcaggatgtagctacgtgcggccgtcacagtggtcgtcaatccgcctgtggacttcgcctaccttccaatggctgatcccggatagcgccgacaccaccgccactcccactcactgcgcctacgataggatcgtcgtggcgggaatgctcctgcggggtgccgtggtgccggacagcgctctgcccttcaatttccaggcggcgtacggcctgtcggatcagcttgcccaggccatctccgaccactacccggtcgaagtgatgctcaag

SEQ ID NO: 10547 - DNA, 846 bp, synthetic construct
  misc_feature 1..846: note = source = /note="Description of Artificial Sequence: Synthetic coding sequence"
  source 1..846: mol_type = other DNA
atgcggggcatgaaactgttgggagccctgctcgcactggcggctctcctccagggagccgtctcgttgaagattgctgccttcaatatccagactttcggcgaaactaagatgagcaacgcgactctcgtgtcgtacatcgtccagatcctcagcaggtacgacattgcacttgtgcaagaggtacgcgactcgcacctgacggcagtggggaaactcctggacaacttgaaccaagatgctccagatacttaccactatgtcgtgtccgagccgcttggtagaaattcgtacaaggaacggtaccttttcgtgtaccgcccggatcaagtgtcggccgtggactcgtactattacgatgacggctgcgagccttgcggaaacgatacgtttaacagagagccggcaattgttcggttctttagccggttcactgaagtcagggaattcgcaatcgtgccgctgcatgcggcccccggcgacgcagttgcggaaatcgacgctctgtacgatgtgtacctggatgtccaggaaaagtggggactcgaagatgttatgctcatgggtgactttaatgccggatgcagctacgtgcggccaagtcagtggtcgagtatccgcctgtggacctccccgacctttcagtggctgatacctgacagcgcagacactaccgcgaccccaacccactgtgcctatgaccgtatcgtggtggccgggatgctgttgaggggagcagtggtccccgactccgcacttcctttcaacttccaggctgcctacggtctgtctgaccaacttgcccaggctatctccgaccattacccggtggaggtgatgctcaag

SEQ ID NO: 10548 - DNA, 846 bp, synthetic construct
  misc_feature 1..846: note = source = /note="Description of Artificial Sequence: Synthetic coding sequence"
  source 1..846: mol_type = other DNA
atgagaggaatgaagcttttgggagccttgctggctttggcagccttgctacaaggtgccgtttctctcaagattgctgcctttaacattcaaacttttggcgagacgaagatgagcaacgcgactctggtttcttacatagttcagatcctgtcccgttatgacatcgcattggtgcaggaggtgcgtgattcacaccttaccgctgttggaaaacttctcgacaacctcaatcaggatgcacctgatacgtatcattacgttgtgtcagagccactcggtcgtaattcctacaaagagagatacctgtttgtgtatcgtcccgatcaggtatccgctgtcgactcttattattatgatgatgggtgtgagccatgtggcaacgatactttcaacagggagcctgcaatagtgaggtttttttcgagattcactgaagttcgggagttcgctatcgtgcctttgcacgccgctcctggggacgctgttgctgaaatagatgccctctatgatgtttatctagatgtacaagagaagtggggacttgaagacgtcatgttaatgggcgatttcaacgccggctgtagctatgtaaggccatcgcaatggtcatctatacgcctctggacctctccaacctttcagtggttgattccagatagcgcagatacaaccgccacgccaactcattgcgcatacgacaggattgttgtggcaggtatgctacttcgtggagcagttgttccagacagcgcgcttcccttcaactttcaggctgcctatggactttcggatcagctcgctcaggccatctctgatcactatccagtggaagtgatgttgaaa

SEQ ID NO: 10549 - DNA, 846 bp, synthetic construct
  misc_feature 1..846: note = source = /note="Description of Artificial Sequence: Synthetic coding sequence"
  source 1..846: mol_type = other DNA
atgcggggaatgaagctgctgggcgcgcttctggccttagccgcgttgcttcagggggccgtgtctctgaaaatcgcggcattcaatattcagaccttcggggagacaaaaatgtctaatgccaccttggtcagttacatagtccagatcttgagtcgatacgacatcgccctcgtacaagaggtcagggatagccacctgaccgccgtgggaaagctgctcgacaatcttaatcaggacgcccctgatacttatcactatgtggtatctgagcccctgggaaggaattcatacaaagagaggtacttgttcgtttacagaccagaccaggtctccgctgtcgactcctactattacgacgacggttgcgaaccttgtgggaacgacaccttcaacagggagccagccatcgtgcgcttcttcagcagattcacagaagtacgtgagttcgccatcgttcccctgcacgccgcccccggcgacgcagtcgcggaaattgatgcactgtacgacgtgtacctggacgtgcaggagaaatggggtttagaggatgtcatgcttatgggcgatttcaatgcgggctgcagctacgtgagaccctcccagtggagcagcatccgcctctggacttcacctacgttccagtggctcataccagattccgccgataccaccgctaccccaactcattgcgcctacgaccggatagtggtcgccggcatgctgctgcgtggcgctgtggtgcctgactctgctctgccttttaatttccaggccgcctatggactgagcgaccagctggcccaggccatctccgaccactacccggtcgaggtcatgcttaag

SEQ ID NO: 10550 - DNA, 846 bp, synthetic construct
  misc_feature 1..846: note = source = /note="Description of Artificial Sequence: Synthetic coding sequence"
  source 1..846: mol_type = other DNA
atgaggggcatgaagctgctaggggccttgctagcactggccgccttgttacaaggagccgtctccctgaagattgcagcattcaacatccagaccttcggcgagaccaagatgtcaaacgcgacattagtctcgtatatcgtccagatcctgtcaagatatgacattgctttggtgcaggaagtgagggactcccacctgactgctgtgggtaagttactggataacctaaaccaggacgcacctgatacgtaccattatgtcgtgtctgagccacttggccgaaacagctacaaggaaaggtatctgttcgtgtataggcccgaccaggtatctgccgtagacagctattattatgacgatggatgcgagccctgtggaaacgataccttcaacagggagcctgcaattgtgagattcttctctagatttaccgaggtgcgtgagttcgccatcgttcctcttcacgctgcccccggggatgcggtggctgagatcgatgcgctttatgacgtctacctggatgtccaggagaagtgggggctagaagacgtgatgcttatgggggacttcaacgctggttgctcttacgtgcgcccatcccagtggtcgtctatcaggttgtggacctctcctacattccagtggttgattccagactccgcagatactacggccacacctacccactgtgcttacgatagaatagtggtggcaggtatgcttttacgtggggccgtagtaccggatagcgccctccctttcaacttccaggcggcttatgggttgtccgatcagctagcccaggcaattagtgatcattacccggtggaagtaatgctgaaa

SEQ ID NO: 10551 - DNA, 846 bp, synthetic construct
  misc_feature 1..846: note = source = /note="Description of Artificial Sequence: Synthetic coding sequence"
  source 1..846: mol_type = other DNA
atgcgagggatgaagttgctgggtgccttactggccttggctgcccttctccagggcgcagtttctctgaagattgcggcctttaatatccagacctttggcgagacgaagatgtccaacgccacactcgtctcctatatagttcagatcctgagcaggtacgacatcgccttggtgcaggaggtacgagactcccatttaacagccgtgggaaaattgttggataacctgaaccaagacgcccccgacacctaccattacgtggtgagcgagcctctcggcagaaactcatataaagagagatatctcttcgtatataggccggaccaggtttccgcagtggactcttactattatgatgacggctgtgaaccttgtggcaacgacacttttaacagggaacccgctatagtaagatttttctcaagattcacagaggtgagagagttcgcgatcgtccctcttcacgcggcccctggggacgccgtagcagaaatcgatgcgctttacgacgtgtacctcgacgttcaagaaaaatggggcctggaagatgtcatgctgatgggcgactttaatgcaggatgttcctacgtgagacctagccagtggtccagtataagactttggacaagcccaacctttcagtggctcattccagattcagcagacaccacggctacaccaacccactgcgcttatgataggatagtcgtggcaggaatgctcctccgaggcgcagtggttccggactcagcactgccattcaactttcaggctgcttatggcttgagcgatcagttggcacaggcgataagcgaccattaccctgtcgaggttatgctgaag

SEQ ID NO: 10552 - DNA, 846 bp, synthetic construct
  misc_feature 1..846: note = source = /note="Description of Artificial Sequence: Synthetic coding sequence"
  source 1..846: mol_type = other DNA
atgcgcggcatgaagttgctcggcgctctgctggcgttggccgcattgttgcagggtgctgtgtctttaaagatcgctgcctttaacatccagacctttggggaaactaagatgtcgaatgcaactctggtgtcctatatcgtccagattttgtcgcgatacgatattgccctagtccaggaggttcgcgatagccatctcacagccgttggaaaactgctggataacctcaaccaggatgctccggatacctatcattatgttgtttctgagccccttggtcggaactcctacaaggagcgctatttattcgtctaccgcccggaccaggtctccgctgtcgatagctactactatgatgacggatgcgagccctgcggtaacgacaccttcaaccgcgagcccgcaatcgtccgcttcttctcccgatttaccgaggttcgcgaattcgcgatcgtccctcttcatgctgctccaggcgatgccgtcgccgagattgacgctctgtacgatgtatatttggatgtgcaggaaaagtggggcctcgaggatgtcatgctgatgggcgacttcaatgcgggttgttcttatgtccgtccctcgcagtggtcgtccattcgcctgtggacctccccgacgttccaatggctcattcctgatagcgccgatactaccgccacccccacccattgcgcgtatgataggatcgtcgtcgccggtatgcttctgcggggcgcggtcgtcccggactccgcgctacccttcaacttccaggcagcctacgggctcagcgatcaattggctcaggccatcagcgatcactatccagtcgaggttatgctcaag

SEQ ID NO: 10553 - DNA, 846 bp, synthetic construct
  misc_feature 1..846: note = source = /note="Description of Artificial Sequence: Synthetic coding sequence"
  source 1..846: mol_type = other DNA
atgcgcggtatgaaactgcttggagctctcctggccctcgccgctctgctgcagggtgcagtgtctctgaaaatcgctgctttcaacatacagacattcggagagactaagatgtcaaatgccaccctcgtaagctacattgtgcagatccttagcaggtacgatattgcactcgtgcaagaggtaagagactcccaccttaccgcggtcggtaaactgctggacaacttgaatcaagatgcacccgatacctaccactacgtggtatccgaaccactgggaaggaattcctacaaggagcgctacctctttgtgtatagaccggatcaggtatcagcggtcgatagctactattatgatgacggttgcgaaccatgtggcaatgacaccttcaacagggaaccggcaattgtgaggttcttcagcaggtttacagaagtaagggagttcgctatcgtgcccctgcatgcagctcccggtgacgcagttgcagagatcgacgctctctacgatgtctacctggatgtccaagagaagtggggtctggaggatgttatgcttatgggtgacttcaacgctggatgctcttatgtgagaccctcacaatggtccagcattcgcttgtggacatcccctaccttccagtggctgatccctgacagcgcggacaccaccgcaaccccaactcactgtgcttacgacaggatcgtggtggccggcatgctgctcagaggcgctgtcgtgcccgattccgctttgccttttaattttcaagctgcatatggactgtccgatcagttggcacaggccatctccgaccactacccagtggaagtgatgctgaag

SEQ ID NO: 10554 - DNA, 846 bp, synthetic construct
  misc_feature 1..846: note = source = /note="Description of Artificial Sequence: Synthetic coding sequence"
  source 1..846: mol_type = other DNA
atgcgcggtatgaagctcttgggagccctgctcgccctcgccgctctcctgcaaggcgcagttagcctcaagatagccgctttcaatattcagacctttggcgaaaccaaaatgtctaacgccacactcgtgtcttacatcgtgcagatcctgagcaggtacgacatagctctcgtacaggaagtacgcgactcacacctgactgccgtcggaaagctgttggataacctgaaccaggatgcccccgacacctatcactacgtcgtgtctgagcctctcggcaggaattcctacaaagaacgctatctctttgtgtaccgccccgaccaggtgagcgctgtcgacagctactactacgacgacggttgcgaaccgtgtggtaatgatactttcaaccgcgaacccgccatagtgagattcttctcccggtttaccgaagttcgggaatttgcgattgtgccgctgcacgcggcaccaggcgatgctgtagcagaaatcgatgccctttacgatgtgtatcttgacgtccaagagaaatggggactggaagatgtgatgctgatgggagattttaacgcggggtgcagctacgtccggccctcccagtggagttcaatccgattgtggacatcacctacatttcaatggctgatcccggattccgcagacaccactgcaacaccgacccattgcgcatacgataggatcgtcgttgcgggtatgctgctccgcggcgcagtggtgcccgattccgctctccctttcaattttcaggctgcctacggtctgtccgatcagttggcgcaggccatctcagaccattacccggttgaggttatgctgaaa

SEQ ID NO: 10555 - DNA, 846 bp, synthetic construct
  misc_feature 1..846: note = source = /note="Description of Artificial Sequence: Synthetic coding sequence"
  source 1..846: mol_type = other DNA
atgagaggaatgaagctgctcggtgccttgcttgcactcgcagcacttctgcagggcgcagtgtctctgaagattgccgcatttaacatacagacttttggcgaaaccaagatgtcgaacgcaactctggtcagctacatcgttcaaatcctctccagatacgatatagcgctggtgcaagaagtccgtgattcccatcttaccgcggtcggaaaactgcttgacaatctcaatcaagatgcgcccgatacttaccactatgtggtgtcggagcctctgggacggaactcatacaaggagcgctacttgtttgtgtaccgaccagaccaagtgtcagcggtggacagctactactacgatgatggatgcgagccatgtggcaacgacacttttaacagagaacctgcgatagtgcgcttcttttctcgatttactgaagtgagagaatttgccattgtgccacttcatgcagcacccggagatgccgtcgcggaaatcgatgcgctctatgatgtgtacctggatgtccaggaaaaatgggggcttgaagatgtgatgcttatgggagatttcaacgcaggttgttcctacgtcagaccatcccagtggtcctcgataagactgtggacttccccaacctttcaatggctgatcccggatagcgcagacactacggcaactcctacccattgtgcgtacgatcgcattgtggtcgccggtatgctgctgcgtggtgccgtggtgccagattcggcccttccatttaactttcaagcagcttacggactgtcggatcagcttgcccaagccatttcggaccactaccctgtcgaggtgatgctgaag

SEQ ID NO: 10556 - DNA, 846 bp, synthetic construct
  misc_feature 1..846: note = source = /note="Description of Artificial Sequence: Synthetic coding sequence"
  source 1..846: mol_type = other DNA
atgaggggtatgaagctgttaggggcactcctggcactcgctgctctgctccagggggctgtgtccttaaagatagccgcctttaatatccaaactttcggagagactaaaatgtcaaacgccactcttgtgtcctatattgtgcagatcctatcaagatacgacatagcactggtgcaagaagtgcgtgacagccatctcacggccgtggggaagctattggacaatttaaatcaggacgcgcctgacacgtaccactacgtagtctctgagcctttaggtcgcaacagctataaagagcggtatctgttcgtgtacaggccagaccaagtgtccgcagttgacagttattactacgatgatggctgtgaaccttgcggaaatgacactttcaaccgggaaccagccattgtcagatttttttctcgctttaccgaagtacgggaatttgctatcgtccccttgcacgctgccccgggggacgccgtagcggagattgacgccctttacgatgtctacctcgacgtccaggagaagtggggcctggaagatgtgatgcttatgggtgattttaatgccggctgtagctacgtccgtccgagccagtggagctccattagactgtggacatcccccacgttccagtggctgatcccggacagcgccgacacgaccgcaacaccaactcactgcgcctatgataggatcgtggtcgcaggaatgctgctgcgcggtgccgtagtcccggactccgccctgccgtttaattttcaggctgcctatgggctgtccgaccagctcgcccaggcaattagtgatcattatccggtcgaggtgatgctgaag

SEQ ID NO: 10557 - DNA, 846 bp, synthetic construct
  misc_feature 1..846: note = source = /note="Description of Artificial Sequence: Synthetic coding sequence"
  source 1..846: mol_type = other DNA
atgcgtggtatgaaacttctgggagccctcctggcccttgcagcgcttctgcagggagcagtctcgctgaagattgctgcatttaacatccagacgttcggggaaactaagatgtctaatgcaacgctcgtcagctacattgtacagatattgtcccgatatgatattgcactcgtgcaagaagtcagagattcgcacttgactgcagtaggtaaacttctcgacaacctgaaccaggatgcgccagatacctaccactacgtggtgagcgagccacttggcaggaattcgtacaaggaaaggtacttgtttgtctacagaccggatcaagtctcagcagtcgacagttactattacgacgacggatgtgagccttgtggcaacgacaccttcaaccgtgaacccgcaatcgtgcgcttctttagcaggtttactgaggttcgagaatttgcaattgtgcctctgcatgcggctcctggtgatgccgtcgcagagatcgacgcactgtacgatgtgtaccttgacgtgcaagagaaatggggactggaagatgtgatgcttatgggagatttcaatgccggttgctcgtatgtccgaccctcccaatggtcatcaattcgcctttggacctcccctacctttcaatggctgatccccgattccgctgataccactgcaactcctacccattgtgcgtatgaccgtattgtggttgccggcatgctccttaggggagcagtggttcccgattcggcactccctttcaattttcaggccgcctacggcctttcagatcaactggcacaggccattagcgaccattaccctgtggaagtgatgcttaag

SEQ ID NO: 10558 - DNA, 846 bp, synthetic construct
  misc_feature 1..846: note = source = /note="Description of Artificial Sequence: Synthetic coding sequence"
  source 1..846: mol_type = other DNA
atgcgcggtatgaagctcctgggagccctcttagcactggctgcactgctgcagggagccgttagtctcaaaatcgccgcttttaatatccagacctttggggagactaagatgagtaatgccaccctcgtctcatatattgttcagatactgtcgagatacgatatcgccctagtgcaggaggttcgcgactctcacctcactgccgtcgggaagcttctggacaacttgaaccaggacgcacctgacacgtaccattacgtcgtttcggaacctctgggacgcaatagttacaaagagcgatacctgtttgtgtatcggcctgaccaagtgagcgcggtagactcatactactacgacgacggctgtgaaccgtgtgggaacgacaccttcaacagggagcctgcaatagttagatttttttcaagatttaccgaagtgagagagtttgcaattgtgcctctgcacgccgctcctggtgacgccgtggcggaaatcgatgctctgtatgacgtgtatttggatgtccaagagaagtggggattggaggacgtaatgctaatgggcgacttcaacgcaggctgttcttacgtcaggccgagtcaatggtcttctatcagattatggacaagtcctacttttcaatggctcatacccgacagcgccgacaccactgccacccccacacattgtgcatatgacagaatagtggttgcaggaatgcttctgcgcggagccgtagttcctgacagcgccctgcccttcaattttcaggccgcttatggactgagcgaccaactagctcaggcaatcagtgaccactacccggtcgaggtcatgctcaaa

SEQ ID NO: 10559 - DNA, 846 bp, synthetic construct
  misc_feature 1..846: note = source = /note="Description of Artificial Sequence: Synthetic coding sequence"
  source 1..846: mol_type = other DNA
atgcgcggcatgaagctgctgggcgcccttctcgccttggccgctctgttgcaaggagctgtgagcttgaagattgcagcgttcaatatccaaaccttcggagaaaccaagatgtcgaatgcaacgttggtcagttatatcgtgcaaatcctgagcagatacgacatcgccctcgtgcaggaggtccgggactctcatctgaccgcagtgggaaaactcctcgataatctcaaccaggacgcccctgacacttaccactacgtggtgtccgagccgttggggcggaactcgtacaaggagcggtacctttttgtgtaccggccagatcaagtgtccgcggtggattcgtactactatgatgacggctgcgaaccgtgcggaaatgacactttcaacagggaacctgccatcgtcaggttcttctcgcgattcacggaagtacgggagttcgcaatcgtgcctctgcatgcggcaccgggggacgctgtggcggagatcgatgccctctacgatgtctacctcgacgtgcaggagaagtggggcctggaggatgtgatgctcatgggagatttcaacgcaggatgctcatacgtgaggccatcccagtggtcgagcatccggctgtggacctctccgacctttcagtggctgattccagactccgcggacaccacggccaccccgacccattgcgcttacgatcggatcgtggtggccggaatgttgttgaggggtgccgtcgtgccagacagcgctcttccattcaacttccaggcagcgtacgggctttcagaccagctcgcccaggcgatctcggaccactaccccgtcgaagttatgctgaaa

SEQ ID NO: 10560 - DNA, 846 bp, synthetic construct
  misc_feature 1..846: note = source = /note="Description of Artificial Sequence: Synthetic coding sequence"
  source 1..846: mol_type = other DNA
atgagaggaatgaaactactgggggccctgttggccctggccgctcttctgcaaggagccgtgagcctaaagattgccgcgttcaacatccaaacctttggagagacaaagatgtcaaacgccaccttggtgtcctatattgtgcagatactgagccgatacgatattgccctagtgcaggaagtgcgcgacagtcacctcaccgcggtgggcaaattacttgacaacctcaatcaggacgctcccgacacctatcactacgtggtgtccgagcccttagggaggaattcgtacaaggagcgctatcttttcgtgtatagacccgaccaggtgtctgcggtagactcgtactattatgacgatgggtgtgagccgtgtggaaacgacacctttaatcgagaaccagccatcgtgcggtttttctccagatttacggaggtgcgggagttcgcaatcgtcccactgcatgcagcccccggcgatgccgtcgccgagattgatgccctgtacgacgtgtatctggacgtgcaggagaagtggggtttagaggacgtgatgctgatgggagactttaatgcgggctgctcttatgttaggccttctcagtggtccagcatacggctgtggacgagtcccaccttccagtggctcataccagacagcgctgacacaaccgccacccccacacattgcgcttatgaccggattgtggtcgcaggtatgctactgcgcggggctgtcgttccagactcggccctgcccttcaacttccaggccgcctatgggctgagcgaccaacttgctcaggccatatccgatcactaccctgttgaagttatgcttaaa

SEQ ID NO: 10561 - DNA, 846 bp, synthetic construct
  misc_feature 1..846: note = source = /note="Description of Artificial Sequence: Synthetic coding sequence"
  source 1..846: mol_type = other DNA
atgcggggaatgaaactcttgggagccctcttggctctggcagcgctgctgcagggcgcagtgtccctgaagatcgcagccttcaatattcagacttttggagagactaagatgtccaatgctaccctggtgtcatacatcgttcagatcctctccagatacgacatcgcgcttgtacaggaagtgagagattcgcacctcaccgccgtcggcaagttgctggacaacctgaaccaggacgcaccggatacttaccactacgtcgtgtctgagccgctcggacgcaactcgtacaaggagaggtaccttttcgtgtacagacctgaccaggtgtcagcagtggattcctactactacgatgacggatgcgagccctgcggtaacgatacctttaatcgcgagccggcgatcgtgcgctttttcagccgctttactgaagtcagagaatttgccatcgttccgttgcacgctgcccccggagatgccgtcgcggaaattgacgcactctacgacgtgtacctggatgtgcaagagaagtggggccttgaagatgtgatgttgatgggagatttcaacgccggatgcagctacgtgcggccgtcgcagtggtcctcaatccggttgtggacttcgccgactttccaatggctcatcccagactccgcagacactaccgcaaccccgactcactgcgcttacgatcgcattgtggttgccggaatgcttctgcgaggagcggtcgtgccagatagcgccctgccgttcaactttcaggcagcctacggactctcggatcaactggcacaagcgatcagcgaccattaccctgtggaggtcatgctgaag

SEQ ID NO: 10562 - DNA, 846 bp, synthetic construct
  misc_feature 1..846: note = source = /note="Description of Artificial Sequence: Synthetic coding sequence"
  source 1..846: mol_type = other DNA
atgcggggcatgaaactccttggagcccttctggcattggcggctctgctgcagggagccgtcagcctgaaaatagccgcttttaatatccagacattcggggagactaaaatgtccaacgccactcttgtgagctacatcgtgcagatccttagcaggtacgacattgcgttggttcaggaagttcgcgatagtcacctaaccgctgtgggcaaactgttggataacctgaaccaagatgcaccggatacttaccattatgtggtttcagaacccctgggacgcaattcctacaaggagagatacctcttcgtgtaccggcccgaccaggtcagcgccgtggattcctactattatgacgacggctgcgaaccctgcggcaatgatacttttaaccgcgagcctgcaatagtacgattttttagccgattcacggaagttcgtgagttcgcaatcgtccctttgcacgctgcccccggagatgccgtcgccgagatagatgccttgtatgatgtgtaccttgacgttcaggagaaatggggcttagaggacgtgatgctgatgggggacttcaacgcaggctgtagctacgtccgccctagccaatggtcttccatacgcttatggacttctccgaccttccagtggttgatccctgattccgcggacacgacagccacccccacccattgcgcatatgataggattgtcgtagcgggcatgctcctgagaggcgcggtcgtgccggacagcgccctgccatttaactttcaagcagcttatggactgagcgatcagctcgctcaagccatatccgatcattaccctgtagaagtcatgcttaag

SEQ ID NO: 10563 - DNA, 846 bp, synthetic construct
  misc_feature 1..846: note = source = /note="Description of Artificial Sequence: Synthetic coding sequence"
  source 1..846: mol_type = other DNA
atgcgcggtatgaagttgttaggggccctcctggctttggctgccctactgcagggcgctgtttccttgaaaatagctgcatttaacatccagaccttcggggaaacaaaaatgagcaatgccactctggtatcctacattgtgcaaatccttagcagatatgatatcgcgctcgtgcaagaagtccgcgattctcaccttactgcagtggggaagctcctcgacaatctcaatcaggacgctccagacacgtatcattatgtggtgtcagagcccttaggaaggaacagctacaaggagcgatacctcttcgtatacagaccagatcaagtctctgccgtcgactcttactattacgatgacgggtgtgaaccctgcgggaatgacacttttaatcgtgagccggctatcgtgcgtttcttctctcgtttcactgaggtgcgagagttcgcgattgtgccactacacgcagccccaggcgatgccgtggccgagatcgatgctttatatgatgtctacctcgacgtgcaggagaagtgggggctggaagacgtgatgcttatgggggactttaatgccggttgtagctatgtccgcccttcccaatggtcttctattcggttgtggacatcccccactttccaatggctgattcccgatagtgcagatactacggccacgcccacccactgtgcatatgataggatcgttgtagccgggatgctactgcgcggcgccgtagtgcccgattccgcgctgccgttcaacttccaagctgcctatgggctttccgaccagctcgctcaggccatttcagaccattaccccgtcgaggtgatgctgaag

SEQ ID NO: 10564 - DNA, 846 bp, synthetic construct
  misc_feature 1..846: note = source = /note="Description of Artificial Sequence: Synthetic coding sequence"
  source 1..846: mol_type = other DNA
atgcgggggatgaagctccttggggcacttctcgccctggcagctctgctgcagggcgctgtctcgctgaagatcgcagcattcaatattcaaacttttggagaaaccaagatgagcaacgcaacgctggtgtcctacatcgtccagattttgtcccgctacgacattgctctggttcaagaagtgcgggattcgcatcttaccgcagtgggaaaactgctcgataacctgaatcaggatgcccctgacacctaccattacgtggtatcggaaccgctgggacgaaactcctataaggaaagataccttttcgtgtaccgtcccgaccaagtgtctgcagtagattcgtactactacgacgatggttgcgagccatgtggcaatgatacctttaacagagagccagcgatcgtgcgattctttagccgctttactgaggtccgggaattcgctattgtgcctttgcatgcggcaccaggagacgcagtcgccgaaattgatgcattgtatgacgtgtaccttgatgttcaggaaaagtggggactcgaggatgtgatgcttatgggagatttcaacgcaggttgtagctacgtgcggccctcacaatggagctcgatacgactgtggactagcccgactttccagtggcttatccccgactctgccgataccaccgcaactccaacgcactgtgcctacgatagaattgtcgtggcaggtatgctgctcaggggcgcagtggtgccagattcggcactcccgttcaattttcaagcggcgtatgggttgtccgaccaactcgcgcaagcgatatcagaccactacccagttgaagtgatgctgaaa

SEQ ID NO: 10565 - DNA, 846 bp, synthetic construct
  misc_feature 1..846: note = source = /note="Description of Artificial Sequence: Synthetic coding sequence"
  source 1..846: mol_type = other DNA
atgagaggtatgaagctgctcggagcactcctggcgctggccgctctgctgcaaggcgcagtgtcgcttaagatcgcagcgttcaacatccagactttcggcgaaaccaaaatgtccaatgcaaccttggtgagctacatcgtgcagatccttagccgctacgatatcgcgttggttcaagaggtgagagacagccaccttactgccgtcggaaaactgttggacaacttgaaccaagacgcccctgacacttaccactacgtcgtgtcagagcctctcggacgcaactcatacaaggaaaggtacttgttcgtgtacagaccggatcaggtgtccgctgtggactcatactactacgacgacgggtgtgaaccctgtggaaacgataccttcaacagggaaccggcgatcgtccgcttctttagccggtttaccgaagtccgcgaatttgccatcgtccctctccatgccgcaccaggagacgccgtcgctgaaatcgatgccctgtacgacgtgtacctcgatgtgcaagaaaagtggggactggaagatgtgatgctgatgggggacttcaacgccggatgctcgtacgttcgcccgtcccagtggtcgtcaattagactctggacgtcacctactttccaatggctcatcccagactcggccgataccaccgcgaccccgacccattgcgcctacgatcgaatcgtggtggccggtatgctgcttcgaggagcggtggtcccagattccgcgctcccgttcaattttcaggcagcctacggcttgtcggatcagttggcacaagcaatcagcgatcactaccctgtggaagtgatgctcaag

SEQ ID NO: 10566 - DNA, 846 bp, synthetic construct
  misc_feature 1..846: note = source = /note="Description of Artificial Sequence: Synthetic coding sequence"
  source 1..846: mol_type = other DNA
atgcgggggatgaagctccttggagcgcttcttgccctcgcagcattgctgcaaggagctgtgtcgcttaagatcgcagcattcaatattcagacctttggtgaaactaaaatgtccaatgctactctcgtgagctacattgttcagattctgagccgttacgatattgcacttgtgcaggaagtgagagactcccatctgaccgccgtgggaaagctgcttgataaccttaaccaggatgcaccagatacttaccattacgtggtgtcggaacctctcggaagaaatagctacaaggaaagatacctgtttgtctatcgtcctgatcaggtatcggcagtggattcgtactactacgatgacgggtgcgaaccatgtggcaacgataccttcaatcgcgaaccagccatagtccgcttcttttcgagatttaccgaagtgcgagaattcgcaattgttccactgcacgcagcacctggcgatgccgtcgccgaaatcgacgcactgtatgacgtgtacctggatgttcaggaaaaatggggtctggaggatgtcatgctgatgggtgactttaacgcaggttgttcttacgtccggccttcacaatggtcgtcaatccggctttggacctcccctacttttcagtggctgatccccgattcggcagatactaccgctacgcccacccactgtgcatacgaccgcatcgtggtggcaggaatgcttcttcgaggggcagtcgtgcctgattcggcactgccatttaactttcaggcagcttacggcctctcggatcaactcgcacaggctatctcggatcactatcctgtggaagtcatgctgaaa

SEQ ID NO: 10567 - DNA, 846 bp, synthetic construct
  misc_feature 1..846: note = source = /note="Description of Artificial Sequence: Synthetic coding sequence"
  source 1..846: mol_type = other DNA
atgagagggatgaagctgttgggcgcacttctggcgctcgcagctctcttgcaaggggcagtttctctgaaaatcgcggcttttaacattcaaacgtttggtgaaaccaaaatgtctaatgcaaccttggtaagttacatcgtacagattctgtcgcggtatgatatcgcacttgtgcaagaagtgcgggactcccacctcactgcggtgggcaagctgctcgataatcttaatcaagacgccccagacacctaccattacgtggtgtccgagcccctcgggcgtaactcgtacaaggagcgctacctgttcgtctatagacctgaccaagtgagcgcagtcgattcgtactattacgacgacggttgtgagccttgtggtaacgacacttttaacagagaaccggccattgtgaggttcttttcgcgatttactgaggtgcgcgaatttgccattgtgccattgcacgcggcaccaggagacgcagtcgcagaaatcgatgccctttacgatgtgtaccttgatgtccaagagaagtggggcctggaggacgtgatgcttatgggagatttcaacgcaggttgttcgtacgtccgcccaagccagtggtcaagcataagactctggacttcccctaccttccagtggcttatccccgattccgcagacactactgcaaccccgacccactgcgcctacgatcgcatcgtggtcgctggtatgctccttaggggagctgtggtgcctgatagcgcactgccgttcaactttcaagctgcttatggactgtccgatcagcttgcacaggcgatttcggatcattaccctgtggaagtgatgctgaag

SEQ ID NO: 10568 - DNA, 846 bp, synthetic construct
  misc_feature 1..846: note = source = /note="Description of Artificial Sequence: Synthetic coding sequence"
  source 1..846: mol_type = other DNA
atgcgtggaatgaaactcctcggagctctgcttgcactggcggcacttcttcaaggagcagtgagcttgaaaattgcagccttcaatatacaaacttttggagaaaccaaaatgtcgaatgccaccttggtgagctacattgtccaaattctctcaagatacgatattgcccttgtccaagaggtgagagattcgcatcttaccgcagtgggcaaactgctcgacaacctcaatcaagatgctcccgatacctaccattacgtcgtgtcggagcctctcggcagaaactcatacaaggaacggtatctttttgtgtaccgccccgatcaggtgtcggcagtggattcatactactatgatgacgggtgcgagccttgcgggaacgataccttcaaccgagaaccggccatcgttcgctttttcagccgtttcactgaagtgagggagttcgcaattgtgcccctgcacgcagcacctggagatgcagtggcagagatagacgccctctacgacgtctacctggacgtgcaagagaagtggggactggaggacgtgatgctgatgggggactttaatgccggttgttcctacgtgcggccttcccaatggtcctcgatcaggctttggacctcccctacctttcaatggctcatcccggactccgcggatactactgccactccaactcattgtgcctacgatcgaattgtggtcgccggaatgctcctgaggggagccgtggtgcctgattccgctcttccctttaactttcaggccgcatatggtctttcggatcaactggcccaagccatatccgaccattacccagtcgaagttatgcttaag

SEQ ID NO: 10569 - DNA, 846 bp, synthetic construct
  misc_feature 1..846: note = source = /note="Description of Artificial Sequence: Synthetic coding sequence"
  source 1..846: mol_type = other DNA
atgcgaggaatgaaactccttggcgctctgctggcgttggcagcattgcttcaaggagccgtcagtctgaagatcgcagcgttcaacatccaaaccttcggagaaacgaagatgtcgaatgcaactttggtttcgtacatcgtccaaattctgagcagatacgatattgcacttgtgcaggaggtgcgtgactcccaccttaccgccgttggtaagctgcttgacaacctgaatcaagatgccccagatacttaccactacgtcgtgtcagagcctctgggcagaaatagctacaaagaaaggtatctcttcgtgtaccggccggatcaagtgtctgcagtggattcctactactacgatgacgggtgcgaaccttgcggaaacgatacctttaaccgggaaccagcgatcgtgagattcttttcaaggttcaccgaagtgcgcgaattcgctatcgtccctctccatgcagccccaggggatgcagtcgcggagatcgatgccctctacgatgtctacctggatgtgcaagagaagtggggtcttgaagatgtaatgctgatgggagatttcaatgcgggatgttcgtacgtccggccgtcacagtggtcgtctatacgtctttggacttcgccgacttttcagtggcttattcctgactcggcggatactaccgctaccccaactcattgcgcatacgatagaattgtggtggctggcatgctccttaggggcgcagtcgtgcccgattcagcgctcccttttaactttcaagctgcctacggactttccgatcagctcgcacaggcaatttcagaccactacccggtcgaagtcatgctcaag

SEQ ID NO: 10570 - DNA, 846 bp, synthetic construct
  misc_feature 1..846: note = source = /note="Description of Artificial Sequence: Synthetic coding sequence"
  source 1..846: mol_type = other DNA
atgagaggaatgaagctgctcggagcacttctggcgctcgccgcgctgctgcaaggagcggtgtcgctgaaaatcgctgccttcaatatccaaacttttggagaaaccaagatgtcaaacgcaaccttggtgtcctacattgtccagatcctctcgcggtatgacatcgctctggtgcaagaagtcagggattcccacctgactgctgtgggaaagctgctcgacaacctcaatcaggacgctcctgatacttaccactatgttgtctcggagccgctcggccgcaactcgtacaaagaacgctacctgttcgtgtaccggcctgaccaggtgtccgcggtcgactcctactactacgatgacggctgcgagccgtgtggaaatgacaccttcaaccgtgagccggcgattgtgcggttcttctcaagattcactgaagtccgggagttcgcgattgtgccgctgcacgccgccccaggagacgcggttgcggaaatcgatgccctttacgacgtgtacctcgacgtgcaggaaaagtggggtttggaggatgtgatgctcatgggagacttcaatgcggggtgtagctacgttcggccgagccaatggtccagcattagactttggacgtcgcctactttccagtggctgatccctgactcggccgacacgaccgccactccgacccactgcgcctatgaccgcatcgtcgtggccggcatgctcttgagaggagcggttgttcccgatagcgctctgccattcaactttcaggccgcatacggcctctccgaccagctggcccaggccatttcggaccactacccagtggaggtgatgctcaag

SEQ ID NO: 10571 - DNA, 846 bp, synthetic construct
  misc_feature 1..846: note = source = /note="Description of Artificial Sequence: Synthetic coding sequence"
  source 1..846: mol_type = other DNA
atgcgcgggatgaagctgcttggagccctgttggccctcgccgctttgctgcaaggtgcagtgtccctgaagattgcagctttcaatatccagacctttggagaaactaagatgagcaacgcaactcttgtgagctacatcgtgcagattcttagccgttacgacatagcgctggtgcaggaggtgagggattcccatctgactgcagttggaaaactgctggataacctgaatcaagacgcacctgacacgtaccattacgtggtgagcgaaccacttggaaggaactcgtacaaggagagatacttgtttgtgtaccggccagatcaagtctccgccgtggattcctactactacgatgacggctgtgaaccgtgcgggaacgataccttcaatcgcgaacccgcaattgtgaggtttttcagtagattcaccgaagtgagagagtttgcaattgtgcccctccacgcagcacccggtgatgccgtcgcagaaatcgatgcattgtacgacgtttacctggacgtgcaggagaaatggggtcttgaggacgtcatgctgatgggggatttcaatgccggctgtagctacgttagaccttcccagtggtcgtctatccgcctttggacctcccccacttttcaatggcttattcctgactcagcggataccactgctaccccaacgcactgtgcctatgatcgtattgttgtagccggaatgttgcttcgaggagcagtggttccagattcagcgcttccgtttaactttcaagccgcctatggtctttcagatcaacttgcccaagcaatttctgaccattaccctgtggaagtgatgcttaag

SEQ ID NO: 10572 - DNA, 846 bp, synthetic construct
  misc_feature 1..846: note = source = /note="Description of Artificial Sequence: Synthetic coding sequence"
  source 1..846: mol_type = other DNA
atgagaggaatgaaacttttaggagcactgctcgccttggctgccctcctgcagggagcagtcagtctaaaaatcgccgcttttaatatacagacgtttggagaaactaaaatgagtaatgcaacattagtttcatacatagtccagatactttcacgctacgatatagccctcgttcaggaggtccgggattcccaccttactgctgtcgggaaattattagacaatctgaatcaggatgctcctgacacataccattatgtcgtttccgaaccactcgggagaaactcgtataaggaaaggtatctcttcgtgtatagacccgatcaggtctctgctgtggattcctactactatgacgatggatgtgaaccctgtgggaacgacacatttaatagggaacctgctatcgtgcgctttttttctagatttactgaagtgagggagtttgcaatagtacctcttcatgccgcaccaggagatgctgtggcagaaatagatgctctgtatgatgtgtatcttgatgtgcaggagaaatgggggctggaagatgtaatgcttatgggagatttcaacgcggggtgttcctacgtccggccctctcagtggtcctcaatcaggctatggacatcaccaactttccagtggctgatccctgattccgctgacacaactgccactccgactcattgtgcctacgatcggatagtagtggctggaatgttacttcgaggagcagtagtgcccgattctgctctgccattcaatttccaggcagcttacgggctgagtgatcagttagcacaggctatatcagaccattatcccgtggaggttatgctgaaa

SEQ ID NO: 10573 - DNA, 846 bp, synthetic construct
  misc_feature 1..846: note = source = /note="Description of Artificial Sequence: Synthetic coding sequence"
  source 1..846: mol_type = other DNA
atgagagggatgaagctgctcggggcgctcctcgccctggccgcacttcttcagggagccgtgtcgttgaagatcgcggccttcaacatccagaccttcggcgagacgaagatgtcgaacgcaaccctcgtgtcgtacatcgtgcagatcctttctcgctacgacatcgcgttggtgcaggaggtccgcgactcgcatttgacggcggtgggaaagctgctggataacctcaatcaagatgcgccggacacctatcattatgtcgtgtcggaaccgcttggtcggaattcgtacaaggaacgctacctgttcgtgtaccggccggaccaagtgtcggccgttgattcgtactattacgatgacggctgcgagccatgtggtaacgacacctttaatcgggaaccagcaatcgtgcgcttcttttctcggttcaccgaagtccgggaatttgctatcgtccctctgcacgcagcaccgggcgacgccgtggccgagattgacgcgctgtacgatgtttatctggatgtgcaggaaaaatggggcctggaggacgtcatgcttatgggcgatttcaacgcaggatgctcgtacgtgaggccgagccagtggagttcaatccggctgtggacgtcaccaaccttccaatggctgattcccgatagcgccgacactactgccactccaactcactgcgcgtacgaccgcatcgtcgtggctggcatgctcctccgcggagccgtggtcccggattcagctctgccgttcaacttccaggctgcatacggtctgtcggatcaactggcccaggcaatttcggatcactacccagtggaggtgatgctgaaa

SEQ ID NO: 10574 - DNA, 846 bp, synthetic construct
  misc_feature 1..846: note = source = /note="Description of Artificial Sequence: Synthetic coding sequence"
  source 1..846: mol_type = other DNA
atgagagggatgaaactgctcggcgcacttctcgccttggcggcgctgctgcagggagccgtgtccttgaaaatcgcagctttcaacattcaaacattcggagagacaaagatgagtaatgcaaccctggtctcatatatcgtgcaaattttgtcccgatacgatatagccctggtgcaagaagttcgggatagtcatctgaccgccgtcggtaagctgttggacaacctgaatcaggatgctcccgacacctatcactacgtcgtatccgagcctttgggaagaaacagctacaaggaaaggtacctcttcgtgtatcgccccgaccaggtgagcgcagtagattcctattactatgacgatggatgcgagccttgcggcaatgacactttcaatagagagcccgcaattgtcagattttttagcagattcacggaagtgcgggagttcgctatcgtaccgcttcatgctgccccaggcgacgctgtggccgagattgacgccctttacgatgtttacctcgacgtgcaggagaagtggggcctggaggacgtcatgctgatgggcgatttcaacgcaggctgttcctacgtgcgccctagccaatggtcatcaatccgactgtggactagtcctacgttccagtggctgatcccggattctgctgatactactgcgactccaacccactgcgcttatgacaggatcgtggtggcaggtatgctcctgcgaggggctgtagtccccgactccgcccttccatttaacttccaggcagcctatgggctgagcgatcaactggcgcaagctatttcagaccactacccagtggaagtgatgctgaag

SEQ ID NO: 10575 - DNA, 846 bp, synthetic construct
  misc_feature 1..846: note = source = /note="Description of Artificial Sequence: Synthetic coding sequence"
  source 1..846: mol_type = other DNA
atgagaggcatgaagctgctgggcgcccttctcgcactggcagcactgctgcaaggtgcagtgtcccttaagatcgccgccttcaacattcaaaccttcggagagactaaaatgtcgaatgccactttggtgtcgtacatcgtccaaatactctcacgatacgatatcgcattggtgcaagaagtgagagattcccatcttactgcggtgggtaagctgctcgataacctgaaccaagacgcgccagacacctaccactacgtcgtgtcagaaccgctggggaggaacagctacaaggaaagatatctctttgtgtaccgtcctgaccaggtgagcgcagtggatagctattactacgatgacggatgtgagccttgcggaaatgacacctttaatcgtgaacccgcaatagtgcgatttttctccagattcactgaagtgcgtgaattcgccatagtccctctgcatgctgcaccaggagatgcagtcgcagaaattgacgcgctttatgacgtgtacctcgatgtgcaagagaagtggggacttgaggacgtcatgctgatgggtgatttcaacgcaggctgttcctacgtccggccgtctcaatggagcagcatcagactgtggacctcaccaaccttccaatggctcattcctgatagcgccgacactactgcaactcctactcattgtgcatacgaccgtattgtggttgcaggtatgcttctcagaggcgctgtggttcctgactccgcgctccctttcaactttcaggctgcatacggtctttccgaccagcttgcacaggcgatatcagatcactacccagtggaggtgatgctgaaa

SEQ ID NO: 10576 - DNA, 846 bp, synthetic construct
  misc_feature 1..846: note = source = /note="Description of Artificial Sequence: Synthetic coding sequence"
  source 1..846: mol_type = other DNA
atgcgaggtatgaagctgcttggggcgctcctcgcactcgctgctttgcttcagggcgcggtgtctttgaaaatagctgcttttaatatacagacttttggggagacgaaaatgagtaatgcaaccctggtgtcctacatagtgcaaatcttgtccagatacgacatagctttggttcaggaggtccgcgacagccatctcacggccgtcggtaaattactggataatctaaatcaggatgcccccgacacatatcactacgtagtttccgagccacttgggcgcaactcatacaaagaacgctatttgttcgtgtatcgccccgatcaggtgtcagctgttgattcctactactacgatgatgggtgcgagccctgcggcaatgacactttcaaccgcgaacccgcaattgtccggttcttctcacgcttcacggaagtgcgagagtttgctattgtgcctctgcacgcagcccccggagatgctgtcgcagaaatcgatgctctatacgacgtctaccttgacgtccaagagaaatggggcctggaggatgtgatgctcatgggcgacttcaacgctgggtgctcgtatgtgagaccctcccagtggtccagtatcaggctgtggacttcaccaaccttccagtggctcattcctgattcagccgataccaccgcgactcctacgcattgcgcatacgaccggattgtggtggctggcatgctgctccgcggagctgttgtgccagactccgcgcttccctttaattttcaggccgcgtacgggctgtcggatcagctggcccaggccatcagtgatcactatcctgtcgaggtgatgttgaaa

SEQ ID NO: 10577 - DNA, 846 bp, synthetic construct
  misc_feature 1..846: note = source = /note="Description of Artificial Sequence: Synthetic coding sequence"
  source 1..846: mol_type = other DNA
atgcgggggatgaaactgctcggtgccctccttgcacttgccgccctactccagggcgccgtctctttgaagatagctgcttttaatattcagacctttggggaaacgaagatgagtaacgctacgctggtctcctatattgtccagatcctctcccgttatgacatagctctggtacaagaagtcagggactcccacctgaccgcggtaggaaaactgctcgacaacctgaaccaggatgcacccgatacttatcactatgtggtgtccgagcccttggggcggaactcctacaaagaacggtatctcttcgtgtaccggcccgatcaggtgtctgccgttgactcctattattacgacgatggctgtgagccatgtggcaacgatacctttaatcgtgaacctgccattgtgaggtttttttctcgtttcacggaggtccgagagttcgctatagttccccttcacgctgcccctggagatgccgtggctgagatagatgctctttacgatgtgtatctggatgtacaggaaaagtggggcctggaagacgtcatgctgatgggggacttcaacgccggctgttcctatgtgcggcccagtcagtggagtagtatcagactgtggactagtcctactttccagtggttgatccctgactctgcggatacgacggctacacctacccactgcgcctacgatcggatcgttgtcgctggaatgctgttgagaggagccgttgtccccgactccgcattaccattcaatttccaagcagcctatgggctaagtgaccaactcgcacaggctatcagcgaccattatccggtggaagtcatgttgaag

SEQ ID NO: 10578 - DNA, 846 bp, synthetic construct
  misc_feature 1..846: note = source = /note="Description of Artificial Sequence: Synthetic coding sequence"
  source 1..846: mol_type = other DNA
atgagaggtatgaaattacttggagctttacttgcattagcagcacttcttcaaggagccgtaagtttaaaaatagcagcttttaatattcaaacatttggtgaaacaaaaatgtctaatgcaactttagtctcatatatcgttcagattttatcaagatatgatattgcattagttcaagaagttagagattcacatcttacggctgttggtaaacttcttgataatcttaatcaagacgctcctgatacatatcactatgttgtcagtgaaccacttggaagaaatagttataaggagcgttatttatttgtttacagaccagatcaagtaagtgctgtggattcttattactatgatgatggttgtgaaccatgtggaaatgatacattcaatagagaacctgctattgttagattcttttcacgttttacagaagtaagagaatttgctattgttccattacatgctgctccaggtgatgcagttgcagaaattgatgcactttatgatgtttatttggatgtacaagaaaaatggggattagaagatgttatgcttatgggtgattttaatgcaggatgttcctatgttcgaccaagtcaatggtcctcaattcgattatggacatcaccaacttttcaatggttaattccagattcagcagatacgacagcaactccaactcattgtgcatatgacagaatagttgttgctggaatgttacttcgtggagctgttgtccctgactcagcacttccttttaattttcaagcagcttatggactttctgatcaattagcacaagctatatctgatcattatcctgttgaagttatgttaaaa

SEQ ID NO: 10579 - DNA, 846 bp, synthetic construct
  misc_feature 1..846: note = source = /note="Description of Artificial Sequence: Synthetic coding sequence"
  source 1..846: mol_type = other DNA
atgcgaggaatgaagctactgggggcacttcttgctctggcagcgcttctgcagggcgctgtgagcttgaagatcgccgcattcaatatccagacatttggcgagaccaaaatgtcaaatgcaaccctggtgtcgtacattgtacaaattttgagccggtacgatattgccctcgtacaggaggtgcgggactcacacttaacggctgtgggcaagctcctggacaatctcaatcaagacgctcctgatacataccattacgtggtttccgagcccctgggcaggaacagctacaaggaacgctatctgttcgtttataggcccgatcaagtatctgcagtggactcttattattatgatgatggctgtgagccatgtgggaacgatacctttaatcgcgagcctgccatagtgcgcttcttttcacgctttacagaagtgagggagtttgccatcgtgccgctgcacgccgcacctggagatgcggtcgctgaaatcgacgcactttacgatgtgtacctggatgtgcaggagaagtggggactggaagatgtgatgcttatgggagactttaatgcaggctgttcctatgtacgcccttcccaatggtcctccattcgactttggacttcacccacgtttcagtggctgattccagactcagcagacaccaccgccacccctacacattgcgcctacgacagaattgtggttgcaggtatgctgttgcggggcgcggtggtgcccgactccgccctccccttcaacttccaggccgcatatggcctgagtgaccaactcgcacaagccatttccgatcactacccggtcgaggtgatgctgaag

SEQ ID NO: 10580 - DNA, 846 bp, synthetic construct
  misc_feature 1..846: note = source = /note="Description of Artificial Sequence: Synthetic coding sequence"
  source 1..846: mol_type = other DNA
atgaggggtatgaaattactgggggccctcctcgcattagctgcactgctgcagggggcggtctctctgaagatcgcggccttcaacatccagacatttggcgaaaccaaaatgtctaacgctactctggtcagttatattgtgcagatcctctccagatacgatattgccctggtgcaagaagtcagagattcacatttgaccgcagtaggcaagctgctggacaacctgaatcaggacgctccagatacataccattacgtggtaagcgaacctctgggccgaaactcctataaggagcgatacctgtttgtctatcgtcctgaccaggtttctgcggtggactcttattactacgacgatggctgcgagccttgtggtaatgacacatttaatcgagaacctgccattgtgcgattttttagcagattcactgaggtccgagagttcgcaatcgtgcctttacacgccgctcctggcgacgcagttgcagaaatcgacgccctgtatgatgtgtatctcgacgtgcaggaaaagtggggtctagaggatgtgatgttaatgggcgacttcaacgcaggctgcagctacgtgagaccctctcagtggtcctctatcaggctgtggacctccccgacctttcagtggctgatccccgattcagcggacaccacggccactcctactcattgtgcctacgatagaattgtagtggccggaatgctgctgcgaggcgctgttgtgccagattcagctttgcccttcaacttccaggctgcctacggactcagtgatcaattggcgcaggccatcagcgaccactatcccgttgaagtgatgttgaag

SEQ ID NO: 10581 - DNA, 846 bp, synthetic construct
  misc_feature 1..846: note = source = /note="Description of Artificial Sequence: Synthetic coding sequence"
  source 1..846: mol_type = other DNA
atgaggggcatgaaactgctgggcgctttgctggcgctggccgcattactacagggtgcggtcagtctgaagatcgcagccttcaacatccagacctttggcgagactaagatgagtaacgctaccctggtgtcgtacatcgttcagattttatctcgctacgacatagcccttgttcaggaagtgagagattctcacctgactgccgtcggcaagctgcttgacaatctaaaccaggacgcacctgacacctaccattatgtggtgagtgaaccactgggcagaaatagttacaaggaacggtatctgtttgtgtacagacccgaccaagtgagcgccgtcgatagctactactacgatgatgggtgtgaaccgtgtggcaacgataccttcaaccgggagcctgctattgtgcgcttctttagccgtttcaccgaggtccgggaattcgctatcgtgcctctccacgcagcacctggagatgctgtggcagaaatcgacgcactctatgacgtgtatctagacgtgcaggaaaaatgggggttagaggacgtaatgttaatgggcgatttcaatgctggctgctcatatgtgaggccctcccagtggtcttcaatccggctgtggacatctcccacattccagtggttaatccccgactccgctgacactacggcgactcctactcactgtgcttatgaccgcatcgtggttgcgggtatgctgctcagaggtgctgtggttcctgacagtgccttaccctttaacttccaggccgcctatgggttatctgaccagctcgctcaggccatctctgatcattaccctgtcgaagtgatgctgaaa

SEQ ID NO: 10582 - DNA, 846 bp, synthetic construct
  misc_feature 1..846: note = source = /note="Description of Artificial Sequence: Synthetic coding sequence"
  source 1..846: mol_type = other DNA
atgcgtggaatgaagctcttgggagcacttctcgcccttgctgcacttcttcagggcgcagtcagcctgaagatagcagcattcaacatccaaacctttggtgagactaaaatgtcgaacgcaaccctggtatcctacatagtgcaaatactttcccgctacgacatcgcacttgtccaggaggtgagagatagccacttgaccgcggtgggaaaactgctcgacaacctcaatcaagacgcacctgatacttaccattacgtggtgtcggagccccttgggcgcaactcctacaaagaacgttatcttttcgtctaccggcctgaccaagtgtccgcggtggattcgtactactacgacgacgggtgtgaaccatgtggaaatgacacctttaaccgagagcccgcaattgtgcgctttttctcgcgttttaccgaggtgcgagaatttgccattgtgccccttcacgccgctcctggtgacgccgtcgcagaaattgacgcactctacgacgtgtacctcgatgtccaagaaaagtggggtttggaggacgtgatgctgatgggagatttcaacgcagggtgctcctacgtgcgcccaagccagtggagcagcatccgactttggacttcaccaacgtttcaatggctgatcccagattcagcagatactacggctactccgactcattgcgcctacgatcgtatcgtggtcgccggaatgctgcttagaggggccgtggtgccggattcggccctgccctttaacttccaggccgcctacggtctgtccgatcaactggcccaagccatctccgatcattatcctgtggaagtgatgcttaag

SEQ ID NO: 10583 - DNA, 846 bp, synthetic construct
  misc_feature 1..846: note = source = /note="Description of Artificial Sequence: Synthetic coding sequence"
  source 1..846: mol_type = other DNA
atgcgggggatgaagttgttaggggctctcctggctctggccgcgctccttcagggtgcggtcagcctgaaaatcgctgctttcaacattcaaacgtttggggagaccaagatgtcaaacgccaccctcgtgagctatatagtacagattctgtcgcggtacgatatagccctggtgcaggaggtgagggactctcatttaacagcagtgggtaaactgctggacaacctgaaccaggacgcccctgatacctatcattacgtggttagtgagcccctcggaaggaactcctacaaggagagatacctgttcgtgtacagacccgatcaggtcagcgccgtcgatagttactattacgatgacggatgcgagccatgtggcaacgacacctttaaccgcgagccagcgatcgtgcgcttcttctcgcgcttcacagaagtgagggagttcgccatagtgcctttgcacgctgcccccggtgacgccgtggccgagatcgatgccctgtacgatgtttacctggacgtccaggagaaatggggcctggaggatgttatgctgatgggtgactttaatgcgggctgtagttacgtacgcccgagccaatggtcgtcgattcggttgtggacctctccaacctttcagtggctcatccctgactccgccgataccacggcgactcctacgcattgcgcatacgaccgaatagtcgtggcaggaatgctcctgagaggtgcagtcgtgccagactccgctctgcccttcaactttcaggcagcctatggcctgagcgaccagctggcgcaggcaatttccgatcactaccccgtggaggtgatgttaaaa

SEQ ID NO: 10584 - DNA, 846 bp, synthetic construct
  misc_feature 1..846: note = source = /note="Description of Artificial Sequence: Synthetic coding sequence"
  source 1..846: mol_type = other DNA
atgcggggcatgaagctgctcggcgcactccttgccctggctgcgctgctccaaggagctgtgtcactcaaaatcgcagcattcaatatccagactttcggagaaaccaagatgtccaatgccactctggtgtcatacattgtccagattttgtcccgttatgacatcgcgctggtccaagaggtgcgcgactcccacctgacggccgtgggtaaacttctggataacctcaaccaggacgcaccggatacctaccactacgtcgtctcggaacccctgggacgtaactcatacaaggaacgctacctgttcgtctaccggcctgaccaagtctccgctgtggactcgtactattacgatgacgggtgcgaaccctgcggcaacgacactttcaatcgggaacctgcaatagtgcgctttttctcacggttcaccgaagttagggagttcgccatcgtgccgttgcacgcggcaccgggagatgccgtggcagagatcgatgcgctgtacgatgtgtatctcgatgtgcaggagaagtggggactggaggacgtcatgttgatgggcgatttcaacgcgggctgttcatatgtccgcccttcccagtggtcatcgatccgactctggacctccccgactttccagtggctgatcccagacagcgcagatactaccgcgaccccaactcattgcgcttacgaccgcatcgtcgtcgctggtatgctgctgcggggagccgtcgtgccggactcggcgctccctttcaactttcaagcggcctacgggctgtccgaccaactggcccaggcgatcagcgatcattacccggtggaagtcatgctcaag

SEQ ID NO: 10585 - DNA, 846 bp, synthetic construct
  misc_feature 1..846: note = source = /note="Description of Artificial Sequence: Synthetic coding sequence"
  source 1..846: mol_type = other DNA
atgcgcggcatgaagttgttgggcgcacttctggcccttgccgcgctgctgcagggggcagtgagtttgaagattgctgcctttaacatccagacctttggcgagactaaaatgtccaatgctaccttagtgtcctatatcgtgcagattctgagccgctacgatatcgctctggtgcaggaagttagggattcgcatctaacggctgtcggcaaattactcgataacttgaaccaggacgcccctgacacataccattacgttgtttcagaacccctcggccgcaactcatataaggaacggtatctgtttgtttatcgacctgatcaggtgagcgcggttgatagctactactacgacgacgggtgtgagccttgcggtaacgacacatttaacagggaacccgccatcgtccgattcttttctcgcttcaccgaggtgagagagttcgctattgtacctttgcacgccgccccgggcgatgccgtggctgaaatagacgcgctttacgatgtttacctggatgttcaagaaaagtggggcctggaagatgtgatgctgatgggggatttcaacgcaggatgtagttatgtgagaccatcccaatggagttccattcggttgtggactagccctaccttccagtggttgattccagattccgcagataccacagccacccctacgcattgcgcgtatgaccgtatagtcgtggccggcatgcttctgcgaggcgcagttgtgccagacagcgccctcccctttaatttccaggctgcttacggcctgagcgaccagctagcccaagccattagcgaccattaccctgtcgaggtgatgttaaaa

SEQ ID NO: 10586 - DNA, 846 bp, synthetic construct
  misc_feature 1..846: note = source = /note="Description of Artificial Sequence: Synthetic coding sequence"
  source 1..846: mol_type = other DNA
atgcgcggtatgaaactcctgggcgccctcctggcgctcgccgcgcttctgcaaggcgcggtttccctgaagatcgccgcctttaacatacaaacctttggggagactaaaatgtcgaacgcgaccctggtgtcatacatcgttcaaattctgtcccggtacgacattgcgctcgtccaggaagtgcgcgattcgcacctgactgcagtcggaaaactcctcgacaacctcaaccaggacgcacctgacacttatcactacgtggtcagcgaacccctgggccggaactcgtacaaagaaaggtacctcttcgtctaccggccggaccaggtgtccgccgtggattcgtattactacgatgatggatgcgagccctgcggaaatgataccttcaaccgggaacctgcaattgtgagattcttcagccggttcactgaagtccgggagtttgcgatagtgccacttcatgccgctcctggggatgccgtggcagagatcgatgccctgtacgacgtctacctggatgtgcaagaaaagtggggcctggaggacgtcatgctcatgggagacttcaacgcaggatgttcatacgttcggccgtcccagtggtcctccattcgcctgtggacctcgcctactttccagtggctgatcccagacagcgccgatacgactgctacccccacccattgcgcttacgacaggatcgtggtggcaggaatgcttctgagaggagcagtcgtccctgactcagcactgccgttcaacttccaggcagcctacggcctgagcgaccagctcgcccaggccatctcagaccactacccagtcgaggtcatgctgaaa

SEQ ID NO: 10587 - DNA, 846 bp, synthetic construct
  misc_feature 1..846: note = source = /note="Description of Artificial Sequence: Synthetic coding sequence"
  source 1..846: mol_type = other DNA
atgagaggcatgaagctcctaggggcactcctcgcgctcgccgcactgctccagggggcagttagtctgaagatcgccgcatttaacatccagacatttggggagacaaagatgagcaacgcgactctagtctcatacatcgtgcagatcctcagccggtatgatattgccctggtgcaagaagtcagagatagccacctgacagcagtgggaaaactactcgacaacctgaaccaggacgctccagacacctatcattatgtggtctcagagccactcgggaggaacagttacaaggaaagatacctcttcgtctacaggcccgaccaggtctcagcagtagacagctactattacgatgacggatgcgagccgtgcggtaacgatactttcaacagggaaccagcgatcgttaggttcttttctcgcttcaccgaagtcagagaatttgccatagtccctcttcatgcagcccctggcgatgctgttgccgaaattgacgccctctacgacgtctaccttgacgttcaagagaagtggggcctcgaagacgtcatgctcatgggagatttcaacgctggctgctcctacgttaggcccagtcagtggtcgtctataagattgtggaccagccccacattccagtggctgattcccgacagcgcagatacaaccgccactcctacccattgcgcttacgataggatagttgtggccgggatgctcttgcggggcgctgtggtgccagacagcgctctgccttttaattttcaggcagcctatggcctgagcgatcaactcgcgcaagcaatcagtgatcactaccccgttgaagtcatgctgaag

SEQ ID NO: 10588 - DNA, 846 bp, synthetic construct
  misc_feature 1..846: note = source = /note="Description of Artificial Sequence: Synthetic coding sequence"
  source 1..846: mol_type = other DNA
atgagagggatgaaactcctcggcgcattgctggccctcgctgctctactacagggtgcagtaagccttaagatagccgcctttaacatccaaactttcggtgagacaaaaatgtctaacgcaaccctggttagctacattgttcaaatcctgtcacgttacgatatcgccttagtccaggaggtcagagatagccatctcacagcagttggaaagctccttgataatcttaatcaggacgcaccggatacttatcattatgtcgtcagtgaacccctagggcggaactcatacaaggagcgatacctatttgtgtatcgacctgatcaagtgagcgccgtggattcttactactatgacgacggctgtgagccttgcgggaacgatacttttaacagagaacccgcaatcgtgcgcttcttcagccgctttactgaggtgcgggaatttgctattgtgcctttgcatgccgcccccggagacgccgtcgcagagattgatgctctgtatgacgtctatctcgacgtgcaggagaaatggggtctggaggacgtgatgttgatgggagattttaatgctggctgctcctatgtgcgcccttcacaatggagttcaattaggctgtggacatcgccaacgtttcagtggctgatccccgacagtgctgataccactgccacaccgacccactgcgcctacgatcggatcgtggtcgctgggatgttgttgcggggagctgtggtgccagactcagccctgccattcaatttccaggctgcctatggcctgagcgaccaattggctcaggctatctccgaccactaccccgttgaagtcatgctgaag

SEQ ID NO: 10589 - DNA, 846 bp, synthetic construct
  misc_feature 1..846: note = source = /note="Description of Artificial Sequence: Synthetic coding sequence"
  source 1..846: mol_type = other DNA
atgcgggggatgaagttgttgggtgcccttctcgcgctcgctgccctgcttcagggggcagtgagcctgaaaatcgccgcgtttaatatccagactttcggcgagactaagatgtcaaacgccaccctcgtctcctatatcgtacagatcctgagcaggtatgatattgctctggtccaggaggtgcgggattcccatctgacagccgtgggcaagttacttgataacctcaaccaggacgcccctgacacataccactacgtcgtttctgagccactgggacgcaattcatacaaggagagatacctgttcgtgtatcgaccagaccaggtcagcgcggttgatagttactactacgatgacgggtgcgaaccttgtggaaacgatactttcaacagggagcccgccatcgtgaggttctttagcagattcaccgaggtacgagaattcgccatcgtgccgctccatgcagcccctggagatgccgtcgctgaaatcgacgctctctatgacgtctacctggacgttcaggaaaagtggggcttggaggacgttatgttaatgggagactttaacgctgggtgctcctacgtgagaccttcccagtggagctcaattagattgtggacttcacctactttccagtggttaataccagacagcgctgacacgactgctacccctacacattgcgcatacgaccgtatcgtggtggcggggatgttattgaggggagccgtagtccctgactccgccctgccgtttaatttccaggccgcatatggcctttctgaccaactcgcacaggcaatctctgatcattatcctgtggaggtgatgctaaag

SEQ ID NO: 10590 - DNA, 846 bp, synthetic construct
  misc_feature 1..846: note = source = /note="Description of Artificial Sequence: Synthetic coding sequence"
  source 1..846: mol_type = other DNA
atgcggggaatgaaactgctcggggcgctgttggcactggcggccctcctgcaaggagccgtgtccctgaagatcgcagctttcaacatccaaaccttcggcgaaacgaagatgtccaacgccaccctggtgtcctacatagtgcagatcctgtcccgctacgacatcgcacttgtgcaagaagtgcgcgactcgcatctgactgccgtcggtaaactcctggacaaccttaaccaggacgctccggacacctatcactacgtggtgtccgaaccactcggacggaacagttacaaggagcgctacctctttgtgtaccgccctgaccaggtgagcgcggtggactcgtactactacgacgacggctgcgagccttgcggaaatgatactttcaaccgcgaaccggccattgtgcggttcttttcccgcttcactgaagtgagggagttcgccattgtgcctctccatgccgcgccgggagatgctgtggcagagatcgacgccctctacgatgtgtacctggacgtgcaagaaaagtggggacttgaagatgtgatgctgatgggggactttaatgccggatgcagctacgtcaggccgtcgcaatggtcatcaatccggctctggacctctcctactttccaatggctgatcccggattccgcagatactaccgcgaccccaacccactgcgcatacgatcgaattgtcgtggccggaatgctccttcgcggagcagtcgtgccggatagcgccctgccgtttaacttccaggcggcgtacggactgtcggaccaactggcgcaggccatctctgatcactatccggtggaagtgatgctcaaa

SEQ ID NO: 10591 - DNA, 846 bp, synthetic construct
  misc_feature 1..846: note = source = /note="Description of Artificial Sequence: Synthetic coding sequence"
  source 1..846: mol_type = other DNA
atgcgcggtatgaagctgttaggagcgctattggctttagccgccttgttgcagggcgctgtgagtctgaagatcgcggcattcaatattcagaccttcggcgaaaccaagatgagtaacgcgacgctggtctcttatattgtccaaattctctctaggtacgatatagctctcgtgcaagaagtgcgtgattcgcacttgacggctgtgggcaagctattagataatcttaatcaggatgcgccggatacatatcactacgtcgtgtccgagccgctgggaaggaactcgtacaaagagcgctacctttttgtttatcgcccagaccaggtctccgcagtggattcgtactattatgacgacggatgcgaaccatgcgggaatgataccttcaaccgtgaaccggccatcgtgcgattcttctcccggttcactgaagttagagagtttgccatcgtcccgttgcatgctgctccgggcgatgccgttgcagagattgatgcgctgtacgatgtgtatctagacgttcaggagaagtgggggttggaggacgtgatgctgatgggagacttcaacgctggctgctcgtatgtgcgcccgagccagtggagttctatccgactgtggaccagcccaacgttccagtggctgatacccgacagtgcggacacaactgccactccgacgcattgtgcctacgatcggattgtggtcgcaggtatgctgctccggggagccgtggtgcccgatagcgcactgcccttcaatttccaggcagcatatggcctaagcgaccaactggcacaggcgatctccgaccactatcccgtggaagtgatgttgaag

SEQ ID NO: 10592 - DNA, 846 bp, synthetic construct
  misc_feature 1..846: note = source = /note="Description of Artificial Sequence: Synthetic coding sequence"
  source 1..846: mol_type = other DNA
atgagaggaatgaaacttctcggagcgctgctcgcattggcagctctgttacagggcgcggtctccctaaagatcgcggcctttaacatccaaacctttggcgagacaaagatgtcaaacgcgactttggtaagttacatcgtccagattctgtcccgttatgatattgccttggtgcaggaagtgcgcgacagtcatctaacagccgtcggcaagcttttggacaacctgaaccaggacgctccggacacttaccattatgtcgtaagtgagccgctgggccgcaactcttataaagagcggtatctgtttgtgtatagaccagaccaagtctctgctgtggatagttattactatgatgatggatgcgagccgtgcggcaatgacactttcaatcgggagccagcgattgtgcgcttcttttctcgtttcaccgaggtccgggagttcgcgatcgtcccgcttcacgcagctcctggagacgcagtggccgagatcgacgcgttatacgacgtctaccttgacgtccaggagaagtgggggctggaggacgtgatgctgatgggggactttaatgccgggtgcagctatgtcaggcctagccaatggtcctctatcagactgtggacatctcccacattccagtggttgatcccagacagcgccgatactacggctacacctactcattgcgcctatgatcgcattgtggtggctgggatgttattgcgaggggcggtagtacctgattccgcactacccttcaacttccaggcagcctacggtctctcggaccagctcgcacaggcgatatccgaccactatcccgtcgaagtgatgctgaaa

SEQ ID NO: 10593 - DNA, 846 bp, synthetic construct
  misc_feature 1..846: note = source = /note="Description of Artificial Sequence: Synthetic coding sequence"
  source 1..846: mol_type = other DNA
atgcgcggcatgaaacttctgggtgctcttctcgccctcgccgccctgctgcaaggagctgtctctctgaagatcgcggccttcaatatccagacctttggagagactaagatgtctaacgccaccctcgtctcctacatagtgcagatcctctcccgctacgatattgcccttgtgcaggaggtgcgggacagccacttgactgcggtcggaaagctgctggataacctgaatcaggatgcccctgacacgtatcactacgtggtgagcgaaccgctggggcgcaactcctacaaagaaagatacctttttgtctacagaccggaccaggtgtctgctgtggactcatactactacgacgatggttgtgagccgtgcggaaacgacacctttaatcgtgagcccgctattgtcagattcttctcgcggttcactgaagttcgagagttcgcgatcgtgccattgcacgccgcaccgggagatgcagtagcagaaatcgacgcgttgtacgacgtgtacctcgacgtccaagaaaagtggggcctggaggacgtgatgctgatgggagactttaacgcaggatgcagctacgtaaggccatcccagtggagctccatccgcctctggaccagccctactttccaatggctgatcccagactcggctgatactaccgctacccccactcattgcgcctacgatcgcatcgtggtggctggcatgctgctcaggggggcagttgtgcctgattccgccctccctttcaacttccaggccgcctatggtctgtcggaccaacttgcacaggcaatctcggatcattacccagtggaagtgatgcttaag

SEQ ID NO: 10594 - DNA, 846 bp, synthetic construct
  misc_feature 1..846: note = source = /note="Description of Artificial Sequence: Synthetic coding sequence"
  source 1..846: mol_type = other DNA
atgaggggcatgaagttgctgggggccctgctcgcactggctgcccttcttcaaggggccgtgtcccttaagatagctgcctttaatattcagacattcggtgaaactaagatgtctaatgcaaccttagtatcttacattgtgcaaatcctctcacggtatgacatcgctctggtccaggaggtgagagatagtcacctgacagccgtcggcaaactgttggacaacctcaaccaggacgccccagacacttatcattatgtggtgagcgagcctttaggtcgcaacagttacaaagaacgttacctatttgtatacaggccagatcaagtgtcagccgtggattcttactactacgatgacggctgtgagccatgtggtaacgacacatttaatcgagaacctgccattgtgcggttcttttcccgattcactgaagtccgtgagtttgccatcgtgcccttgcacgcagcccccggcgacgccgtggccgagattgacgccctgtatgacgtgtacctcgacgtccaggaaaaatggggcctcgaggatgtgatgctcatgggagactttaacgctggctgttcatatgttcggccaagtcagtggagcagtatccggctctggacctccccaacctttcagtggttgatacctgattctgcagacaccactgcgacacccacacattgcgcttacgaccgcatcgtggtcgctggaatgctccttaggggcgcggtggtgccggattcagctctcccttttaattttcaggccgcatatggactgtccgaccagctggctcaggctattagcgaccattatccagttgaagtaatgctgaag

SEQ ID NO: 10595 - DNA, 846 bp, synthetic construct
  misc_feature 1..846: note = source = /note="Description of Artificial Sequence: Synthetic coding sequence"
  source 1..846: mol_type = other DNA
atgagagggatgaagctgctgggggcattactggcattggcagccctcttgcagggagccgtctccctcaagatcgcagctttcaacattcaaacattcggagagaccaagatgtccaatgcaacgctggtgagttacattgtgcaaatcctgagccggtatgatatagccctggtgcaagaagtgcgggactctcatctcacagccgttggtaaattgctagataatctgaatcaggatgccccagacacgtatcattatgtggtaagcgaaccgctgggtaggaattcatacaaggagcgctatctctttgtgtaccgcccagaccaggtcagtgcagtggattcctactattacgacgacggatgcgagccttgtggaaacgacacattcaatagggaacctgccatcgtgaggtttttctctcggttcaccgaagtgcgggaatttgccatcgtaccactacacgccgccccaggagatgccgtggctgaaatcgacgccctgtatgatgtatacttagatgtgcaggaaaagtggggtctggaagatgtgatgttaatgggagattttaacgctgggtgcagctatgtacggccctcgcagtggtcatcgatccgactgtggacctcacccacttttcagtggctaattcccgactccgccgacacaacagctaccccgactcactgcgcctatgaccgaatcgtggtggccgggatgctgctgcggggagcagtagttccagactcagccctgccttttaattttcaggcagcatatggactaagtgatcagctggcccaggcaataagcgatcactatccggtggaagtgatgctgaag

SEQ ID NO: 10596 - DNA, 846 bp, synthetic construct
  misc_feature 1..846: note = source = /note="Description of Artificial Sequence: Synthetic coding sequence"
  source 1..846: mol_type = other DNA
atgagaggaatgaagttgctcggagcgcttcttgctcttgcggctctgctccagggcgcggtgagtctaaagattgctgcctttaacatccagactttcggggagactaaaatgagcaacgccactctggtgagctatattgtacaaattctttcacggtacgatatcgcgttggtccaagaggtgcgcgactctcaccttaccgcagtcggcaagctcctggacaacctgaaccaagacgcacccgatacttatcactatgtggtttccgaacctttgggccggaattcctacaaagagagatacctgtttgtctatcgcccggatcaggtgtctgcggttgactcttactactacgacgatggctgtgaaccttgtggcaacgataccttcaaccgagaacctgccattgtgaggtttttttcccgtttcactgaggtaagggagttcgccatcgttccactgcacgcagctcctggcgacgccgtcgccgaaatcgatgcactatatgatgtatatctcgatgtacaggaaaagtggggcctcgaggatgtgatgctaatgggcgatttcaacgccggttgctcgtacgtccgtcctagtcagtggtcctctattcgtctgtggactagtccgacttttcagtggctgatccctgactctgctgataccacggccacacccacgcactgtgcttacgatcggatcgtcgtagctggcatgctgcttagaggtgctgtggtgcccgacagcgctttacctttcaacttccaagctgcctatggtctgtcagaccagttggcacaggcaatctccgatcactaccccgtggaggtgatgctcaag

SEQ ID NO: 10597 - DNA, 846 bp, synthetic construct; identical to SEQ ID NO: 10595
  misc_feature 1..846: note = source = /note="Description of Artificial Sequence: Synthetic coding sequence"
  source 1..846: mol_type = other DNA

SEQ ID NO: 10598 - DNA, 846 bp, synthetic construct
  misc_feature 1..846: note = source = /note="Description of Artificial Sequence: Synthetic coding sequence"
  source 1..846: mol_type = other DNA
atgagaggcatgaaactgctcggagcactgctggccctcgcggcgctgctgcaaggcgcagtgtcactcaagatcgccgccttcaacatccagactttcggtgagacgaagatgtcaaacgcaactttggtgagctacattgtccagatcctcagcagatacgatatcgccctggtgcaggaagtcagggatagccacctgactgcagtcggaaaactgctggacaacctgaatcaggacgcccctgacacgtaccattacgtggtttcggaacctctcggaagaaactcctacaaggagcgatacctcttcgtgtaccggcccgatcaagtctcggccgttgactcgtactactacgatgatggatgcgaaccctgcgggaacgatactttcaaccgggaaccagcaatcgtgcgcttcttctcccggttcactgaggtgcgcgaatttgccattgtgccgttgcacgcggcgccgggagacgccgtggccgaaatcgatgcgctgtacgatgtgtaccttgatgtgcaggaaaagtggggtctggaggacgtcatgctgatgggagatttcaatgccggatgcagctacgtccgcccgtcgcagtggtcctccattcgcctgtggactagcccgaccttccagtggctcatcccggactccgccgacaccaccgcaactccaacccattgtgcttacgaccggatcgtggttgcggggatgctcctgcgaggagcagtcgttccagattctgctctgccattcaacttccaagcagcctacggcttgtccgaccaactggcacaggctatctcggatcactacccggtggaggtcatgttgaaa

SEQ ID NO: 10599 - DNA, 846 bp, synthetic construct
  misc_feature 1..846: note = source = /note="Description of Artificial Sequence: Synthetic coding sequence"
  source 1..846: mol_type = other DNA
atgcgcggtatgaaattgctaggggccctgctggcgctagccgctctgctccagggagcagtcagcctgaagattgccgcttttaacattcaaacttttggtgagactaaaatgtccaacgctaccctcgtctcttatatagtccaaatcctctcccgctacgacatcgctctggtccaagaggtaagagatagccatctgacagccgtgggcaaactgctcgacaatctgaaccaggacgcaccagacacttaccactatgttgtgtccgagccactgggccgaaattcgtacaaggaaaggtacttgtttgtttatcggccagatcaagtgagtgccgtagatagctattactatgatgacggatgcgagccctgcggaaacgataccttcaacagggagcccgccattgtgaggttcttcagccgattcacagaggtgcgtgagtttgccatagttccattacatgcagctcccggcgacgctgtcgcagagatcgatgcgctgtacgatgtgtacttggatgtgcaggaaaagtggggcttggaggatgtgatgctgatgggtgacttcaacgcaggatgctcctacgtccgaccttcacagtggtcatccattcgcctgtggacttcgccgacctttcaatggctcatccccgatagcgcagatacaacagcaacccctactcactgcgcttatgatcgcatagtagtcgccgggatgctactgagaggagctgtcgttccagactctgccttgccattcaattttcaggccgcgtatggattgtctgatcagcttgctcaggcaattagcgatcattacccagttgaagtcatgctcaaa

SEQ ID NO: 10600 - DNA, 846 bp, synthetic construct
  misc_feature 1..846: note = source = /note="Description of Artificial Sequence: Synthetic coding sequence"
  source 1..846: mol_type = other DNA
atgcgaggtatgaaactattaggtgcgttactagcgttagcggcgctattacaaggtgcggtatcgttaaaaatagcggcgtttaatatacaaacgtttggtgaaacgaaaatgtcgaatgcgacgttagtatcgtatatagttcaaatactatcgcgatatgatatagcgctagttcaagaagtacgagattcgcatctaacggcggtaggtaaattattagataatctaaatcaagatgcgccggatacgtatcattatgtagtatcggaaccgttaggtcgaaattcgtataaagaacgatatttatttgtatatcgtccggatcaagtatcggcggtagattcgtattattatgatgatggttgtgaaccgtgtggtaatgatacgtttaatcgagaaccggcgatagtacgttttttttcgcgttttacggaagttcgtgaatttgcgatagttccgttacatgcggcgccgggtgatgcggtagcggaaatagatgcgctatatgatgtttatttagatgtacaagaaaaatggggtttagaagatgttatgctaatgggtgattttaatgcgggttgttcgtatgtacgaccgtcgcaatggtcgtcgatacgactatggacgtcgccgacgtttcaatggttaataccggattcggcggatacgacggcgacgccgacgcattgtgcgtatgatcgaatagtagtagcgggtatgttattacgtggtgcggtagtaccggattcggcgctaccgtttaattttcaagcggcgtatggtttatcggatcaactagcgcaagcgatatcggatcattatccggttgaagtaatgctaaaa

SEQ ID NO: 10601 - DNA, 846 bp, synthetic construct
  misc_feature 1..846: note = source = /note="Description of Artificial Sequence: Synthetic coding sequence"
  source 1..846: mol_type = other DNA
atgcgaggaatgaagctgcttggcgctctgctcgccctcgctgctctgctccagggtgccgtttctctaaaaatagccgcatttaatatccagacatttggcgagacaaagatgagtaatgcaaccctggtgtcttatattgttcagattttatctcggtatgacattgctctcgtacaggaggttagggactctcatctcactgctgtgggaaagttattggataacctgaatcaggatgcaccagatacatatcactatgtggtgtccgagcctctggggagaaattcctacaaggaaagatacctgtttgtctatcgcccagaccaggtgtccgccgtcgactcatattactacgacgacgggtgcgagccttgcggcaatgatacattcaatagggaacctgccatagtgcgtttcttctctcgctttaccgaggtccgagagtttgcaatcgtgccactccatgccgctcctggcgatgctgtcgctgaaatagacgccctgtacgatgtgtacttagacgtgcaggagaagtggggcctggaggacgtgatgctgatgggtgatttcaatgcaggctgtagttacgtgcgtcctagccagtggtcttcaattagactatggacctccccaacttttcagtggctgatccccgattctgcagacactaccgcaacaccaacccactgcgcctacgatcgcattgttgtggcaggaatgcttctgaggggcgctgtggttcccgattccgcattaccctttaacttccaggccgcttacgggttgtctgatcagctggcccaggccatctccgatcactaccctgtggaagtgatgctcaag

SEQ ID NO: 10602 - DNA, 846 bp, synthetic construct
  misc_feature 1..846: note = source = /note="Description of Artificial Sequence: Synthetic coding sequence"
  source 1..846: mol_type = other DNA
atgcgtgggatgaagcttcttggggctctgctggctttggcagccctgctacaaggggcagtatctctcaagatcgcagcattcaacatccagacatttggagagactaaaatgtcaaacgcaaccttggtgagttacatcgtgcaaatcttgagccgctacgatatcgcgctcgtgcaggaagtaagggacagccaccttactgctgtcgggaaactgctggacaacctgaatcaggacgcccccgacacgtatcattatgttgttagcgagccccttggacgtaactcttacaaggaaaggtatttgttcgtatacaggcccgaccaggtgtccgcagtcgattcatattactacgacgacgggtgcgagccatgtggcaatgatacttttaatcgagagcctgctatcgtcaggttcttctcccgcttcacggaagttcgggaatttgccatcgtgcctctgcacgccgcacccggcgatgcggttgccgagattgatgccctgtacgatgtgtacttagacgtgcaggagaaatgggggctcgaagacgtcatgctgatgggagacttcaacgctggctgtagctatgtgaggccctcgcagtggtcttccatccggttatggacctcacccacattccaatggctcatccccgacagcgcggatacaaccgccacccctacccattgcgcttacgacaggattgtggttgcagggatgcttctcaggggcgccgtcgtgcctgattctgccctgcctttcaatttccaggcggcatatgggttgtccgaccagctggcgcaggccatttccgatcactaccctgtagaagtgatgttgaag

SEQ ID NO: 10603 - DNA, 846 bp, synthetic construct
  misc_feature 1..846: note = source = /note="Description of Artificial Sequence: Synthetic coding sequence"
  source 1..846: mol_type = other DNA
atgcgaggcatgaaattgctgggagcgctgctcgccctggccgctctcctacaaggcgcagtgtcgctgaaaattgcggcattcaatattcagaccttcggcgagaccaagatgtcgaatgccaccctggtgagttatattgtgcaaatcctgagccggtacgatattgctctggtgcaggaggttcgggattcccatttaaccgccgtgggcaagctgttggataacctcaaccaagatgcccctgatacttatcattacgtggtttccgagcccctgggcagaaactcttataaggaacggtacctgtttgtgtatcgcccagaccaagtgtcagcagtcgactcctactactacgatgatggctgtgagccctgcgggaacgataccttcaaccgcgaaccagccatagtgcgcttcttttcacgattcaccgaggtaagggagttcgccattgtgccccttcatgccgcaccaggtgacgcggtcgccgagatagacgctctgtacgatgtctacctggatgtccaggagaaatggggactggaggatgtgatgctgatgggggatttcaacgccggctgttcatacgtcaggccgagccagtggtcctccatacgactctggacttcccctacatttcaatggctcatccctgacagcgcggacaccacggctacacccacccactgcgcatatgacagaattgtggtagccggcatgctcctccgcggcgcagttgtgccagacagcgccctaccattcaacttccaggcggcgtacgggctctctgaccagttggcacaggccatatccgatcattatcccgtggaggtgatgctgaag

SEQ ID NO: 10604 - DNA, 846 bp, synthetic construct
  misc_feature 1..846: note = source = /note="Description of Artificial Sequence: Synthetic coding sequence"
  source 1..846: mol_type = other DNA
atgagaggtatgaaactgctgggcgccctgctggccttggcagccctgttgcagggtgccgtcagcctcaagattgcggccttcaacatccaaaccttcggtgaaactaagatgtccaatgccactctggtgtcctacatcgttcagattctgagtaggtatgatattgcccttgtccaagaggtccgggatagtcacctgacggctgtcggcaaactgttggacaacttgaatcaggatgcaccggatacttaccactacgtggtttctgagcctctcggaaggaactcctataaggagagatacctgttcgtctaccggcccgatcaggtgagcgccgtggacagttactattatgacgacgggtgcgaaccctgcggcaacgatacttttaatcgggagcctgccattgtacgatttttttcacggtttaccgaggtgcgggaattcgccatcgttcccctccacgcagcccccggggacgcagtcgccgaaatcgatgccttgtacgacgtgtatctggacgtgcaggagaagtggggcctcgaggatgtcatgctgatgggagatttcaacgcagggtgcagctacgtccgcccaagccagtggtcatcaattagactgtggaccagtccaaccttccaatggctgattcccgactcagcggataccactgccactccaacacattgcgcctacgacaggattgttgtagcggggatgttgctgcggggggctgtggtgcccgattctgccctgccctttaacttccaggccgcctacgggttgagtgaccaactcgcacaggctatttccgatcattatcccgtggaagtaatgttgaaa

SEQ ID NO: 10605 - DNA, 846 bp, synthetic construct
  misc_feature 1..846: note = source = /note="Description of Artificial Sequence: Synthetic coding sequence"
  source 1..846: mol_type = other DNA
atgagaggcatgaagctcctgggtgctcttctggcactcgcggcactgcttcagggagctgtctcgctcaagattgcggctttcaatatccaaacctttggagagactaaaatgtccaacgctaccctggtgtcgtacatagttcaaatactttcgagatatgacattgcattggttcaggaggtcagagattctcaccttactgccgttggaaagctgttggacaatctgaatcaagacgctccagacacttatcattacgtcgtctccgaacctctgggtcgcaatagctacaaagagcgatacttgtttgtgtaccggcctgatcaggtgtcagcagtggactcgtactactacgatgatggctgcgaaccgtgtggaaacgataccttcaacagggaacctgcaatcgttcgctttttcagcaggttcaccgaggtcagggaatttgctatcgtgccattgcacgcagccccaggagatgccgtcgctgaaatcgatgcactttacgatgtgtaccttgatgtgcaagaaaagtgggggcttgaagatgtgatgctgatgggggactttaacgcaggttgttcatacgtgcgaccgtcacagtggtcgagcatccgcttgtggaccagccctacttttcagtggcttattcctgattcggcagatactacggcgaccccaactcattgcgcctacgatagaattgtggtcgcaggtatgcttcttcgcggcgcagtggtgcctgactcggcactgcccttcaacttccaagcagcatacggtcttagcgatcagctcgcacaagcaatttcggatcattaccccgtggaggtgatgcttaag

SEQ ID NO: 10606 - DNA, 846 bp, synthetic construct
  misc_feature 1..846: note = source = /note="Description of Artificial Sequence: Synthetic coding sequence"
  source 1..846: mol_type = other DNA
atgcgaggaatgaagctcctgggcgcacttctggcgctcgcggcacttctgcaaggagcagtgtctttgaaaattgctgccttcaatatacagacctttggggaaactaagatgtcgaatgctacccttgtctcatatatcgttcaaatcctcagtagatacgatatcgcgctcgtgcaggaagtgcgcgactcacaccttaccgccgtgggaaagctgctcgacaacctcaaccaggacgcaccggatacctaccattatgtggtgagcgaaccacttgggaggaattcctacaaggaaagatacctttttgtgtacagaccagatcaggtgtcggccgtggattcgtactactacgacgatggttgcgaaccctgtggaaacgatacgtttaacagagaacctgcaattgtgcggtttttctcgcgttttaccgaggtgcgggagtttgccattgtgccacttcacgcagcgcctggagatgccgtggcagaaatcgatgccctttacgatgtgtacctcgacgtccaggaaaagtgggggctggaagatgtgatgcttatgggcgacttcaacgccgggtgttcttacgtcagaccttcccagtggagctccatcagactttggacttcaccaacgttccagtggctgatcccagattcagcagatactactgcaactcctacccattgcgcgtacgatcgtatagtggtggccgggatgttgcttaggggagcagtggtcccagactcggctctgccatttaactttcaggcagcatacgggttgtccgatcagctggctcaagccatttcggatcattacccggtggaagtgatgctgaag

SEQ ID NO: 10607 - DNA, 846 bp, synthetic construct
  misc_feature 1..846: note = source = /note="Description of Artificial Sequence: Synthetic coding sequence"
  source 1..846: mol_type = other DNA
atgcgcggtatgaaactgctgggggcactgctcgcactcgctgccctgctgcagggtgccgtgagcctgaagatcgccgctttcaacatccagactttcggcgaaactaagatgtcgaacgcaaccttggtcagttacattgtgcaaatcctctcgcggtacgatatcgcactggtgcaggaagtgcgggactcacatctcacggccgtgggaaagctcttggacaatctcaaccaggacgcccccgacacttaccattacgtggtgtccgaaccgctcggaaggaattcgtacaaagaacggtacctgttcgtgtatcgcccagaccaggtgtcagcggtggattcctactattacgacgacggatgcgaaccatgcggaaacgatactttcaatcgggagccagccatcgtgcgcttcttctccagattcactgaggtgagggaattcgccatcgtgccactgcatgccgcaccaggagacgcggtggctgaaattgacgctctgtacgacgtgtacctcgacgtgcaagagaagtggggacttgaggatgtgatgttgatgggcgacttcaatgccggttgcagctacgtgcggccgtcgcagtggtcgtccatccgcctgtggactagcccgaccttccagtggctgattccggacagcgccgacaccaccgctaccccgacccactgcgcatacgacagaatcgtggtggccgggatgcttcttaggggcgcggtggtgcccgactcggccctgccattcaacttccaagcggcctacggattgtcggatcaactggcgcaggcgatctcagaccactacccggtggaggttatgctcaag

SEQ ID NO: 10608 - DNA, 846 bp, synthetic construct
  misc_feature 1..846: note = source = /note="Description of Artificial Sequence: Synthetic coding sequence"
  source 1..846: mol_type = other DNA
atgagaggaatgaagctccttggcgccctccttgccctcgctgctcttctgcagggagccgtaagcctgaagatcgccgccttcaatatccaaacattcggtgagaccaagatgtccaacgctacattggtttcatacattgtacagatcctgtcaaggtacgacatcgccttggtgcaggaagtgcgtgacagtcaccttacagcagttggaaaactcttggataatctgaaccaggacgcccctgacacatatcactatgtggtctccgaaccacttggtcgtaattcatacaaggagaggtatctgttcgtctacagaccagatcaagtatcagcagttgattcttactattacgatgacggctgtgaaccttgcggtaacgatacctttaaccgcgagcctgctattgtgaggttcttctccagattcactgaagtccgtgaattcgcaatcgtccccctccatgccgccccaggcgatgccgtagcagagattgatgccctttatgatgtttacctcgatgttcaggaaaaatggggtctcgaggacgtcatgcttatgggtgacttcaacgctggctgttcttacgtccgcccaagccaatggtcttctatccgtctgtggacttctcccacttttcagtggctgatacctgacagcgctgataccaccgctaccccaacccactgcgcatatgacagaattgtagtagccggcatgctgctgcgtggtgctgtagtcccagactcagcactccccttcaattttcaggcagcttacggactgtcagaccagctggcccaggctatctccgatcactacccagtcgaagtaatgcttaag

SEQ ID NO: 10609 - DNA, 846 bp, synthetic construct
  misc_feature 1..846: note = source = /note="Description of Artificial Sequence: Synthetic coding sequence"
  source 1..846: mol_type = other DNA
atgaggggaatgaagctgcttggtgcgctcctggcactggcagccctcctgcaaggagccgtgtccctgaaaattgcggcctttaacatccaaacctttggtgaaactaagatgagcaacgccacgctcgtgtcgtacatcgtccagattctttcccgctatgacatcgccctcgtgcaggaagtgagagattcgcatctgaccgctgtcggaaaactgctggacaatcttaaccaggatgcgccggacacttaccattacgttgtgtcagagcctctgggccgcaactcgtacaaggaacgatacttgtttgtttatagaccggatcaagtcagcgcagtggactcctactactacgacgacggatgcgaaccttgtggaaatgataccttcaatagggagcctgcgatcgtccggttcttctcacgcttcactgaggtgcgggaattcgcaatcgtgcccctccacgcagctccaggcgacgcagtggctgaaatcgacgcgctgtacgacgtgtacctggatgtccaggagaagtggggactggaggacgtgatgctgatgggggatttcaacgctgggtgcagctacgtccggccatcccagtggagttcaattcgcctctggacctcgccgactttccagtggttgatcccggacagcgccgacactaccgcgacgcccacccactgcgcctacgatagaatcgtggtggccggcatgttgctgcggggcgccgtggtgccggattctgccctcccattcaacttccaggctgcgtacggattgtcggatcagctggcccaagccatctccgaccactacccggtggaagtcatgctcaag

SEQ ID NO: 10610 - DNA, 846 bp, synthetic construct
  misc_feature 1..846: note = source = /note="Description of Artificial Sequence: Synthetic coding sequence"
  source 1..846: mol_type = other DNA
atgcgagggatgaagctcctcggggccttgctggccctggccgccctcctgcagggcgcggtgagcctcaaaatcgccgcattcaacattcagaccttcggagaaactaagatgtcgaacgcgaccctcgtgtcatacatcgtgcagatactgtcacggtacgatatcgccctggtccaggaggtgagagattctcatctgaccgccgtgggcaagttgcttgataacctgaatcaggacgccccagatacctaccactacgtagtctcagagcccctgggaagaaacagctacaaagaacgctacttgttcgtgtacagacctgaccaagtgtccgcagttgattcatattactacgacgatggatgtgaaccttgcggtaatgacacgttcaatcgagaaccggcaatcgttcggttcttcagccgctttactgaggtgcgggagtttgctatcgtcccgcttcacgcagctccaggagacgcggtggcagaaatcgacgcgctgtatgacgtctatctggacgtgcaggaaaagtggggactggaggacgtcatgttgatgggtgacttcaacgctggatgcagttacgtccgcccctcccaatggtccagcatccgcttgtggacgtcaccaactttccaatggctgattccggattcggctgacactacggccacccctacccactgcgcttacgacaggattgtagttgcggggatgctcttgaggggcgccgtggtgccagattccgcgttgccgtttaactttcaagcggcttacggactttcggatcaactggcgcaagcgatcagcgatcattacccggtcgaggtgatgcttaag

SEQ ID NO: 10611 - DNA, 846 bp, synthetic construct
  misc_feature 1..846: note = source = /note="Description of Artificial Sequence: Synthetic coding sequence"
  source 1..846: mol_type = other DNA
atgcgggggatgaaactgctgggagcgcttttggcactggccgccctccttcaaggagccgtctcactcaagatcgccgccttcaacattcaaacgttcggagagacgaagatgtccaacgcgactctggtcagctacattgtgcaaattcttagcagatacgatatcgcgctcgtgcaggaagtcagggactcacacctgactgctgtgggaaaacttctcgataatcttaaccaagacgccccagatacctaccactacgtggtgtcggaaccgctcgggagaaacagctacaaggaacggtacctcttcgtgtaccggccggatcaggtcagcgcggtggactcgtactactacgacgatggctgcgagccatgtggaaatgacacctttaaccgggagccggctatcgtgcgattcttctccagatttacggaggtccgcgaattcgctatcgttcccctgcacgccgccccgggtgacgcggtggccgagatcgacgccctgtacgatgtgtatctcgatgtccaggaaaagtggggacttgaggacgtgatgctcatgggtgacttcaatgcgggctgctcatatgtgcggccctcgcagtggtcctcgatccgactctggactagcccgaccttccagtggcttatcccggactccgcggacactaccgccacccctactcattgcgcatatgatcgcatcgttgtggccggaatgttgctgcgcggcgcagtggtgccggactcagctctgcccttcaatttccaagcggcgtatgggttgtcggatcagctggcccaggcaatcagcgatcattacccggtggaagtgatgctgaag

SEQ ID NO: 10612 - DNA, 846 bp, synthetic construct
  misc_feature 1..846: note = source = /note="Description of Artificial Sequence: Synthetic coding sequence"
  source 1..846: mol_type = other DNA
atgcgagggatgaagctgttaggcgcactgttagctctggccgcattgttgcaaggcgcggtgagcctgaagattgccgccttcaatatacaaacctttggagagaccaaaatgagcaatgctacactcgtctcctacatagtccagattctgagcagatatgacatagccctagtccaggaggtgcgggactcccatctcaccgctgtggggaaattactggataacctgaatcaagatgcacccgacacctaccactatgtggtctcagaaccattgggtcgcaactcatacaaggaaaggtatctatttgtctacaggccagaccaggtgtcagcagtagattcctattactatgacgatgggtgtgaaccatgtgggaatgatacctttaatcgcgaacctgccatcgtgcgtttcttctcacggttcacggaagtgcgagaatttgccatcgtaccactccatgcagctccaggggacgcagtggccgagatcgacgccttgtacgacgtgtacctggacgtacaggaaaagtggggacttgaggacgtgatgttgatgggcgactttaacgcaggatgctcgtatgtccgaccctcacagtggtcttccattcgtctgtggacgtcaccaactttccaatggctgatcccagatagcgctgataccacagccacccctactcactgcgcctatgatcggatagtcgtagctgggatgctactgagaggagctgtcgtccccgatagcgcccttccatttaatttccaggccgcctatggtctcagcgaccagttggcccaggctatatctgatcactatcctgttgaagtcatgttaaag

SEQ ID NO: 10613 - DNA, 846 bp, synthetic construct
  misc_feature 1..846: note = source = /note="Description of Artificial Sequence: Synthetic coding sequence"
  source 1..846: mol_type = other DNA
atgcgggggatgaagctcttgggagctctgctggcacttgccgcactactgcagggggctgtgagcttgaagatcgctgcctttaatatccagacatttggcgaaacaaaaatgagtaatgccactctggtttcatatatagtccagattctcagtcggtacgatatcgctctggttcaggaagtgagagatagccacctaaccgctgtcggcaagctgctagacaaccttaaccaggacgctccggacacatatcactacgtcgtgagcgaacctctgggaagaaactcctataaagaacggtatctattcgtatatcgccccgaccaggtgtcagccgtagatagttattactatgatgacggctgcgaaccatgtggaaacgacactttcaaccgcgaacctgcaatcgtgcgctttttttcccgattcacagaggtccgagaattcgccatcgtgccgctccacgccgccccgggtgatgcagtagccgagatcgacgctttatatgacgtttacctggatgtgcaagagaaatggggactcgaagatgtcatgcttatgggcgactttaacgcagggtgttcctacgtgcgtccgagtcaatggtctagtatcagactctggacctcacctacatttcagtggcttatccctgatagcgcggacactacagccactcccacccactgcgcgtacgatcgcatagtcgtcgctggcatgctgctccgtggcgccgtggtgcctgacagcgccctgcccttcaatttccaagctgcttatggcctcagcgaccagttggcacaggccattagtgaccactaccccgtggaggtcatgctcaag

SEQ ID NO: 10614 - DNA, 846 bp, synthetic construct
  misc_feature 1..846: note = source = /note="Description of Artificial Sequence: Synthetic coding sequence"
  source 1..846: mol_type = other DNA
atgcggggaatgaagcttctcggagccttattggcgctagcagctctattacaaggagctgttagcctgaagatcgctgccttcaatatacaaacgttcggagagaccaaaatgtcgaacgcaacattagtatcttatatcgttcagattcttagtcggtacgatatcgccctagttcaggaggtaagagattcacatcttaccgcggtggggaagctcctggataacctaaatcaggatgcacctgacacctatcattacgtcgtctcggaaccactgggcaggaattcttataaagagcgttacttgttcgtttacagaccagatcaggtcagcgcagtcgactcctattactatgatgacgggtgtgaaccgtgcggcaatgataccttcaaccgcgaacctgcgatagtccgattcttcagccgttttaccgaagtacgcgagttcgcgattgtgccgttgcacgcggccccgggtgatgcagttgcggagattgacgcattgtatgacgtatacctagacgtgcaagagaagtggggattagaggacgttatgttgatgggcgactttaacgctggatgttcatacgtacgcccctcccagtggtcctctatccgcttgtggactagtcccacgtttcaatggctgatccccgactccgcagacacgacggcgacgccaacacattgcgcatacgatagaatcgtcgtcgccggaatgctcctccgaggtgctgttgtcccagactcagccctgccattcaactttcaggccgcatacggactgtctgaccaactggcgcaggcaatttccgatcattatccagtcgaagttatgctgaaa

SEQ ID NO: 10615 - DNA, 846 bp, synthetic construct
  misc_feature 1..846: note = source = /note="Description of Artificial Sequence: Synthetic coding sequence"
  source 1..846: mol_type = other DNA
atgcggggaatgaaactcttgggagcgttgctcgccctggccgcgctgctgcagggggccgttagtttgaagatcgccgcatttaatatccaaacctttggcgaaaccaaaatgagcaacgccacattagtctcctacatcgtccagattctgtctagatacgatattgccctcgtgcaggaggttcgcgactcgcaccttactgccgtgggcaaactcctcgacaaccttaaccaggacgcaccagacacttaccactatgttgtgagtgagcccctgggtcgaaacagctacaaggaacggtatttgtttgtgtacaggcccgatcaggtgtctgcggtggactcctattactacgatgatggctgtgaaccctgtggcaacgacacctttaacagagagcctgctatcgtgcgcttcttctctcggtttaccgaagttagagagttcgcaatagtccctctccacgccgcccctggggacgctgttgccgagatcgatgccctctatgacgtttatttagatgtgcaggaaaagtggggtctggaggacgtcatgctgatgggtgacttcaatgcgggatgttcttatgtccgtccttcccaatggtcatcaatacgcctctggacctcccctacttttcaatggttgataccagattctgcagataccacggcaacccctacccactgtgcctacgaccgcatcgttgtagccgggatgctgctgagaggcgccgtagttcctgattctgcacttcctttcaactttcaggctgcctatgggttgtcagaccagcttgcacaggccataagtgatcactacccggtggaggttatgttaaag

SEQ ID NO: 10616 - DNA, 846 bp, synthetic construct
  misc_feature 1..846: note = source = /note="Description of Artificial Sequence: Synthetic coding sequence"
  source 1..846: mol_type = other DNA
atgaggggaatgaaactgctgggggccctcttagcacttgccgccctgttgcagggcgcggtaagtctaaagattgctgctttcaacatccagaccttcggggagacgaagatgtcaaacgctactttggtgtcctacattgtgcaaattttgagcaggtacgacattgccctggttcaggaggtgagagatagtcaccttacggccgttggcaaactgctcgataacctgaaccaggatgccccggatacctaccactacgtcgtgtcagagcccctgggtaggaatagttataaggagagatacttgttcgtctataggccagaccaagtgtctgccgtcgactcatactattacgacgatgggtgcgaaccttgcggcaatgatacgttcaatcgggaaccagccatagtgaggttcttttcaaggtttactgaggtccgggagtttgcaatcgtgcccctgcacgcagctccaggtgacgcagtagcagagatcgatgccctgtacgatgtatatctggacgttcaagagaagtggggcctagaagacgttatgctcatgggggattttaacgctggctgcagttacgtgcggccatcgcaatggtcttccattcgcttatggaccagcccaaccttccaatggttgatcccggatagtgccgacacaaccgccactcctactcattgcgcgtatgataggatcgttgtggctggcatgctgctccggggtgccgttgtgcctgactcagcacttccatttaactttcaggcagcgtatggcttaagtgaccaattagcgcaggccatctcggatcactatccagtggaggtgatgctgaag

SEQ ID NO: 10617 - DNA, 6243 bp, synthetic construct
  misc_feature 1..6243: note = source = /note="Description of Artificial Sequence: Synthetic coding sequence"
  source 1..6243: mol_type = other DNA
atgctctgttgtttgctggtcagagcctccaacctgccttccgcaaagaaagaccgcaggagcgatccggttgctagtctgacgtttcggggcgtgaaaaagaggacaaaagtgattaaaaatagcgtgaaccccgtttggaacgagggtttcgagtgggacctcaaagggattcccctcgaccagggcagcgaacttcatgttgtagttaaagaccatgagacaatggggcgaaaccggttccttggcgaggctaaagtacccctgagggaagtcctggcaacaccatccctttccgccagtttcaacgccccgcttctggacacgaagaaacagcctactggcgcttctttggtgctacaagtgagctatacccccttgccaggagccgtacccctgttccccccccctacgccactggagccatctcctacactacccgatcttgacgtggtggcggatacaggaggcgaggaggataccgaagaccaggggttgacgggtgatgaggcagaacccttcctcgaccagtccggcggccccggcgcccccaccacccctcggaagctacctagccggccacctccgcactaccctggcataaagcgcaagcggtcggcacccacttctcgaaaactcctgtccgacaaaccgcaagacttccagatccgggttcaagtgattgaaggccgccagcttcctggcgtcaatattaagcctgtcgtgaaagtcaccgccgctggccaaaccaaaagaacaagaatccacaaaggcaattcacccttgttcaacgaaacgctattcttcaacctgttcgactcaccaggcgagctcttcgatgaaccaatctttatcacagtagtggattcgcggtcactccggactgatgccctgctgggagaatttcggatggatgtcgggaccatctatagagaaccgcgccacgcttaccttcggaagtggctactcctgtctgatcccgacgatttttcagccggcgcaagagggtacttaaaaaccagtctgtgcgtactagggcctggcgatgaagcccccctggagagaaaggacccgagtgaggataaagaggatatcgaaagcaacctactgcgtcccaccggcgtggctctccggggagcacatttctgtctgaaagtctttcgtgcggaggatctcccccagatggatgacgctgtgatggataacgtcaaacagatcttcggctttgaaagcaataaaaagaacttagtggatccctttgtagaggtgtcgttcgctgggaaaatgctgtgttctaagattctggaaaaaactgccaatccacagtggaatcagaacataaccctgccagctatgtttccgtctatgtgcgaaaagatgcggatccgaattatcgattgggacagactcacacataacgacattgtcgctacgacttatcttagtatgtccaagatctcagcgcctggaggggaaattgaggaggagcccgctggcgccgtgaagccatccaaagcgagcgacctcgacgactacctcggttttctccctaccttcggaccctgctatattaatttgtacggaagtccccgcgagttcaccggatttcctgacccttatacagaactgaacacaggtaagggcgagggagtggcctataggggccggcttttactgagtttggaaactaaactggttgaacactcggaacagaaggtagaggatcttcctgccgatgacatcctgagagtggaaaagtacctgcgcaggaggaagtatagtttatttgccgccttttattcagcaacaatgctgcaggacgtagacgatgccattcagtttgaggtatccatcggcaactatgggaacaaattcgacatgacgtgccttccactggcgagtaccacacaatatagtagggctgtcttcgacggctgtcactactactatctcccatggggtaacgtgaaacctgtggtcgtgctgtcatcttattgggaggatatctcacaccgtatagagacccaaaaccagctactgggaatagcagataggttggaagcaggcctcgagcaggtgcatcttgccttaaaggcacagtgttccactgaggacgtggatagtctggtagcacagctcacggacgaacttatcgcagggtgctctcagcccctgggggacatccacgagaccccatccgcaacacatcttgatcagtatctttatcaactgagaacccatcacctatcccagattacagaggccgctctggcgctcaaactgggtcatagcgagttgccagccgcccttgaacaggcagaagactggctgctcaggttgagagccctggccgaggaaccccaaaattccctcccggatatagtgatctggatgctccaaggggataaacgggtggcttatcagcgagtccctgctcaccaggtgcttttctctaggaggggagctaactactgcggtaagaattgcggcaaattgcagacgatatttttgaaataccctatggaaaaagtaccaggagcgcgcatgccagtccaaataagggtgaagctgtggtttggactcagtgtggacgaaaaggagtttaaccagttcgcagaggggaagttgagtgtgtttgccgaaacctacgagaatgaaaccaagttggctctagtgggaaattggggtaccactgggctaacttatccaaagttttctgacgtgaccggcaagatcaaactgcccaaagactctttccgcccaagtgctggttggacatgggcgggcgactggttcgtttgcccagagaagacattgttgcacgatatggatgcgggacacttgtcattcgttgaggaggtgttcgagaaccagacacgcctcccagggggtcagtggatttatatgagcgataattacacggatgttaatggagagaaagtgctccctaaggatgatatcgagtgtccgctcggttggaagtgggaagacgaggagtggtcaactgatctcaatagagctgtggacgagcagggatgggagtatagcataacaatccccccagagagaaaaccgaaacactgggtccccgctgagaaaatgtattacacccaccgccgaaggaggtgggttagactgcgacgacgtgacctctctcaaatggaggcgctgaaaaggcaccgacaggcagaggccgagggtgagggatgggaatatgccagtttattcggctggaaattccacctggagtacaggaaaacggatgcattccgacgtcgacgctggaggcgccggatggagccactggagaagacgggacccgcagcggtctttgcgcttgagggggctctcggaggggttatggatgataagtcagaggacagcatgtccgtctcgacactctcctttggagtgaacaggccaaccatcagctgcatttttgattatggcaaccgatatcatttgcggtgctatatgtatcaagctagagacctggccgccatggacaaagacagcttctccgacccttatgccattgtgagtttcctgcatcagtcacagaagactgtggttgtcaaaaatacactgaacccgacgtgggaccaaacgttaattttctacgagatcgaaattttcggcgagcctgcgacagtggctgaacagcctccatctatagtagttgagctgtacgaccacgatacatatggagccgatgaattcatggggcgttgtatatgccaacctagccttgagcgcatgcctcggctggcctggttccccctgacccgagggagccagcccagcggggagctcctggcttcattcgagctgattcaaagagagaagccagcaatccaccacataccgggtttcgaagtccaggaaacttccaggatcctggacgaatcggaagacacagatctgccatatcctccaccacagcgagaggccaatatttatatggtaccccaaaacattaagcccgcgttgcaacggaccgcgatagagatccttgcttgggggttgaggaacatgaagtcctatcagctcgcaaatatatcatcaccttctctggtcgtggagtgcggaggtcaaaccgtacagagttgcgtcattcggaatctgagaaaaaatcctaactttgatatctgcacgttgtttatggaagtgatgttaccacgcgaggaactgtattgtcccccaattaccgtgaaggtgatagataaccggcagttcggtcgacgtccagtggtgggacaatgcacaattcgctcgctcgagagcttcttgtgtgatccttacagtgcagagagcccctctccccagggcggacctgatgacgtctctctactgtctccaggggaagatgtgctgatagatattgatgacaaggagcctctgatccccatccaggaggaggagtttattgattggtggtcaaagttcttcgcttctatcggcgagagggaaaagtgcggctcttaccttgaaaaggactttgacacacttaaagtatatgacacccaactagagaacgtggaggctttcgaggggctgagtgatttctgcaacaccttcaagctatacagaggtaaaacccaggaggagaccgaggatcctagcgtgattggtgagtttaaaggtcttttcaagatctatccactccccgaagatcccgctatcccgatgccaccccgacaattccaccagctggccgcccagggtccgcaggagtgcctggtcagaatctatattgtgagagctttcggcctccagcccaaagatcctaacggcaagtgcgacccgtatatcaaaatcagtatagggaaaaagtcggtttcggaccaggacaattacattccttgtactctcgaacctgttttcggtaagatgtttgagttaacatgcacactccctctggagaaagacttgaaaattactttatatgattatgacctgcttagtaaagacgagaagattggagagacagttgtggacctggagaatcgactcctcagcaagttcggagctaggtgtgggctgccccaaacctactgtgtgtccgggcccaaccagtggagggatcagctgcgacccagccaactgcttcacctgttttgtcagcaacacagagtgaaagctcctgtctaccggacggacagagtgatgttccaggacaaggagtatagtattgaggagatcgaagccggccgtatcccaaatcctcatcttggaccagttgaagagcggttggccctacacgtgttgcagcagcagggtttagtgcccgaacatgtcgaatccagacccctatacagtccactgcagccagacatcgagcaggggaagctgcagatgtgggtagatctctttccaaaggctctggggcgccccggtccaccgtttaacatcactccaaggcgcgcccgccggttcttcctacgctgtatcatctggaacacccgagatgttattctcgacgatcttagcctgacaggtgagaaaatgagtgacatctacgtgaagggatggatgattggctttgaggaacataaacagaagacagacgtgcactataggtctttggggggtgagggcaattttaactggcgattcatatttcccttcgattatttgcctgcagaacaggtttgcactattgcgaaaaaggatgcattttggaggttagacaaaacggagagcaaaattcccgccagagtagtgttccagatctgggacaatgataagttctcattcgacgatttcttggggtcccttcagcttgatttaaacagaatgcctaaacctgcaaagaccgcaaaaaagtgctccctagaccaactggatgatgcttttcacccagagtggtttgtgagcctgtttgaacagaagaccgtcaaagggtggtggccctgtgtagcagaagaaggcgagaagaagatcttagcaggcaagttagagatgacattagagatcgtcgccgagtctgagcacgaggagcgcccagccggccagggaagggatgaacccaatatgaacccaaagctggaggacccccggaggccagatacatcctttctctggttcacaagcccttacaagaccatgaaatttatactttggaggcgctttcggtgggcaataatcttattcattatcctgttcatactgctactgttcctggccatttttatctacgcctttccgaactacgcagctatgaagctggtgaagccgttctcc

SEQ ID NO: 10618 - DNA, 6243 bp, synthetic construct
  misc_feature 1..6243: note = source = /note="Description of Artificial Sequence: Synthetic coding sequence"
  source 1..6243: mol_type = other DNA
atgctgtgctgtcttcttgtgagagccagtaacctacctagtgccaagaaggatcggcgatcagatccggtggcttctctgaccttccgtggtgtcaagaagcgaaccaaggtgatcaagaattctgtcaaccccgtgtggaatgaggggtttgaatgggaccttaaaggcattccgttagaccaggggtctgagctacacgtggtggtgaaggaccacgagaccatgggccgcaaccgatttctgggtgaggccaaagttcctttgagggaggtgctggctactccctccctttctgccagcttcaacgcccccctgctggacactaagaagcagcctaccggggctagcctcgtcctgcaggtctcctatacccctctcccaggagcagtgccattatttcccccacccaccccccttgagccctctccaacgttgcctgacctggacgtcgtggctgacacgggcggggaggaggatacagaggatcagggtcttacaggggacgaagccgagccattcctggaccagtccgggggccccggggctcctaccactcctaggaagcttccgtccaggcccccgccccattaccctgggattaagaggaaaagaagtgcccccacgtctaggaagttgctttccgataagccgcaggatttccagattcgagttcaggtcatcgaagggcggcagttacccggcgtgaatatcaaacctgtggtgaaggtaactgccgccgggcagacaaagcgtaccaggattcacaaaggaaattcccccttgtttaacgagacactctttttcaatttgttcgactcaccaggggagctgtttgacgagccgatctttattaccgtcgtcgactcccggtctcttagaactgatgccctgctcggagagttccgcatggatgtgggcacgatctaccgggagccaagacacgcttacttgcgcaagtggctcttgctgtctgatcctgacgacttctccgcaggggcccgaggttacctaaagaccagcctgtgtgtgttggggcccggcgatgaggccccccttgagcgcaaggatcctagcgaggataaggaagacatagaatcaaatctgctacggccaaccggtgtggccctgcgaggggcccatttctgcttaaaggtcttccgggccgaagatctgccgcagatggatgatgcagttatggataatgtcaagcaaatcttcggtttcgagagtaacaaaaaaaacttggtcgacccatttgtcgaggtatcttttgctggaaaaatgttgtgttccaaaatattggagaaaaccgccaatccacagtggaaccagaacattacattgcctgcgatgttcccctccatgtgcgagaaaatgcgcattaggatcatcgattgggacaggctgactcataacgatatcgtggccaccacctatctgtccatgtctaagatctcagcgcccggaggcgagatcgaggaggagccagccggggccgtgaagccttccaaggcctctgacctcgacgattacctgggctttctgccgacatttggtccctgttatataaacctttatggaagccctagagaatttacaggattccccgacccctacaccgaattgaacacagggaagggggagggagtcgcctaccggggtcggctcttgctctcactggagactaagcttgtggaacacagcgaacagaaagtggaggatctgccagccgatgacatattacgcgttgagaagtatctccgccggagaaaatactccttgtttgccgcattttactctgccactatgcttcaggatgtggacgacgcaattcagttcgaagtctcgatcggaaactacggcaataagtttgacatgacatgcctgcccctcgcgtccaccacacagtattcgagggcagtattcgatggttgtcactattactacttgccttgggggaatgtcaagcctgtggtcgtcctttcctcgtattgggaggacatctctcatcgcatagagacacagaaccagctgctggggatagctgatcgactggaggcgggtctcgaacaggtccacctggcccttaaagcccagtgcagcactgaggatgtcgatagtctggtcgcccagctgacggatgagcttatcgccgggtgctctcaacccctgggggacatacacgagactcctagtgcaacgcatctcgatcaatacctgtatcagctgcggacacaccatctatcccagataacagaggcggcattggcccttaagctagggcacagcgagctgcctgctgcactcgaacaggccgaagattggctgttgaggctgcgggctctagccgaggagcctcagaattctctccccgacatcgttatctggatgcttcaaggagataagcgcgtggcctaccagcgcgttcctgcacaccaggttctgttttcacgccggggtgcgaattactgcgggaagaactgtgggaagctgcagacaatttttctgaagtaccctatggagaaggtgcctggggctcgaatgcctgtgcagatccgagtgaaactctggttcggtctgagcgtggacgagaaggaatttaatcagtttgctgaaggcaagttatcagtgttcgccgagacctatgaaaacgagacaaagctggcgctcgtaggcaactggggcaccacagggctcacttaccctaaattctcagacgttacagggaagatcaagctgccgaaggattccttcaggccttcggctggctggacctgggccggggactggttcgtctgtcctgagaagactctactgcacgacatggacgcagggcatctgagtttcgtggaggaagtctttgaaaaccagacacgcctgcccgggggacagtggatttatatgtccgacaactacacagacgttaacggagagaaggttctgcctaaggatgatatcgagtgccccctgggctggaagtgggaggatgaggagtggtccactgacttgaatcgcgcagtagatgagcaggggtgggagtactctatcactattcctcccgagcgcaagccaaagcattgggttcctgcagagaaaatgtattacactcataggagacgtagatgggttaggttacgtagaagggatctgtcccagatggaagccttgaaacggcatcgacaggccgaagctgagggggagggctgggagtatgccagtctgttcggctggaagttccacctcgagtatcgcaagaccgatgcattcaggcggagaaggtggagaagaaggatggagccattggagaagacaggacccgccgcggttttcgcactggagggcgcactggggggggtgatggatgataagagcgaggacagtatgtccgtgtcaacgctgtctttcggggttaatagaccaaccattagctgtattttcgactacggaaaccggtatcatctgcggtgctacatgtaccaggcaagagacctggcagctatggacaaggactcattctctgacccatatgccattgtttcattcctccaccagagccagaaaactgtggtcgtaaaaaacacactgaaccctacctgggaccagaccttgatcttctatgagattgagattttcggagaacccgcaactgtggctgagcagcctccttcaatcgttgtcgaattgtacgaccacgatacatatggtgcagatgagttcatgggaaggtgtatttgtcaaccatctttagagcgcatgccccgactagcctggttccctctgactaggggctctcagccctccggtgagcttctggccagcttcgaactgatacaacgcgaaaaacctgccattcatcatatccccggattcgaggtccaggaaacctcgaggatcttggatgagtctgaggacactgacctgccctacccacccccacagcgcgaggcgaacatctacatggtgcctcaaaacattaagcctgcccttcagaggaccgccattgaaattctcgcctggggccttaggaatatgaagagctatcagttggccaatatttcttctccgtccctggttgtagagtgcgggggccagactgtgcaatcttgcgttattcggaacctcaggaagaaccctaatttcgacatttgcactctgttcatggaagtgatgttacctcgtgaggaattgtattgcccccctatcaccgtgaaggtgatcgacaacagacagtttggcagacggcctgtcgtgggacagtgtactatccgctccctggagtcattcctgtgtgacccctatagcgcggagtcccccagcccccagggcggtccagacgacgtgtccttgctgagccccggcgaggacgtactgatcgacatcgacgacaaggagccactcattccaattcaggaggaggagttcattgactggtggtctaaatttttcgcgtccataggggaacgtgagaagtgcgggagttaccttgagaaggacttcgacactctcaaggtgtacgacacacagctcgaaaatgtggaagcttttgagggcctttccgacttctgtaatacttttaagctgtacaggggcaaaacacaagaagagacagaggacccttcggtgatcggcgaattcaagggcctttttaagatatacccgctgcccgaagaccctgcaatccccatgcctcccaggcaatttcaccagttggccgcacagggcccacaggagtgtctcgtgcggatttatattgtgagagcgtttgggctccagccaaaagatccaaatggtaagtgtgatccgtatatcaaaatctctattggcaaaaagagtgtgtctgatcaagacaattatatcccgtgtacactggagccggtgttcggcaagatgtttgaactgacctgtacactgccactggaaaaggatctcaaaattaccctctatgactacgatctgttatcgaaggacgaaaaaattggggagaccgtcgtggatctggagaaccgattactcagcaagtttggggctcgatgcggcctcccgcagacgtactgtgtgtcaggtcctaatcagtggcgcgaccagctgcgcccttcccaactgctgcacttattttgccagcagcacagggtgaaagcccctgtttatcggacggatcgcgtcatgttccaggataaggaatacagtatcgaggagatcgaagctggtaggattcccaacccccacttggggcccgtggaagagcggctggccctgcacgtcctgcagcagcagggtctcgttccagaacatgtggaatcgagaccactctactcccctctgcagccggatattgagcagggcaagttgcagatgtgggtggatctgttccctaaggccctcggtaggccaggaccccctttcaatataaccccaaggagagcaaggagattctttctgaggtgcataatctggaacaccagagatgttattttggatgatttgtctctcacgggggaaaaaatgtccgacatttacgtcaagggctggatgattggtttcgaagagcataagcagaaaactgatgtgcactataggagccttggtggcgagggaaacttcaattggcgcttcatcttccccttcgactatctcccagctgagcaggtgtgcactatagcaaaaaaggacgcgttttggaggctggacaagaccgaaagtaaaatcccagccagagtggtgtttcagatctgggacaatgataagttttcttttgacgacttcctgggcagtcttcaactagacctcaaccggatgcctaaacctgccaagaccgcaaagaaatgttccctcgaccagctggacgacgcttttcatcctgagtggttcgtgtccctgttcgagcagaaaactgtgaaagggtggtggccttgtgtggccgaggaaggtgaaaaaaagattttggccggcaaactggaaatgaccttagagatcgtcgccgaatccgagcacgaggagcgccccgcgggtcagggtagggatgagccgaacatgaaccccaagctggaagatccccgtcgccctgacacatccttcttatggttcacttccccatacaagaccatgaagtttatactgtggaggagatttagatgggcaataatactgttcattattctgtttatacttctcctgtttttggccatattcatttacgccttccccaattacgctgccatgaaactggtcaagccattcagc

SEQ ID NO: 10619 - DNA, 6243 bp, synthetic construct
  misc_feature 1..6243: note = source = /note="Description of Artificial Sequence: Synthetic coding sequence"
  source 1..6243: mol_type = other DNA
atgctgtgttgccttctggtcagagcatcgaacctcccatcggcgaagaaggacagaaggagcgatccggtcgcatccctgaccttccgcggtgtgaaaaagcgcacgaaggtcatcaaaaactccgtcaatcccgtgtggaatgagggcttcgaatgggatctcaaaggaattccactggaccaagggtccgaactgcatgtcgtggtcaaggatcatgaaactatgggccgcaatcggttcctgggcgaagcaaaggtgccactcagggaagtgcttgctactccttccctgagcgcatcgttcaacgcaccactgttggacaccaaaaaacaaccgactggagcgtcgctggtgctgcaagtgagctacactcctttgcccggagcagtgccgctctttccaccacctacccctctggagcccagccctactcttccagatcttgatgtcgttgcagacaccggaggagaggaagataccgaggaccagggattgactggagacgaagctgagccttttcttgatcaatcaggtggcccaggggcacctactacccctcggaagttgccctcccgcccgccaccccactacccaggaattaagcgtaagcgctcggcccctacctctaggaagctcctttcggataagcctcaagactttcaaatcagagtgcaagtgatcgaggggagacagcttcctggtgtgaacattaagcctgtggtcaaggtgactgctgcaggtcagaccaagaggactagaatccataaagggaactccccacttttcaatgaaacccttttctttaatctgttcgattcccccggtgagttgttcgacgagccaatcttcattactgtggtggactcaagatccctgagaaccgatgcactgctgggagagtttcgtatggatgtgggaaccatctaccgcgaaccacggcacgcctaccttagaaagtggctcctgcttagcgatcctgatgatttttcagcaggtgcacggggttacttgaaaacctcactgtgcgtcctgggacccggtgatgaggcaccacttgaacgaaaggatccttccgaggataaagaagatatcgaatcgaacttgctccgcccaactggtgtggcactcagaggggcccacttttgtcttaaggtgttccgagccgaagatctcccccaaatggacgacgcagtgatggataacgtgaagcaaatcttcggatttgaatccaacaagaagaacttggtggatccattcgtggaagtctcttttgctgggaagatgctgtgttctaagattctggagaaaacggccaatcctcagtggaaccaaaacataacgcttcctgcaatgtttccaagcatgtgcgagaaaatgaggatcagaatcattgactgggatagattgacgcataatgatattgtggcaaccacctacctttccatgagcaagatcagcgctcccgggggagaaattgaagaggaaccggcaggcgcggtgaagccctcgaaggcatctgatttggatgattacctcggatttctgcctacctttggtccttgttacattaacctgtacggctcaccaagggaatttaccggatttcccgatccatacaccgaactcaacactggcaagggtgagggtgtcgcctaccgcggacgactgcttctcagcctcgagacgaaactggtggaacactccgaacaaaaggtggaggatcttcccgcagacgatattctgcgcgtcgaaaagtacctgaggagaagaaagtatagcctttttgcagccttctactcagccactatgctgcaggacgtcgatgatgcaattcaatttgaagtctccattggaaattacggaaacaagtttgacatgacttgtctcccccttgccagtaccacccagtactcgcgcgcagtgtttgatggatgtcattactactacctgccatggggtaacgttaaaccagtggtggtcctgtcgagctactgggaagatatttcgcacagaattgaaacccaaaaccagctcctgggtattgcggatcgcctggaagccgggcttgaacaggtgcacctcgccctgaaggcccaatgctcaactgaggacgtggattctcttgtcgcgcagctgactgatgagcttatcgccgggtgtagccaacccctcggggatatccacgaaaccccaagcgcaacccatcttgaccaatacctgtaccaactccggactcatcacctctcgcagattactgaggcagccctcgcactcaagctggggcattcggaactgcccgcggcgctcgagcaggcagaggactggctgctgcgcctccgcgcactcgcagaagaacctcaaaattcgctgcctgacatagtgatctggatgctgcagggcgataagcgtgtggcgtaccaacgtgtgccagctcaccaagtgctttttagcagacggggagcaaactactgcggtaagaactgtggtaagctgcagacgatttttctgaagtacccgatggaaaaggtgccaggcgcccgtatgccagtgcagattcgggtgaaactgtggttcggactgtcagttgacgaaaaggaattcaaccagtttgcagagggcaaactgtcggtctttgcggagacttacgaaaacgagactaagctggcccttgtgggaaactgggggaccactgggctgacttaccctaaattctcggatgtgaccggaaagatcaagctgccaaaggattctttcaggccttcagcaggctggacttgggcaggtgactggtttgtgtgtcccgaaaagaccctgctgcatgacatggatgccggccaccttagcttcgtggaggaggtattcgagaatcagaccaggttgccaggaggtcaatggatctacatgtcggacaactacactgatgtgaatggcgaaaaggtgttgccaaaagatgatattgagtgccctcttggatggaagtgggaagatgaggaatggagcaccgatttgaatcgggcagtcgatgaacagggttgggaatatagcatcaccattccacccgaaagaaaaccaaaacattgggtgccagcagaaaagatgtactacactcaccgaaggcgcaggtgggtcagacttagacggagagacttgagccaaatggaagcactgaagcggcaccgacaagcagaagctgaaggggaaggatgggaatacgcgtcgctctttggctggaaatttcatcttgaatacagaaagactgatgcattcagaaggcgacgttggagaaggagaatggagcctcttgaaaagactggacctgcggcagtgtttgcactggaaggtgcactgggaggtgtcatggatgataagagcgaggattcgatgtcggtgagcaccctgtcatttggcgtgaacagacctaccataagctgtatctttgattacggtaacaggtaccatctgagatgctacatgtatcaggcacgggaccttgcagcgatggacaaggattcgttcagcgatccttatgcgatcgtgtcatttctgcatcaatcgcagaaaactgtggtcgtgaagaacaccctgaatccaacttgggaccaaaccttgatcttttatgaaattgagattttcggtgagcctgccactgtggcagaacagcctccgtcgatagtagtggagctgtacgatcacgacacctacggggcagacgaattcatgggaaggtgcatatgccaaccgagcctcgagagaatgccacggcttgcgtggtttcctctcactcgcggttcgcaaccttcaggagagttgctcgcatcattcgagctgattcagcgggaaaagcccgcaattcatcatattcccggattcgaagtgcaggagacttcgcgcattttggacgaaagcgaagatactgacctgccctacccacctccacagagggaggcaaatatctatatggtgcctcagaacataaagcctgctctccagcggaccgctatagaaattctggcatgggggcttcggaatatgaagtcgtaccaactggctaacatcagctccccttccctcgtcgtggagtgcggtggtcaaaccgtgcagagctgtgtcatcaggaacctgcgtaaaaacccaaactttgatatctgcaccctgtttatggaagtgatgctgccgcgagaagagctgtactgccctcccattaccgtcaaggtgatcgacaaccgacagttcggacggcgccccgtcgtgggtcagtgcactattagaagccttgaatcatttctgtgcgacccttactcggcagaatcacctagccctcaagggggaccagatgacgtctcacttctctcccccggcgaagatgtgcttatagatattgatgataaggagccattgattccaatacaggaggaagaattcattgactggtggtcgaagttttttgcatcgatcggcgaacgggagaagtgtggaagctaccttgaaaaggactttgacaccttgaaggtgtacgacactcagctggagaatgtcgaggcatttgaaggactctcggacttttgtaacacttttaagctgtacagaggaaagacgcaagaagaaactgaagatccatcagtgatcggagagttcaaaggtttgtttaagatttacccactgccggaagatcccgccattccaatgcctccaaggcaattccatcaactggcagcacaaggtccgcaggaatgcctggtgcgtatttacatcgtgagagcatttggcctccagccgaaagatccgaacggcaaatgtgatccttacatcaagattagcatcgggaaaaagtcggtgtctgatcaggacaactacattccctgtactctggaaccggtgtttggcaagatgttcgagctcacctgtactctgcctctggaaaaggatttgaagataaccctttacgattatgatcttctgtccaaggatgaaaagattggcgagacggtggtggatctcgagaatcgccttctctcgaaatttggcgcaaggtgtggccttccccagacgtactgtgtgtcgggacccaaccaatggcgagatcagctgcgaccctcccagctcttgcatctcttttgccaacaacatcgcgtgaaggctccggtgtaccgcaccgatagggtgatgtttcaggataaggagtacagcatcgaagaaatcgaggcaggtagaattcctaatccccacctgggaccggtggaggaacgtcttgcactgcatgtcttgcaacaacaagggctggtgccagaacatgttgaaagcagacctttgtactcgccacttcaacctgatattgaacaaggcaaattgcagatgtgggtcgacctgttcccgaaggctctcgggcgcccaggtcctccttttaacattaccccaaggcgcgcgagaagattcttcctgcggtgtattatctggaacacccgagatgtgatcctcgatgacctgtcgcttactggggagaagatgtccgatatctacgtcaagggctggatgattggatttgaagaacacaagcaaaaaaccgatgtgcactacagatcactgggaggcgagggcaatttcaactggagattcatctttcccttcgattaccttcctgcagagcaggtgtgcaccattgcaaagaaggatgcattttggcgcctggataaaaccgagtctaagatccctgcgagagtggtgtttcaaatctgggataacgacaagttctctttcgatgattttctgggatccctccagcttgaccttaatcgcatgcccaaacctgcaaagacggctaagaagtgttcccttgatcaacttgacgatgcatttcacccagaatggttcgtgtctctgtttgaacaaaagactgtgaagggctggtggccctgtgtcgccgaagaaggggagaaaaagattctggcaggaaaacttgagatgacgcttgaaattgtggcagagtccgagcatgaggaaagacctgccggacagggacgagatgaaccgaacatgaatcctaaacttgaagatccacgaaggcccgacacctccttcctttggttcacctcgccttacaaaactatgaagtttattctgtggaggcggtttagatgggcaattatcttgtttatcattttgttcattctgctcctcttccttgccatctttatctacgctttcccaaattacgccgcaatgaaacttgtgaagcctttctcg

SEQ ID NO: 10620 - DNA, 6243 bp, synthetic construct
  misc_feature 1..6243: note = source = /note="Description of Artificial Sequence: Synthetic coding sequence"
  source 1..6243: mol_type = other DNA
atgctctgttgcttattggtgagggccagcaacctgccatccgcgaagaaagatcgcaggagcgatccggtggccagtctgacattccgcggagtcaagaagagaacgaaagttatcaaaaactctgtcaatccggtctggaacgagggctttgaatgggacttgaaaggaatacccctggatcagggctcagagctgcatgtcgtggtgaaagaccatgagacaatgggtagaaacaggttcctgggagaagccaaggttccacttcgggaggtccttgctacgccgtcactgtctgcatcatttaacgcacctcttcttgataccaagaaacagcccacaggggctagcttagtcctgcaggtgtcctacactcccctccctggcgccgtgcctctctttccccctccaacccccctggaaccatctcccaccctcccagacttggacgtggtagccgacactggaggagaggaggacaccgaggatcagggattgaccggagacgaggccgagccttttctagaccagagcggcggccctggcgctccaacaaccccacgaaaattgcccagcaggcctcctcctcactatcccggtataaagagaaagagaagtgctccgacaagcagaaaattgctgtccgacaaaccacaggactttcagattcgtgtgcaggtaattgaaggcagacagctccctggggtgaatatcaaacctgtcgttaaggtcaccgctgcgggccagacgaagaggacacgcatccataaagggaatagccccctttttaacgaaacccttttctttaacctttttgactctcccggagagctgtttgacgagccaatcttcattaccgttgtggactctcggtctcttcggacggacgctcttctgggcgagttcagaatggatgtgggaaccatttatagagagccaagacatgcatacctgaggaaatggttacttttgagtgacccagatgatttttcagcgggtgcccgcggttaccttaaaacaagcctctgcgttctgggacctggggacgaggcacctcttgagcggaaggatccaagcgaagacaaagaggacattgagagcaacttactgcgccccacgggcgtggctttgagaggagctcatttctgcttgaaggtttttagagcggaggatctcccccagatggacgatgcagtgatggacaacgtcaaacagatcttcggttttgaaagtaacaagaaaaacctcgtggacccattcgtggaggtgagtttcgcaggaaaaatgctttgtagtaagatattggaaaaaactgctaacccccagtggaaccagaacattaccctgcccgctatgttccctagcatgtgtgaaaagatgaggatccggatcatcgattgggacagattgacacataatgatattgtggccactacctacctgtctatgagcaaaatctccgccccaggcggcgaaatagaggaggagccggcaggcgctgtcaagcccagtaaagctagcgacctggacgattatctgggcttcttgcccactttcggaccatgctatattaacctctatggtagtccgcgggagtttacaggttttcccgatccatatacggaactgaataccggcaagggagaaggagtggcttacagaggacggttgttgctctctctggaaaccaagcttgtggagcattccgaacagaaagttgaagatctccctgcagatgatatcctgcgtgtcgagaagtacttgcgcaggagaaagtacagtctttttgccgcattctattctgcaacaatgcttcaagacgtcgacgacgccatccagttcgaagttagcatcggcaactatggcaacaagtttgatatgacctgtctgccactggctagcaccactcaatacagccgggccgtctttgacgggtgtcactattactaccttccttggggaaatgtgaaacctgtggtcgtcttgagctcctattgggaagatatctcgcacaggatagagacccagaatcaactgttggggatagcagatcggttggaggcaggcctggaacaggttcacctggctctgaaggcccagtgttcaactgaggatgtggattccctggtggcacagcttaccgacgaactgattgctggttgtagccaacctctgggagacatccacgaaactcctagcgccacccatctggaccagtacctctatcagcttcgcacacaccaccttagccagattactgaggcagcccttgccctgaaattgggacactccgaacttcccgctgccctggaacaggctgaagattggctgctcagactcagagctcttgctgaggaaccccagaacagcttacccgatatcgtcatctggatgctgcagggcgacaagagggtcgcttaccagcgcgtccccgcgcatcaggttttattttcccgcagaggggccaactattgcggaaaaaactgtggaaagttgcaaacaatcttcctcaaataccccatggagaaagtcccaggtgctcgcatgccagtgcagatcagggtaaagctctggtttggactgagcgtggacgagaaagagttcaaccagtttgcagaaggcaagctgtctgtgtttgcagagacctatgagaatgagacgaaattggctctggtcgggaattggggcacaactgggctgacctaccctaagtttagcgacgttacaggaaaaatcaagctgcccaaagattcctttcgcccatccgctggctggacttgggctggggattggttcgtgtgtcctgaaaaaaccctgctgcacgatatggatgctgggcatcttagttttgtggaggaagtgttcgaaaaccagactcggcttcccggcggccagtggatttacatgtctgacaactataccgacgtcaatggagagaaggtgctcccaaaggacgacatcgagtgccccctaggctggaagtgggaggacgaagagtggtctactgacctcaatcgtgctgtggacgagcagggttgggagtacagcatcacaatccctccagagagaaaacctaagcactgggtgcccgccgagaagatgtattacactcaccgccggagacgttgggtgaggctgaggagaagagatctgagtcaaatggaagcattgaagcgccacaggcaggcagaagctgaaggcgaggggtgggagtacgcctcactgtttggttggaagttccatctggagtatcgcaaaaccgacgccttccgtcgccgccgttggcgtagacgaatggagccactggagaagacaggccctgcagcagtgttcgcacttgaaggtgctcttgggggagtgatggatgacaagagcgaggatagtatgagcgtgagtaccttgtcatttggcgtgaacagaccaaccataagttgcatcttcgactatggcaaccgatatcaccttcgttgttacatgtaccaagcgagagaccttgcagccatggacaaagattccttctctgatccgtacgccattgtgtcattcctgcaccagagccagaaaacagttgttgtcaagaacactttaaacccaacatgggaccagactctcatcttttatgaaatcgagatcttcggagaacctgcgactgtggcagaacaaccaccgagtattgtggtggaactgtacgaccacgatacctatggcgctgatgagtttatgggtagatgcatatgccaaccgtccttagagaggatgccacgcctcgcatggttccctctgacacgcggttcccaaccctctggggaacttttggctagctttgaactcatccagagagagaaacccgctatacaccacattcctgggtttgaggtgcaagaaactagtagaatcctcgacgagtccgaggatacggatttgccatacccccctcctcaacgcgaggccaacatctatatggtgccgcagaatattaagcccgctctgcaacgcaccgcgatcgaaattctggcgtggggactgagaaatatgaagtcataccaactcgcgaacatcagcagtccgagtttagttgtggagtgcggaggacagactgtgcagtcttgcgtcatccgtaatctcagaaaaaacccaaatttcgatatttgcactttgtttatggaggttatgctgccacgagaggagctgtattgtcctccaatcactgtcaaggtgatcgataataggcaatttggacggcggccagtggtcggacaatgcactattagatcgctggagagcttcctctgcgacccttacagcgccgaaagtccctctcctcagggcgggcccgatgacgtgtccttgctctcacccggtgaagacgtgctgattgacattgacgacaaagagcccctgatcccgatccaggaggaggagtttatagactggtggagcaaatttttcgcgagtatcggagagcgggagaaatgtggatcatacttggaaaaagactttgatacactgaaagtctacgacacgcaactggagaatgtggaggcattcgagggcctttccgacttctgcaacacattcaagctttaccgtggcaaaacgcaggaggagacagaagatcctagcgttatcggcgagtttaagggcttatttaaaatctatccactgcccgaggatcctgccattccgatgccccctagacagtttcatcagctggctgcacaaggcccacaggagtgcctggtgcgcatctacattgtgagagctttcggcctccagcccaaagaccccaacggcaaatgcgacccctatatcaaaatcagtatcggcaaaaaaagtgtctctgaccaggacaactacattccctgtacactcgaaccagtgttcggaaagatgtttgaacttacttgtacccttccacttgagaaggatctgaaaatcacgctctacgattacgatctgttgtctaaagacgagaaaatcggcgagaccgtagtagatttggagaacaggcttctgagcaaatttggcgcaagatgcggactgccccaaacctattgcgtatctggtcctaaccaatggagagatcagctcagaccgagtcagctgttacacctcttctgccagcaacaccgggttaaggccccagtgtatagaactgacagggtgatgtttcaggacaaggaatactcaatcgaagaaattgaggctgggcggataccaaacccacatctggggcccgtggaagagcgcctcgctttgcacgtgctgcaacaacagggccttgtgccagaacacgtggaatctcgccctttatactcgcccctgcaaccagatatcgaacagggcaagctccagatgtgggtcgacttgttcccaaaagcccttggacgtccagggccaccttttaacatcacacccaggagagcaaggagattcttcctcaggtgtataatctggaacactagagatgtgattttggatgacctgtcactcaccggagagaaaatgtccgacatctacgtcaaagggtggatgattggatttgaagaacacaaacagaaaacggatgtccactacagaagtttgggcggcgagggaaactttaactggaggtttattttcccattcgactaccttcccgctgagcaggtgtgtacaatagccaagaaggatgcgttctggcgcctggataaaacagaaagcaaaatccctgccagggtggtctttcaaatctgggataatgataagtttagctttgacgactttctgggaagccttcagctggatctgaaccgtatgcctaagcccgctaaaactgctaaaaagtgcagcctggatcagcttgacgacgcatttcaccctgaatggttcgtaagcctgttcgaacagaaaacagtgaaaggctggtggccttgtgtcgcagaggagggtgagaaaaagatcttggcagggaaactggaaatgacactcgaaatcgtcgcagaaagcgagcatgaggaacgccccgctggtcagggtagggatgaacctaacatgaatcccaaactggaagatccaagaagacccgacacctcttttctgtggtttacaagtccttacaagaccatgaagtttatactgtggcgcagatttaggtgggccatcatactgtttatcatcctcttcatcttgttactgtttctggctatctttatatacgcgttccctaattatgcggctatgaagttggtgaaaccattcagc

SEQ ID NO: 10621 - DNA, 6243 bp, synthetic construct
  misc_feature 1..6243: note = source = /note="Description of Artificial Sequence: Synthetic coding sequence"
  source 1..6243: mol_type = other DNA
atgctgtgttgcctcctggtgagggcaagcaaccttcctagcgcgaagaaagatagaaggagcgatccagtggcatccctcacttttcgtggcgtcaaaaagagaactaaagtcattaagaactccgtgaaccctgtgtggaacgaagggttcgagtgggacttgaagggcatacctcttgatcaaggaagcgagctccatgtggtggtgaaggatcatgaaactatggggagaaaccgctttctgggcgaggccaaagtcccactccgggaagtgcttgcaactccaagcctttcagcgtcatttaacgctccacttttggatactaagaaacaaccgaccggagcgtccctcgtgctgcaagtgtcgtacactcctctgccaggggcggtgccactgttcccacctcccaccccgctggagccttcccctactctgcctgatctcgatgtcgttgcagatactgggggagaggaggacaccgaggatcaggggcttaccggtgatgaggcagaacccttcctcgaccagagcggtggtccaggtgctccaactaccccgcgcaagttgccatcacgaccacctccacactaccccggaatcaaaagaaagagatcggcaccgacctcaagaaagctgctgtccgataagcctcaagattttcagatacgcgtccaggtcatcgaagggcgccagcttcctggcgtcaacataaagcctgtcgtgaaggtgaccgcagcaggacagactaaacgcactagaatacacaagggcaattcgccactctttaacgaaacgcttttcttcaaccttttcgatagccctggcgaactgtttgatgagcccatctttatcaccgtcgtggattcacgctctctgagaactgacgccctgctcggagagttccggatggacgtgggaacgatttaccgagagccgcgtcacgcataccttcggaaatggctgctgttgtcagacccggacgacttttcagccggggcaagaggataccttaagactagcctttgcgtcctgggaccaggagacgaggccccactggaaagaaaagatcctagcgaagataaggaggatatcgagtcgaacctcctgcggccaactggagtggcactgagaggcgcacatttctgccttaaagtgttccgggcagaggaccttccacaaatggatgatgcggtgatggacaatgtgaagcagatatttggatttgaatcgaataagaagaatctcgtggacccattcgtggaagtgtccttcgctgggaagatgctttgctcgaagatactggaaaaaaccgccaacccccaatggaaccaaaacatcacccttcctgccatgtttccttctatgtgtgagaaaatgagaattcgaataatcgactgggatagactgactcataacgacattgtggcaactacctacctctcgatgtccaaaatctcggcacctggcggtgaaatcgaagaggagccagcaggagcagtcaaaccaagcaaggcatctgacctggatgattacctgggatttttgcctactttcggtccttgttacattaatctctatgggtcaccgagagagtttaccgggtttcctgacccgtacaccgagcttaacaccgggaagggagaaggagtggcgtatcgtggtcgcctgcttctgtcacttgaaactaagctcgtggaacattccgaacagaaggtggaggatctcccagcagacgatattctcagagttgaaaagtaccttaggaggcgcaagtactccctttttgctgctttttactccgcaactatgcttcaagatgtggacgatgcaattcagtttgaagtgtcgatcgggaactacggcaacaaatttgacatgacttgcctccccctggcatccaccactcaatattcacgcgccgtgtttgacggatgtcattactactacttgccttggggtaacgtgaagcccgtggtcgtgctttcatcctactgggaggacatatcccaccgcattgaaactcagaaccagctccttggtattgcagatcggctcgaagcagggcttgaacaagtgcatctggccctcaaggcacagtgctcgaccgaagatgttgatagcttggtggcgcagctcacggatgaactgattgcaggatgttcgcaaccactgggagatatccatgagacgccgtcagcaactcatctggaccaatatctttaccaactgagaactcatcatttgagccagattaccgaggcagctctcgcgcttaaacttggtcactctgagcttccagccgcacttgagcaggccgaagattggttgcttagactccgggccctggccgaagagcctcagaactcccttccggacattgttatttggatgctccaaggggataagcgggtggcttaccagcgagtcccagcgcaccaagtcctgttttcgcgtcggggagcaaactactgcggaaagaattgtgggaagctgcaaactatctttttgaagtacccaatggagaaggtgcccggcgctcgcatgcctgtccagattcgcgtgaagctgtggtttggattgtccgtggatgaaaaggaattcaatcaattcgccgaaggcaaactttccgttttcgcggaaacctacgaaaatgagactaaacttgcactcgtggggaattggggaaccaccggcttgacctacccgaagttttccgacgtgaccggtaagatcaaattgcccaaagattccttcagaccatcagcaggttggacctgggcgggagattggttcgtgtgtccagaaaagacgctcctgcatgacatggatgcaggacacctgagctttgtcgaagaagtttttgagaaccaaactagattgcccggcggtcaatggatttacatgtctgacaattacaccgacgtcaatggtgaaaaagtgctgccaaaagatgacatcgaatgtcctcttggatggaagtgggaggatgaggagtggagcaccgatctgaatagagccgtggatgaacagggctgggagtacagcatcaccattccaccagagagaaagcccaaacattgggtgccagcagaaaagatgtactatacccatagacggaggcgatgggttaggctccggcgccgcgacctttcacaaatggaggccctcaagaggcataggcaagcagaggcagagggtgaaggctgggagtatgcatcacttttcggttggaagtttcatctcgaatatcggaaaactgatgcattccgacgacgccggtggcggcggcgcatggaaccgctcgaaaagacgggacctgcagcagtgtttgcactggaaggcgcactgggcggagtcatggatgacaagtcggaagattccatgtcagtgtcaaccctgtccttcggtgtgaaccgccccactatttcatgtatcttcgattacggaaatcgttaccatctgaggtgttacatgtaccaggcacgcgatctggccgcaatggataaagattccttttcggacccttacgcaatcgtgtcgtttcttcaccaatctcagaaaacggtggtcgtcaagaacacccttaatccaacctgggaccagaccctcattttctacgaaattgagatttttggtgaacctgccaccgttgcggagcagcccccctcaatcgtggtcgaactgtacgatcacgacacctacggagctgacgagttcatggggcggtgtatatgtcaaccctccctcgaaaggatgccacgactggcctggtttccactcactcgaggatcacagccatccggtgaactgcttgctagctttgagctgattcagcgagaaaagcccgcaatccatcatatccctggatttgaagtccaggaaacgtccaggatcctcgatgaatccgaagatacggaccttccctacccaccacctcagagagaagcgaatatctatatggttcctcaaaacattaagcctgctctgcaacggacggcgatcgagatcctggcatggggactcaggaacatgaagagctaccaactggcgaacattagcagcccctccctcgtggtcgaatgcggtggacagaccgtccagagctgcgtcatccgcaacctcagaaagaatccgaattttgacatctgcaccctgtttatggaagtcatgttgccacgggaagaactgtactgtccccccattacggtcaaagtgattgacaatcgtcaatttgggaggaggccggtggtgggccagtgcactattagatcgcttgaatcatttctttgtgacccttactccgccgaatcaccatcccctcaaggtggacctgatgacgtgtcccttctctcccctggcgaagatgtgctcattgatatcgatgataaagagcctcttatacctattcaagaagaagagttcatcgattggtggagcaagttctttgcatctattggtgaacgagaaaagtgtggttcctacttggagaaagattttgatactcttaaggtgtacgacacccaactcgaaaacgtcgaagcatttgaaggactcagcgacttttgtaatacctttaagctgtatagaggtaagactcaagaagaaaccgaagatccttcagtgattggagagtttaagggtttgtttaagatttacccactcccggaagatccagcgattcccatgccccctagacagtttcatcagctcgccgcacagggacctcaagaatgtctcgtgaggatctacattgttcgagcctttggactgcaaccaaaagatcccaacggaaaatgcgacccttacattaagatttccataggaaagaagtccgtgagcgaccaggataactacatcccatgtactctggagcctgtctttggtaaaatgtttgaactcacttgtacgttgccacttgaaaaggatctcaagataactttgtacgattacgacttgctttcgaaagacgaaaagatcggagaaactgtcgtggacctcgagaacagactgcttagcaagttcggagccagatgcggtttgcctcaaacctactgcgtctcgggtcctaaccaatggagggaccaactccgcccttcccaacttcttcacttgttttgtcagcaacaccgggtgaaggcaccagtttaccgaactgaccgcgtgatgttccaagacaaagaatactcgatagaagaaatcgaagcaggtagaattcctaaccctcaccttggtccggtggaagaacggctggcactgcacgttctccaacaacagggtctggttcctgaacacgtggaatcacgccctctttacagcccactgcagccggatattgagcaaggaaagctccaaatgtgggtggatcttttccccaaggcccttggccgccccggcccaccatttaacattaccccccgtcgcgcaagacgctttttcttgagatgtatcatatggaacactagagatgtgatacttgatgatctgtcgctgaccggggaaaagatgtcggacatctacgtgaagggatggatgatcggcttcgaggaacacaagcaaaagactgatgtgcattaccgtagccttggaggagaaggtaacttcaactggcggttcatcttcccctttgattacttgccagcggaacaagtctgtactatagcaaagaaggatgcattttggcggcttgacaagactgaaagcaagattcctgcgcgtgtcgtgttccagatttgggataatgataagttttccttcgacgatttcttgggatcgcttcagctggacctcaacaggatgccgaaaccagcaaagaccgctaaaaagtgctccctggatcaactcgatgacgcctttcatccagaatggtttgtctctctttttgaacaaaagaccgtcaaaggatggtggccctgtgtggccgaagaaggcgaaaagaagattcttgccggtaaacttgagatgaccttggagatcgtcgcagaaagcgagcatgaagaacggcccgcgggacagggtagagatgagcctaatatgaatccaaaacttgaagatccgaggcgtccagatacctcctttctgtggtttacctctccctacaaaaccatgaagtttatcctgtggcgtcggtttcgttgggccattatcctgttcataattctgtttatcttgcttctttttctggccattttcatatacgcatttccgaattatgcggctatgaagctcgtgaagcctttttcg

SEQ ID NO: 10622 - DNA, 6243 bp, synthetic construct
  misc_feature 1..6243: note = source = /note="Description of Artificial Sequence: Synthetic coding sequence"
  source 1..6243: mol_type = other DNA
atgctgtgttgcctcctggtgcgggccagcaacctcccatctgcaaagaaagatcgacgatcagacccagttgcgagtctgacctttcgaggggtcaagaagcggacaaaggtgatcaagaattccgtgaatcccgtatggaacgaagggttcgaatgggacctcaaggggattccgctggaccagggtagtgagctgcatgtggttgtgaaggaccacgaaaccatggggagaaatagatttctgggtgaagctaaagttcctttgagggaggtactagcgaccccttccctgtccgccagtttcaatgctcccttgttggacacaaaaaaacagcctaccggtgctagcctcgttctgcaagtgtcatacactccgttgcctggagcagtgccactgtttccacctcctactcccctcgagccatcccccacgctacctgacctagacgtcgtggcggacacaggaggtgaagaggatactgaggaccaggggctgacaggcgacgaagccgagcccttcttggaccagagcggggggccgggggctcccacaacgcctagaaaactcccaagtagaccccccccccattacccgggaataaaacgaaagaggtcggctcccacttctcgcaaactgctaagtgataaaccccaggactttcagatccgcgttcaagtgattgagggcaggcagctgcctggcgtgaacattaaacccgttgtgaaagtgaccgccgcagggcaaaccaaaaggactagaatacacaaaggcaactcgccactctttaacgagacactttttttcaacctgtttgacagcccgggcgagctatttgatgagccaatcttcatcaccgttgtggatagtaggagtctgcgaacagatgccctcctgggtgaatttaggatggacgttggcaccatttatagggagcctcggcatgcgtacctgaggaagtggcttctgttatccgaccccgatgacttcagcgctggagctcgtggatacctcaagacctctctttgcgtgctggggcctggtgacgaagccccactggagcgcaaggatccctcagaggacaaagaggatatcgagagtaatctgctccgccctacgggtgtagctctgaggggcgcccacttttgcctgaaagttttccgggcagaggacctgccgcagatggatgacgccgtcatggacaacgtcaagcagatcttcggattcgagtccaacaaaaaaaatctggtggacccattcgtcgaagtaagctttgccggcaaaatgctctgctcgaaaattttagagaaaaccgccaacccccaatggaatcaaaacataactctacctgccatgttcccctcaatgtgcgagaaaatgcggatccggatcattgactgggataggctcacccacaacgacattgtggctactacctatctgtccatgtctaagatctctgcgcccgggggggaaatcgaggaggagcccgccggcgcagtgaaaccatcaaaggcctccgatctggatgactacctggggttcctacctacattcggtccgtgttacatcaacctgtacggatcgccccgagagtttaccggattccccgacccctatacggagctgaatacaggcaaaggggaaggtgtcgcctatcgaggccggctactcctgtcccttgagaccaaacttgtggagcattccgagcagaaggtagaggaccttccggccgacgacattcttcgcgttgagaaatacctgagacgccggaagtattccttgtttgctgcattttactccgcaacaatgctacaggacgtcgacgacgccattcaatttgaggtttcaataggcaactacggcaacaagttcgatatgacttgcctgcctctggcaagtacaacgcagtatagccgtgcagtttttgacggctgccactactattatctcccgtggggaaatgtgaaacccgtggtggtactgagctcttactgggaagacatctcacaccgaatcgagacacagaatcaactgctgggcatagccgatcgactcgaggccggcctggaacaggtgcaccttgccctaaaggcacagtgttcaacagaagacgtggacagtctggttgcacagcttacggatgagcttatcgcagggtgtagccaacccctaggcgatattcatgaaacgcccagcgcaacccatctggatcagtacctgtatcagttgcggactcatcacctcagtcagattactgaggcagctctggctttgaagctgggccattccgagttacctgctgccctggagcaggcagaagattggttgctgaggttgcgcgcccttgcagaggaacctcagaacagtctgccagacattgttatatggatgctgcaaggcgataagcgggtcgcgtaccaaagggtaccagcgcatcaggtgctgtttagtcgaagaggggctaattattgtggaaaaaattgtgggaagttgcaaaccattttcttaaagtatcccatggaaaaggtgcctggggcacgaatgcccgttcagattcgggtgaagctatggtttggcctctccgtggatgagaaagaatttaaccagttcgccgagggcaagttgtcggtgttcgctgagacttacgagaatgagaccaagctggccctcgtcggcaattggggcacgacagggttgacataccctaagttctccgacgtaactggtaagataaaactccctaaagattcctttcgtcccagcgccggttggacctgggctggagactggtttgtctgccctgagaaaaccctcttgcacgacatggatgcggggcacctgagttttgtcgaggaagtgttcgagaatcagacgcgtctcccggggggtcaatggatctacatgagtgataactatactgatgtgaatggcgagaaggttcttccaaaggacgacatcgagtgccctctggggtggaagtgggaagacgaagagtggtccacggaccttaaccgggccgtggacgagcaaggctgggaatacagcatcaccatccctccagaacgcaagcccaagcattgggtgccagcagagaagatgtactacacacatagacgtaggcgatgggtgcgcttacgcaggagggacctctcccagatggaggccctcaaacgtcaccgccaggccgaggcagagggggaggggtgggaatacgcctccctgtttggctggaagttccatctggaatatagaaaaactgatgcgtttaggcgccgcagatggagacgccggatggagcccctggagaaaaccgggcctgccgcagtctttgccctggagggggcactgggcggtgtgatggatgataaatctgaggactccatgtcagtctctaccttgtccttcggagtgaataggcctaccatttcgtgcattttcgactatggcaacaggtatcacctgcggtgttatatgtatcaggctagagacctggcagcaatggacaaggacagtttctcagatccctatgctatcgtgagttttttacatcagagtcaaaaaaccgtagtagttaagaacaccctcaacccaacctgggaccagactctgattttttacgagatagaaatctttggcgaacctgcaactgttgctgagcagcctccaagtatagtggtggagctctacgatcatgacacatacggggcagatgagttcatgggtcgctgtatctgccaacctagcctggagaggatgcccaggctcgcctggtttccgctgaccagaggctctcagcctagtggcgaacttctggcttctttcgaattgatacagcgggagaagcctgccatccaccacataccgggattcgaggtgcaggagacttcacggatactggatgagagcgaagataccgacctcccttacccacccccgcagcgggaggctaacatctatatggtgccccagaatattaagcccgccctgcagcgcaccgccattgaaatactggcgtgggggttgaggaatatgaagagctaccagcttgccaacatttcttcgccaagccttgtagtggagtgtggcggtcagacagtgcagtcgtgcgttattcgcaatctccgcaagaatccaaatttcgatatctgcaccctgtttatggaagttatgctcccccgggaagagctgtactgtccgcctataacggtgaaagttatcgacaaccgccaatttggccgccgcccagtcgttggccagtgcacaattcgcagcttagaaagcttcctatgcgacccttactcagctgagtccccgagccctcaggggggccccgacgatgtgtctctactgagtcccggagaagatgtccttatcgacattgatgataaagagcccctgattcccatccaggaggaggagttcatagattggtggtccaagttttttgccagcatcggggagcgagaaaagtgtggttcatatcttgaaaaagacttcgacacacttaaggtgtatgacactcagctggaaaacgtggaggccttcgagggcctcagcgatttttgtaacacgttcaaactgtatcgtggcaagacacaagaagagacagaagacccatccgtgatcggggagtttaagggactttttaagatctaccctctccccgaggaccccgctatccctatgccaccgcgtcaatttcaccagttagctgcccagggtccacaggagtgccttgtcaggatctacatcgtgcgggcctttggtctgcagcctaaagaccctaatggcaagtgcgatccctacatcaaaatctcaataggaaagaagagcgtaagtgaccaggataactatatcccttgcaccttagagcctgtgtttggaaagatgttcgagcttacctgtactttaccactagaaaaagacttgaagatcaccctttatgactatgacctgctttccaaagacgaaaagattggagagactgtggtggatctggagaatcgactcctgagcaagtttggcgcccgatgtggccttcctcagacctactgcgtatctgggcctaaccagtggcgtgaccagctgcgtccctcccaactactgcatttgttttgccagcaacatagagtgaaagcccccgtttacagaactgatcgagtgatgttccaggataaagagtacagcatagaggagattgaggccggccgaataccgaatccccacttaggcccagttgaggagaggctggctctccatgtcctgcagcagcagggcttggtgcctgaacacgtggagtcgagacccttgtattcacctctccaacctgacatcgaacagggcaaactgcagatgtgggtggacttgtttcccaaagctctagggcgcccaggccctccgtttaacattaccccacggcgagccaggcggttttttttaagatgcatcatctggaataccagggacgtcatcctggatgacctctctctaaccggcgagaaaatgtctgacatttatgtaaaaggatggatgatcggcttcgaagagcataaacagaaaacagacgtgcactacaggagtttaggaggggagggtaacttcaactggcgattcatattccctttcgattatctgccagccgagcaggtttgcacaatagcaaaaaaagacgctttctggcgcctggacaagaccgaatccaagatccccgcccgagttgtattccaaatttgggacaatgacaagttcagtttcgacgactttcttggatctctgcagttggatcttaatagaatgccgaagccagctaagactgccaagaagtgctccttggatcagttagatgacgccttccatccagagtggttcgtgagtctgttcgagcagaagacagtgaaaggttggtggccatgcgtggctgaggagggggaaaagaagatcctcgcggggaagcttgagatgacccttgagatagtggcagagtccgagcatgaggagcggccggcgggccagggacgggatgagcccaacatgaaccccaagttggaagatcccaggcggccggacacctccttcctctggtttacctcaccgtacaaaacaatgaaattcatcctctggagacgattccggtgggcaattatcctgttcattatcctgtttattctcctcttatttttagcaatcttcatctacgctttcccaaattacgcagccatgaagttggtgaaaccatttagc

SEQ ID NO: 10623 - DNA, 6243 bp, synthetic construct
  misc_feature 1..6243: note = source = /note="Description of Artificial Sequence: Synthetic coding sequence"
  source 1..6243: mol_type = other DNA
atgttgtgttgcctgttggtgagagcctccaacttgccctcagctaagaaggataggaggagtgaccctgtggccagcctgactttccgcggtgtgaagaagagaacaaaagtcatcaagaatagcgttaaccccgtgtggaacgaaggatttgaatgggacttgaagggtatcccgctggatcagggctcagagctgcacgttgtcgtgaaggatcacgaaacgatgggtagaaacagattcttgggcgaggcgaaggtgccgctgcgcgaggttctggccacccctagcttgtctgcttcctttaacgcccccctgctggacactaagaagcagcccactggcgcatccctggtgcttcaggtgagctacacccctttgccaggagccgtgccgttgttccctcctccgacaccgctcgaaccgagcccaacactgccagatctggacgttgtggccgacactggcggagaagaggacactgaggaccaaggcttgaccggcgacgaagcagaaccgttcttggaccaaagcggcggccctggcgctcctaccacaccgagaaagctcccttccagaccccctccccactatccaggaattaagcgcaaacgcagcgcacccaccagcaggaagctcctttcagataaaccacaggacttccagataagagttcaggtgatagaaggtagacaactgcccggtgtcaacatcaaacccgtcgtcaaagtgaccgcagcaggccagacgaagagaactcgcattcacaagggcaactcacccctgtttaacgaaaccctgtttttcaatctgtttgattcaccgggcgagcttttcgatgagccaatcttcataacagtcgtagactctcgctcacttagaacagacgcattgctgggcgagtttagaatggatgtaggaacgatatacagagaacctaggcatgcttacctccgcaagtggctccttctctcagacccagacgatttcagtgctggcgcacgcggttacttgaaaacatccctctgtgtgctgggcccaggtgacgaggctcctctcgaaagaaaagaccccagcgaggacaaagaggacatcgagagcaatctgttgaggcctactggtgtcgctctgcgcggcgcccacttctgtctcaaggtgtttagggccgaagacctgcctcagatggatgacgcagtcatggataatgtgaagcagatcttcggatttgagtccaacaagaaaaacttggttgatccgttcgtggaggtgtcctttgccggaaaaatgctctgctccaaaatccttgagaagaccgccaatccccaatggaatcagaacattaccctgcctgctatgtttccttccatgtgcgaaaagatgcgcattaggattattgattgggacaggctcacccataatgatattgtggcaaccacttacctgagtatgtccaagatctccgcccctggcggagaaattgaagaagagcccgcaggagcggtgaagccatctaaagcatctgaccttgatgattacttgggtttcctcccaacctttggcccttgctacatcaacctgtacggtagtcctcgcgagttcactggattccctgacccctataccgagctgaacactggaaagggagagggtgtcgcatacagaggccgcctgttgctgagcctcgaaacaaagttggtcgaacactccgagcagaaggtggaagatctgccagccgatgacatcctgagggtggaaaagtatctccgcaggaggaagtattctctgtttgccgccttctattccgcaactatgctgcaggatgtagacgatgctattcagtttgaggtgagcatcggcaactacggaaataagttcgacatgacctgcctgcccctggcctccactacccagtactctcgcgccgtcttcgacggctgccattactactacctgccatggggaaacgtgaagccagtggtggtgctcagtagttattgggaagacatatcacataggatcgagactcagaatcagctgctgggaattgcagacagactggaggccggtctggagcaggtccaccttgcgctcaaagcccagtgctctaccgaagacgtggatagccttgttgctcagctcactgacgaactgatcgccggttgtagccagcctcttggtgacatacatgagactccatcagctacccatttggaccagtacctttatcaacttcgcacccaccacctgagtcagatcacagaggctgccctggccctgaagttgggacatagcgagctccctgccgctctcgaacaagccgaggactggctgctgagattgcgcgcgctcgcggaggagcctcagaacagcctgccggatattgttatctggatgctgcagggcgacaaacgcgtggcttaccagcgcgtacccgcccaccaggtgctcttttccaggcgcggtgctaactactgtggcaagaattgtggaaaacttcagaccatctttctgaagtaccccatggagaaggtgccaggagcgaggatgcctgtgcagatccgcgtcaagctgtggttcggactctcagtcgacgagaaggagttcaaccagtttgctgagggtaagttgagcgtttttgctgagacttatgagaacgagactaaactcgcccttgttggcaattggggtaccactggcctgacttatccaaaatttagcgatgtaacaggaaagataaagctgccaaaggacagcttcaggccgagtgcaggctggacatgggcaggtgattggttcgtgtgcccggaaaagacactgctgcatgatatggacgcgggacacttgtcatttgttgaggaagtctttgagaaccaaacccgcctcccaggtggacaatggatctacatgagcgacaactacaccgacgtgaacggagagaaggtgctgccgaaggatgatatagagtgtccgcttggatggaagtgggaggacgaggagtggagcaccgacctgaacagagctgttgacgaacagggatgggaatacagtataacaatcccacctgagagaaagccaaaacactgggtgcctgccgaaaagatgtactacacgcacagacgccgcagatgggtcagactgagacgccgcgacctcagtcaaatggaggctctcaaacgccaccgccaggcagaggcggagggtgagggatgggaatacgcctctctgtttggctggaagttccacctggagtaccgcaagaccgatgcattcaggagaaggagatggcgcagaagaatggagccactcgaaaagaccggacccgccgctgttttcgccctggagggcgccctgggaggcgtgatggacgacaagtcagaggattccatgtctgtctccaccctgagttttggtgttaacagaccaacaatttcttgtatcttcgactatggaaataggtaccatctgaggtgctacatgtaccaagccagagacctggccgctatggataaggactccttctccgatccctacgctatcgtaagttttcttcatcagtcccaaaaaaccgtcgtggtaaaaaacactctgaatcccacttgggaccaaactctcatcttctatgagattgagattttcggcgaacctgcaacagtggccgaacagccgccgtcaatcgtcgtcgagctttacgaccacgacacatacggagcagacgagttcatgggaaggtgcatctgtcaaccatccctggaacgcatgcctcgcctcgcttggtttccgctgacccgcggaagccaaccttccggagagctgctggcctccttcgagctcattcagcgcgaaaagcccgctatccaccacattcccggcttcgaagtgcaggaaacctcacgcatcctggatgaatccgaagacactgatctgccatatcctccacctcagcgcgaggctaatatctatatggtgccccagaatatcaagcccgcactccagagaacggccattgaaattctggcttggggtctcagaaacatgaagagctaccagttggcgaatatttcttctccatctttggtcgtggagtgtggcggtcagacggtgcaatcatgtgttattaggaatctccgcaaaaatccgaatttcgatatctgcacactgtttatggaggttatgctgccccgcgaggaactgtattgccctcccattacggttaaagtgatcgacaacagacaattcggcaggcgcccggtcgttggccagtgtacaattaggtctttggaaagctttctgtgcgacccttacagtgcagagtctccctcaccacagggaggtcccgatgatgtcagtttgttgtctcccggcgaggacgttttgatagacatcgatgacaaggagccactgatcccaattcaggaggaggaattcatcgattggtggagcaagttcttcgcttccattggtgaaagggagaaatgcggtagctatctggaaaaggatttcgacacgctcaaggtgtatgacacccagttggagaatgttgaagcctttgagggactgtccgacttctgcaacactttcaagctctaccgcggcaaaacacaggaagagaccgaagaccccagcgttatcggagagttcaagggcttgttcaagatttaccctcttccggaggaccccgcaatccccatgccgccgagacaatttcatcaactggctgcccagggccctcaggagtgcctcgtcaggatttatatagtgcgcgcttttggtctgcagcctaaagatccgaatggtaaatgcgacccctacattaaaataagtattggcaagaagtccgttagcgaccaggacaactacatcccttgcaccctggagcctgtgtttggtaagatgttcgaattgacatgtacactccctctggagaaggacctgaagataactctgtacgattatgatcttcttagcaaagacgagaagattggcgaaactgtagtggatttggagaaccgcctgctgtccaaattcggtgcccgctgcggtctgccccaaacctattgcgttagtggaccgaaccaatggcgcgaccagctcagaccttcccagctgctgcatctgttttgccagcagcacagagtgaaggcacccgtataccgcaccgacagggtaatgtttcaggataaagaatacagcatagaggaaatcgaggcaggtaggattccgaatccccatctcggccccgtggaggagaggctggccctgcatgtgctccagcagcaaggtctggtgccagagcatgtcgagagccgcccactctactcccccctgcagcctgacatagagcagggcaagttgcaaatgtgggttgacttgttccctaaggcgttgggcagaccaggacctcccttcaatattaccccacgccgcgccaggcgcttcttcctgagatgcatcatttggaatacacgcgatgtaattcttgacgacctgagcttgacaggcgagaagatgtccgacatatatgtcaagggatggatgatcggttttgaggagcacaagcagaaaacggacgtgcactataggtcactgggcggcgagggcaacttcaactggaggtttattttcccatttgattatctcccagctgaacaggtatgcacaatcgctaagaaggatgcgttctggagattggataaaactgaatccaaaatccccgctcgcgtggtgtttcaaatctgggataacgacaagttctctttcgacgattttctgggctccctccaactggatctcaataggatgccaaagcctgctaagaccgcaaagaaatgttcactggatcaactggacgacgccttccatcctgagtggttcgtttccctttttgaacagaaaacggtgaaaggctggtggccatgtgtagcagaggaaggagagaagaagatattggctggaaaactcgagatgaccttggaaatcgtggcagagagcgagcatgaggaacgcccagctggtcaaggtagagatgagcccaatatgaatcccaagttggaggatcctagaaggccagacacctcattcctgtggttcacctctccgtacaagacgatgaagttcattctgtggcgccgcttccgctgggccattatcttgtttattatcttgtttatcttgctcctcttcctggctatctttatctatgccttccccaattacgctgctatgaaattggtaaagccctttagt

SEQ ID NO: 10624 - DNA, 6243 bp, synthetic construct
  misc_feature 1..6243: note = source = /note="Description of Artificial Sequence: Synthetic coding sequence"
  source 1..6243: mol_type = other DNA
atgctttgctgcctgctggtcagagctagtaacctgccctccgcaaagaaggacagacgaagtgaccctgtcgcctcactgacttttaggggggtcaaaaagcgaacaaaagtcataaagaattcagttaatccagtctggaacgagggatttgaatgggatctcaagggcatccctctggatcagggtagcgagctccacgtggtggtgaaagatcacgagaccatgggtaggaacaggtttctgggagaagctaaagtccctctgcgagaggtcctggctaccccatcgctgagcgcttcattcaatgcccccttactggataccaagaagcaaccaacaggcgcctcacttgttctgcaggtaagctatactcctttgcccggggcggtgcctttattcccaccccccacccccctcgagccttcccctacactgcccgacctcgacgtcgtagccgacactggcggcgaagaagacacggaggaccagggactcacaggggatgaggcagaaccttttctggatcagagcggcgggcccggagcgcccacaacaccccgaaagttgcccagtcgacccccaccacactaccccggcataaaaaggaagcgctccgcaccaacctctaggaaactgctcagcgacaaacctcaagatttccagatccgagtccaagtcatcgaaggacgtcagctgcccggcgtcaatattaaacccgtggtgaaggtgactgcggccggccagactaaacgcacaaggatccacaagggaaatagccctctgtttaacgagaccctgtttttcaacctttttgattctcctggcgaactgtttgatgagcctatcttcataacagttgtagactctaggagtctgagaaccgacgcattgctgggggagtttagaatggatgtgggaacgatctaccgagagcctcgacatgcttatcttcgcaagtggctactgctgtccgaccctgatgacttttctgcaggagccagaggttatctgaaaacctccttgtgcgttctgggtcccggtgatgaggcgcccttagagaggaaagatccctccgaagataaggaggatatcgaatcaaatcttcttaggcctaccggagtcgctctccgaggggctcacttttgtcttaaggttttccgagccgaggatttgccccagatggatgacgctgtcatggataacgtaaagcagatcttcgggtttgaaagcaataagaaaaacctagttgatccttttgtggaggtctctttcgctgggaagatgttatgttccaagatccttgagaaaacggcaaatcctcagtggaaccagaacatcaccctgcccgccatgttcccttcgatgtgtgaaaaaatgcggatcagaattatagattgggatagactcactcacaacgatatcgtggccaccacgtaccttagtatgtcaaagatctccgctcccggtggggaaatcgaagaagagcctgcaggggcagtaaaaccatctaaggcatctgatctggatgactacctgggtttcctgccaacattcggaccatgctatatcaacctgtatgggtctccccgcgagtttacagggtttccggacccatacaccgaactcaatactggaaaaggcgaaggtgttgcttatagaggtagactgttactttccctggaaaccaagctcgtggaacattccgaacagaaagtggaagacctccccgcagatgatattctgagggttgaaaagtatctgagaaggcgtaagtattcgctgttcgccgccttctattcagcaactatgttgcaggacgttgacgatgccatccagttcgaggtttcgatcgggaattacggaaataagttcgacatgacctgcttgcccctcgctagcaccacccagtactcccgggctgtgttcgatggatgccattattattaccttccatggggaaacgtcaagcctgtggtcgttttgtcttcctactgggaagatatttctcacagaatcgaaactcagaaccagctcttgggcattgccgatcgtttggaggctggtttggaacaggtgcacctcgctctgaaggcccagtgctctacagaggacgtggactctctcgtggcacagcttacagacgaactgatcgctggctgctcgcagcctctaggcgatatccacgaaaccccttccgccactcacctggatcagtacctctaccaactccgaacccaccacctgtcccagattactgaggccgctctagcgctcaagctggggcacagcgagctaccggccgcactggagcaggctgaggattggctgctaagattgcgagcattggctgaagagccccagaacagtctgcccgacatcgtcatctggatgctgcagggggataaaagagtcgcatatcaacgagtccccgcacatcaagtgctgttctcacgacgaggcgccaattattgcggtaagaattgtggtaaactccagaccatcttcctcaaataccctatggagaaggtccccggcgcaaggatgccagtccagatcagagtgaagttgtggttcgggctgtccgtagacgagaaggaattcaaccaatttgctgagggcaaactcagtgtgttcgccgagacatacgaaaatgaaacaaaattggcgctcgtgggcaattgggggaccactgggttgacctaccctaagttttctgatgtgaccggaaagattaagctgccaaaagacagtttccgaccctccgcggggtggacgtgggcgggggattggttcgtttgccccgagaaaacacttcttcacgatatggatgcagggcacctgagttttgtcgaggaggtgtttgaaaaccagacacgactgccagggggacagtggatctatatgtccgacaactacaccgacgtgaacggggagaaggtgctgccaaaagatgatatcgagtgcccgctggggtggaagtgggaagacgaagagtggtctaccgacttgaacagggcggtcgacgagcagggatgggaatattctatcaccattcccccagaaaggaagcccaagcactgggtccccgctgaaaaaatgtactatacccataggcggcgcagatgggtaaggctgcgacgccgagatctgtcccagatggaagcactgaagagacaccgccaagcagaggcagaaggcgaaggatgggaatatgcaagtctttttggatggaaatttcacctggagtaccgaaaaacagatgccttccgtcgaagacgatggcgaaggaggatggaacctttggaaaagacaggcccagccgcggtctttgcactggagggggccttaggcggggtgatggatgacaagtccgaggattctatgtctgtatcaaccctttcctttggggtgaaccgtcccacaatctcttgcattttcgactacggcaaccggtatcatctccggtgttatatgtaccaggccagagatttggcagcaatggacaaagatagtttttccgatccgtatgcaatagtgagtttcctacatcagtcacagaaaacagtcgtggtcaagaatacccttaatccaacttgggatcagacactgattttctacgaaatcgagatttttggagaaccagccaccgttgccgagcaacccccttccatcgtcgtcgagctttatgatcatgacacctatggggcagacgagtttatgggccggtgcatttgtcagccttccctggagcggatgccacgactggcctggtttcctctgaccagggggtcccagccgtccggcgagcttcttgcttcatttgaactcattcaaagggagaagccggccattcaccatatcccaggctttgaggtccaggaaacatcgagaattctcgacgaatccgaagatactgatctcccataccctcctccacaacgagaggcaaatatatacatggtgccacagaacataaagccagcactccaaaggaccgccattgagattctggcttggggcctacgaaatatgaaatcttaccagctggccaatattagctctcccagcctcgtggtggagtgtgggggacagacagttcagtcttgtgttatccgcaacctccgaaagaatccaaactttgacatctgcacactgtttatggaagtgatgctgcccagagaggagttgtactgtcctcccatcaccgtcaaagtgatagacaatagacagttcgggaggaggcctgttgtgggccagtgcactatacgtagcctggaatctttcttgtgcgatccttattcagcagagagcccctctccgcagggcggacctgatgatgtatcgctgcttagccccggcgaggatgttttgatcgacatagatgacaaagagccacttatacctattcaagaggaggagttcatcgactggtggagcaagttcttcgctagtataggagagagggaaaagtgtggctcatacctggaaaaagactttgatacacttaaggtttatgacacgcagctggagaatgtggaggccttcgaaggtctctctgatttctgtaatacgttcaagctctacagggggaagacgcaggaggaaaccgaggacccttctgtgattggggagtttaagggcttatttaagatataccctctaccagaagaccctgccataccaatgcctccccgtcagtttcaccagctcgccgctcagggtccacaggaatgcctagtcagaatctacattgtccgcgcattcggattgcagccgaaagatcccaatggtaaatgcgatccttacattaagatctctattgggaaaaagagcgtgagcgaccaggacaactatattccttgtaccctggaacccgtgtttggaaagatgttcgaattgacctgcacattgcctctggaaaaggacctgaaaatcaccctgtatgattatgacttgctcagcaaggacgaaaaaattggggagacagtcgtggatctggaaaaccgtctgttgtctaagttcggcgctagatgcggactaccacagacgtactgcgtaagtggccctaatcagtggagagatcagctgagaccatcccagctgctccacctcttctgtcaacaacacagagtcaaggcacccgtttataggaccgatagagtcatgtttcaggacaaggagtacagtatagaggaaattgaggctggcagaatcccaaatcctcacctagggcccgtggaagaaaggctggccctgcacgtgctccaacagcaaggcttagtacccgagcatgtcgaaagtcgacctctatactcgccactgcagccagacatcgaacaggggaaactccagatgtgggttgatctcttccccaaagctttgggcaggcctggaccgccgtttaatataacccctcgacgggcacgacgattcttcttgaggtgcatcatttggaatactcgcgatgtaatcctggatgacctgtcactcacaggggaaaagatgagcgacatctacgtcaaaggttggatgattggattcgaggagcataaacagaagacggatgtgcattataggtccttggggggcgaaggcaacttcaattggcggttcatttttccgttcgactacctccccgctgaacaggtttgcacgatcgccaagaaagatgcattctggagattagacaagacagagtccaagatacctgcacgggtggtgttccagatctgggacaatgataaattctcctttgatgatttcctcggaagtctacagctcgatctcaaccgcatgccaaaacccgctaagacagccaagaagtgttccctggaccagctggatgacgcctttcatccagaatggttcgtgtctctgtttgagcagaaaacagtgaagggctggtggccatgcgtcgccgaggagggtgaaaagaagatcctggctggcaaactggagatgaccctggagatcgttgctgaatcggaacatgaggagcgacccgcgggccagggtagggatgaacctaatatgaatccaaagctggaggaccctagaaggccagatacatctttcttgtggtttacatccccatacaaaacaatgaagttcatcctgtggcggagattccgatgggctatcatcctcttcatcatcctctttattctgttgctattcctagcgatttttatatacgcatttcctaactacgcagcgatgaagctggtgaaacccttcagt

SEQ ID NO: 10625 - DNA, 6243 bp, synthetic construct
  misc_feature 1..6243: note = source = /note="Description of Artificial Sequence: Synthetic coding sequence"
  source 1..6243: mol_type = other DNA
atgctgtgttgccttctagttagggcttccaaccttccttccgccaagaaagacagacgttctgatcctgtcgcatccctgacctttcgaggtgtgaaaaagcgcacaaaggtgataaagaactcggtaaacccggtttggaatgaggggtttgagtgggacctgaaggggattccactcgatcagggttctgagctgcacgtcgtggttaaagatcatgaaaccatgggtagaaatcgctttctgggggaggctaaagttcctttaagggaggtcctggccaccccctcactctcggcctcctttaatgcgcccctccttgacaccaaaaaacagccgactggtgccagcctggtccttcaagttagttacacacccctgcccggcgccgtgcccctgttcccccccccaacccccttggagccttcccccactctccccgatttagacgtcgtagcagacacaggcggggaagaggacactgaggaccagggccttacaggagatgaggccgagcccttccttgaccagagcgggggccctggcgccccgactacaccccgaaaattaccgagcagaccgcccccccactatcccggcattaaaaggaaacggtcagccccgacttccagaaagctactctccgataaacctcaggattttcagatcagagtgcaagtaatagagggccgtcaactacccggcgtgaacatcaaacctgtggttaaggttacagccgcggggcagactaagcgcacccgcatacacaagggcaactcaccactgttcaatgaaactctcttcttcaatctgttcgattcaccaggcgagttattcgatgagcccatctttatcaccgtggttgactctaggagccttcggactgatgctttgctgggggaatttcggatggatgtggggacaatttaccgcgaaccccgacacgcatatcttagaaaatggctcctgttgagtgatcccgacgacttcagcgctggagccagaggatatctaaagacttccctgtgtgttctgggcccgggggatgaagcccctctggagagaaaagacccatctgaagacaaagaagatatagaaagcaacctgctccgccccactggcgttgcactgcggggagcgcatttctgcctcaaagtatttagggctgaggacttgccccagatggacgatgcagtcatggacaacgtgaaacagatctttggattcgagagcaataagaagaacctggttgatccctttgtggaggtatcattcgcaggcaaaatgctttgtagcaagattctcgaaaagaccgctaatcctcagtggaatcaaaatatcaccttgcccgccatgtttcctagcatgtgtgaaaagatgaggatccggattatcgactgggatcggttgacacataatgatatcgtggccacgacctacctgtccatgtccaagatctctgcccctgggggcgagattgaagaggaacccgctggtgcagtgaaaccgtcgaaagcatcagacctcgacgattacctcggatttctccccacatttggtccttgctatattaatctgtatggctcccctagagaatttacgggtttccctgacccctacacagaactcaatacaggcaaaggggaaggcgtcgcgtatcgcgggcgactactgctctctctcgagacgaaactggtcgaacatagtgagcagaaggtagaggatctgcctgctgatgacatcctgcgtgtggagaaatacctgcggcggaggaagtactcattattcgccgccttctactccgccacgatgttgcaggacgtagatgatgctatacaatttgaagtgtctattggcaactacggcaacaaatttgacatgacatgcctgccacttgccagcactacgcagtattcaagggcagtctttgatggctgtcactactattacctaccatggggaaacgttaagcctgtggtggtgctgtcttcctactgggaggacatcagtcacaggattgaaactcagaatcagctgctgggcatcgcggaccgacttgaagccgggctcgagcaagtgcatctcgccctgaaagctcagtgttccacagaggatgtggacagcctcgtagcacagctgaccgatgaacttattgcaggctgctcccagcccctgggggatatccacgaaaccccatccgcaacgcatttagaccagtacctgtatcagctgaggactcatcatctgtcccagatcacagaagctgcactagccctaaagctcggacactccgagctaccagccgcattggaacaggccgaagactggcttctgcgcctgcgtgcattggccgaggagcctcaaaattcccttcctgatatcgttatctggatgttgcaaggggacaaacgtgtggcctaccagcgcgttcctgctcaccaggtcctattctctagacggggggccaattattgtggaaagaactgcggcaaactccagaccatctttctcaagtatcctatggagaaggttcccggcgcccgaatgcccgtgcagatcagagttaaactctggttcggacttagtgtcgacgaaaaggagttcaatcagtttgccgaggggaagttgagtgtcttcgcagaaacatatgagaacgagacgaaactcgccctggtagggaactgggggacaaccgggttgacctacccaaagttcagcgatgtgacaggcaaaatcaaattacccaaggactccttcaggccttcggccggttggacttgggcgggggactggttcgtgtgcccagaaaagaccttgctccacgacatggacgccggccaccttagcttcgtggaagaggtcttcgaaaaccagacgcgactgcccggtggccagtggatttacatgagcgataattatacagacgtcaatggggaaaaagtcctgcccaaagatgatatagagtgtccacttggctggaaatgggaagacgaagagtggtccacggatttgaacagagccgtggatgagcaggggtgggagtatagcatcacgattccccccgaacgtaaaccaaagcattgggtgccagcggagaagatgtattatacacaccgcagaaggcgttgggttagactgaggcgccgtgatctgtcccagatggaagctctcaagagacatcgccaggccgaggccgagggcgaggggtgggagtacgcgagtctcttcggttggaaattccatcttgagtacaggaagacggacgcatttaggagacgtcgctggagacggagaatggagcccctagagaaaacgggacctgccgcagtattcgccttggaaggcgcactaggaggcgtgatggatgataaatctgaggattccatgtccgtgtccaccctgtcctttggtgtcaacagaccgactatcagctgtatttttgactatgggaaccgatatcacctccgctgctatatgtaccaggccagggatctggcggcaatggacaaagacagcttcagcgatccatacgcaattgttagctttctgcaccagtcccaaaagaccgtagtcgtcaagaacacactgaaccccacgtgggaccagactttgatcttttatgaaatcgagatttttggcgagccggcaactgtcgccgagcagcctccgagcatagtggtggaactctatgatcatgatacttacggcgccgacgaattcatgggtaggtgcatttgtcagccttccttggaaagaatgccccgcctggcttggttcccgcttacgcggggctcccagccttcaggcgagttattggcctcgtttgagctcatacagcgagagaagcctgcgatccaccacatccccggctttgaagtgcaggagacatctcggatcctggatgaatcagaagacacagatcttccgtatcctcccccccagagggaagcaaatatttatatggtcccacaaaacattaaacccgcactccaaagaaccgcaattgagattctggcctggggtctgcggaacatgaaaagctaccaactggcaaacatatctagccccagccttgtcgtggaatgtggtgggcaaaccgttcagagctgtgtgattcgaaatctgaggaaaaatcccaacttcgatatttgcaccctgtttatggaggtgatgctcccgagagaagagctgtactgcccacccataaccgtgaaggtgattgacaaccgacagttcgggaggcggccagtggtagggcaatgtacaatccgcagtcttgagagtttcctgtgcgacccctacagcgccgagtcaccttcaccccagggtggtccggatgatgtgtctcttttgagtcccggcgaggatgtgctgatcgacatcgatgacaaagaacccctgattcctattcaggaagaggagttcattgactggtggagtaagttcttcgccagtattggcgagcgggagaaatgtggctcctatctggagaaggattttgatacattaaaagtttatgatacccaactagaaaacgttgaagctttcgaggggctgagcgacttttgcaacaccttcaaactttaccggggaaagacacaagaagagactgaggacccttctgttatcggggaatttaaggggctgttcaagatctatccgctgccagaagatcccgcgatccccatgcctcccagacagtttcaccagttagcggctcaggggccccaagagtgcctggtgcgcatctatatagtgcgtgcgtttggactgcagcctaaggaccccaatgggaaatgcgacccatatatcaaaatcagtattggcaagaagagcgtctctgatcaggacaattatataccatgcacactggagccagtttttggcaagatgtttgagctcacctgtaccctgccattggagaaggatctgaaaattactctttatgactatgatctcctttctaaagacgaaaagattggcgaaactgtagtcgatctggagaatagactgttgagtaagttcggagcgcggtgtggtttgcctcaaacgtactgtgtctctggacccaatcaatggcgcgaccaactgaggccgagtcaactgttgcacttattttgtcagcagcatcgcgtgaaggcgcctgtgtacaggaccgaccgggtgatgttccaggacaaagagtattctattgaagaaatcgaggctgggcgaataccaaaccctcacctaggcccggtggaggaacgactggctttgcatgtgttgcaacagcagggtctggttccagagcatgtggagtcccgccctttatacagtccattgcagccggacatagagcagggaaaattacagatgtgggtcgacttgtttcctaaggcactggggcggccaggtccaccctttaacattactccccgccgcgctagaaggttttttctgagatgcattatttggaatacgcgagacgtcattcttgatgatctgtctctaaccggcgaaaagatgtccgatatttacgtcaagggatggatgatcggttttgaggaacataagcaaaagaccgatgtacactatcgatctctggggggcgagggcaacttcaactggcggtttatctttcctttcgactatctcccggccgaacaagtgtgcaccattgcgaagaaggatgcattttggcgcctcgacaagaccgagtccaaaatcccagctcgagtggtctttcagatctgggacaatgacaaattttcctttgacgactttttgggttcccttcagttggatctgaaccggatgcccaagcccgctaaaaccgcaaaaaagtgctctctcgaccaactggacgatgccttccaccctgagtggttcgtgtctctgtttgagcagaaaacagtcaaggggtggtggccctgcgttgcagaggagggtgagaaaaaaattcttgccggcaagctggaaatgaccctggaaatcgtagccgaaagtgagcacgaagagcgccccgctggccagggacgggacgagccaaacatgaaccccaagctggaggatcctcgcaggccagatacttcatttctgtggtttacctccccctacaagacaatgaagtttattctctggcgccgatttcgatgggctatcattctattcattattctttttatcctcctcctttttttagccatcttcatctatgcttttccaaactacgccgctatgaagctggttaaacctttctcc

SEQ ID NO: 10626 - DNA, 6243 bp, synthetic construct
  misc_feature 1..6243: note = source = /note="Description of Artificial Sequence: Synthetic coding sequence"
  source 1..6243: mol_type = other DNA
atgttgtgttgccttctggtgagggcaagcaatttgccgagcgcaaagaaggatcgtcgatcagacccggttgcgtccctcacgtttcgtggtgtcaaaaagagaacgaaggtgatcaaaaactccgtgaacccggtctggaacgagggattcgaatgggatctgaaggggataccacttgatcaaggctcggagcttcatgtcgtggtaaaggatcacgaaacgatgggacgtaaccggtttctgggcgaagcgaaggtgcctctgcgggaagtgctggcaactcctagcctgtccgcatcctttaatgcaccactgcttgatactaagaaacaacctactggagccagcctggtgctgcaagtgtcctacactccattgccaggcgcagtgccactgtttccaccgccaactcctctggaaccatcgcccactctcccagatctcgacgtggttgcagacacgggaggtgaagaggacaccgaagatcaaggactgaccggcgatgaggcagagccttttcttgatcaatcaggtgggcctggagcccctactaccccacgcaagctccccagcagacccccaccccattaccctggtattaagagaaagcggtccgcacctacctcaaggaaactgctgtcggacaagcctcaagattttcaaattcgtgtgcaggtgatcgaaggtagacaactcccaggagtgaacataaagccagtggtcaaagtgaccgcagcaggacagactaaacgtaccagaatacacaagggaaatagccctctctttaacgaaaccctctttttcaacctctttgacagcccgggagaacttttcgatgaacccatctttatcactgtggtcgacagccgatcgcttcgtaccgatgcccttctgggggagtttcggatggatgtgggcaccatttaccgggagccacgacacgcgtacctgcggaaatggcttctgctctcagacccggacgatttctcggcaggagcacgaggataccttaagacttcgctttgtgtgctcggacccggagatgaagcaccccttgaacgaaaggacccatcggaagataaggaagatatcgaatcgaacctgcttagacccacgggtgtcgcactcaggggagcacacttttgtctgaaggtgttccgcgctgaggacctccctcaaatggatgatgctgtcatggacaatgtaaagcaaatctttggttttgaatcaaataagaaaaacttggtcgatccctttgtggaagtgtcctttgcgggaaagatgctgtgttcaaagatccttgagaaaacggcgaatcctcaatggaaccagaacataactctgcctgcgatgttcccctcaatgtgtgaaaagatgcgaattaggattattgactgggatagacttacccataatgacatcgttgcgactacttacctctcaatgtccaagatatccgcgccaggtggggagattgaagaagagcccgccggggctgtgaaaccttcaaaggcatcagaccttgatgattaccttgggtttctgcccacctttggtccgtgctacatcaatctttacggttccccgcgggagtttactggattccctgacccttacaccgagctgaacactgggaagggagaaggggtcgcataccgggggagattgctgctttcgctcgaaactaagctcgtggagcattccgaacagaaggtggaagatttgccagcagatgatatcctgcgcgtcgaaaagtatctgaggcggcgtaagtactccctgtttgcagcattctacagcgcaaccatgctgcaggacgtggatgatgcaatccaattcgaagtgagcataggcaactacgggaacaaattcgacatgacctgcctcccactggcatcaaccactcaatactcaagggccgtgtttgacggatgtcactactactaccttccttggggaaacgtgaagcctgtggtcgtcttgtcatcatattgggaagatatcagccatcgtattgaaactcaaaatcagcttcttggaattgcagacagactcgaagcaggactggagcaggtgcatctcgcccttaaagcgcaatgttccaccgaggatgtggattccctggtggctcaacttaccgatgaactcattgcggggtgctcgcagcctctcggtgatattcacgagactcctagcgcgactcatcttgaccagtacctgtaccaactgcgaacccatcacctcagccagatcacggaagctgcactcgctctgaaactcggtcacagtgaacttccagccgccctggaacaggcggaggattggcttctcagacttcgcgctcttgcagaagaacctcagaactcattgccagacatcgtcatatggatgctgcaaggagataaaagagtggcgtaccaacgagtgcctgcacatcaggtgctctttagcagaagaggtgcaaattactgtgggaagaactgtgggaagctccagaccatcttcttgaaatacccaatggaaaaagtcccaggagcccgcatgccagtgcaaattagagtgaagctgtggttcggactgagcgtggatgaaaaggagtttaatcagtttgcagaagggaagctgtcagtgtttgcagaaacctacgaaaacgaaactaaactggcactcgtgggtaactggggaacgaccggcctgacgtaccccaagttttcagacgtgacgggcaagattaagttgccaaaggatagctttcggccatcggcaggttggacctgggccggtgattggtttgtgtgccctgagaaaacgcttcttcatgatatggacgcaggacatctcagctttgtggaagaagtctttgaaaaccaaacccggctccctggaggccagtggatctacatgagcgataactatactgatgtgaacggtgaaaaagtgcttcctaaagatgacattgagtgccctctcgggtggaaatgggaggacgaagaatggtcaaccgacctgaacagagccgtggatgagcaagggtgggaatatagcatcactattccaccagagcggaagccaaagcactgggtgccagccgagaagatgtactacacccaccggaggaggagatgggtgaggctgcgtcggagagatctttcgcaaatggaagcactgaaacgtcatcggcaagcggaagcagaaggcgaaggatgggagtatgcgtccctgtttggatggaaatttcatcttgaatacagaaaaaccgatgcatttcggagaagaagatggcggcggcgcatggagcctcttgaaaagaccggacctgcagccgtttttgcactggaaggcgcattgggaggagtcatggatgataaatccgaagattcaatgtcagtgagcactcttagctttggggtgaacagaccaactatttcctgcatctttgactatggaaataggtaccacctgagatgttacatgtaccaagcccgggatctggctgcaatggataaggattcgttctccgacccatacgccattgtgtcgtttctccatcaaagccaaaagacggtcgtggtcaagaacactctgaatcctacctgggatcagactctcattttctatgagattgagatctttggggaaccagcaactgtcgcagaacagcctccaagcatcgttgtggaattgtacgatcatgacacgtatggggcagatgaattcatgggaaggtgtatttgccaacccagccttgaaagaatgcctcgccttgcgtggtttccactgactagaggttcgcagcctagcggcgagctgctggcatcattcgagcttatccaaagagaaaagcctgccattcaccacatccctggatttgaagtgcaggagacgtcgagaatactggatgaatccgaggacactgacttgccatacccaccgccccaacgtgaggcaaatatctacatggtgccacaaaacattaagcctgcactccaaagaaccgcaatcgaaatcttggcatggggacttcggaacatgaaatcataccaactggcgaacataagctccccaagccttgtcgtggaatgtggaggccagactgtccaatcatgtgtgatcagaaaccttagaaagaaccccaactttgacatctgtaccctcttcatggaggtgatgttgcctcgcgaagaactttattgtccccctatcaccgtgaaagttattgataaccgccagttcggtcgcagacctgtcgtgggacaatgtaccatccgctccctcgaatcatttctttgtgatccctactcggctgagtcgccatcgcctcaaggaggtcctgacgacgtgtcacttctttcgcctggcgaagatgtgcttattgatattgacgataaggagcctttgataccgatccaagaagaggaattcattgattggtggtcgaagttcttcgcttccatcggagaaagagaaaagtgtggatcatacctcgagaaggattttgacacccttaaggtctacgacacccagctggaaaatgtcgaggcgttcgaaggtctttcggatttttgtaacacgtttaagctgtaccgaggtaagactcaggaggagactgaggacccctccgttattggggaattcaagggactctttaagatctaccctttgcctgaggatcctgccattcctatgccgccccggcaatttcaccagcttgccgcacaaggtcctcaggaatgcctggtgagaatatacattgtgcgcgcattcggtctgcagcccaaggacccaaatggtaaatgtgatccatacataaagatttctatcgggaaaaagtctgtttcagatcaggacaattacatcccttgtaccctcgaaccggtctttggtaagatgttcgaactgacctgtaccctgccgcttgaaaaggatctgaagataactctgtacgattacgatctgctttcgaaggatgaaaagatcggggaaaccgtggtggaccttgagaacagacttctgtcgaaattcggcgcaagatgtggactgcctcaaacctattgcgtctccggtccgaaccagtggcgagatcaattgcgtccatcgcagctgttgcaccttttctgtcaacagcatagagtgaaagccccggtgtacaggaccgatcgggtcatgtttcaagataaggagtatagcatagaagagattgaggctgggcgtattcctaacccacacctgggccctgtcgaggagaggctggccctgcatgtgcttcagcagcagggactcgtgcctgaacatgttgaatcgaggcctctctacagcccactccagcctgacattgaacaaggaaagctgcaaatgtgggttgaccttttccctaaagcacttggacggcccggcccgccgtttaacataactcccagaagagcgagacgcttttttcttcgctgcatcatttggaacacgagagatgtgatactggatgatctgtcactgaccggagaaaagatgtcggatatctacgtgaagggttggatgattggttttgaagaacacaagcaaaagaccgacgtgcattaccgttcgcttggtggagaagggaactttaactggagattcatattcccttttgactacctgcctgcggagcaggtgtgtactattgctaaaaaggatgcattttggcggcttgataaaaccgagtcaaaaatccctgcaagagtggtgttccagatctgggataacgataagttctcttttgacgactttctgggatctcttcagcttgatcttaaccgaatgcctaagccggcaaagactgccaagaagtgctccctggaccagcttgacgacgcatttcatccagaatggttcgtgtcgctcttcgagcaaaagactgtgaaagggtggtggccctgcgtggccgaagaaggagagaaaaagatcctggcgggtaagctggaaatgacccttgaaatcgtggctgaatccgaacatgaggagcgacccgctggtcaagggagagatgaacctaacatgaatccaaaacttgaggatcctcgtagacctgacacttccttcctttggttcaccagcccatacaagaccatgaagtttatcttgtggcggcggttcaggtgggcaatcattctgttcattattctcttcattctgctgctctttctcgcgattttcatatacgcatttccaaattacgcagcaatgaaactcgtcaagccttttagc

SEQ ID NO: 10627 - DNA, 6243 bp, synthetic construct
  misc_feature 1..6243: note = source = /note="Description of Artificial Sequence: Synthetic coding sequence"
  source 1..6243: mol_type = other DNA
atgctgtgttgcctcctggtcagagcctccaacctgccgtctgcaaagaaggacagaagatcggacccagtggccagccttacctttagaggagtgaaaaaacggacgaaggtgataaagaacagcgtgaatccagtgtggaatgaaggatttgaatgggacctcaagggaatacctctcgaccagggaagcgagcttcatgtggtggtgaaggatcatgaaacgatgggccgaaacaggttcctgggagaagcaaaagtgcctcttagagaagtgttggcaaccccatctctcagcgcatccttcaacgcccctttgcttgacaccaagaaacagcctaccggagcaagccttgtccttcaggtgtcgtatactccgctgcctggcgctgtgcctctttttcccccacctacccctcttgaaccatcgcccactctcccagatctcgacgtggtggccgataccggaggagaagaagatactgaagatcaaggcctgactggcgatgaagcagaacctttccttgaccagtccggcgggcctggcgcgccaactaccccccgcaagctccctagcagaccaccaccacattatcctggcatcaagagaaagaggtcggccccaacgtcgcgtaagctgctcagcgataagcctcaagacttccagattagggtccaggtgattgaaggacgacagcttcctggagtgaacattaagcccgtggtgaaagtgaccgcagcaggacaaaccaagcgcactaggatccataagggaaactctccacttttcaatgaaactttgtttttcaatctgtttgactcccccggggaacttttcgatgaacctatattcattactgtcgtggatagcaggagcctcagaacggatgctttgcttggggagtttcgaatggatgtggggaccatctacagagagcctcgacacgcgtacttgcgaaagtggcttctgctgagcgatcccgacgacttttcggcaggggctcgaggttacctgaaaacgagcctctgcgtcctcggacctggagacgaagcccctcttgaaagaaaggacccttccgaggacaaggaggacattgaatcgaacctgctgcggcctaccggtgtcgcgctcagaggagcgcacttttgtctgaaggtgtttcgtgcagaagatctcccgcaaatggatgatgcagtgatggataatgttaaacagatctttggttttgagtccaacaagaaaaatcttgtggatccttttgtggaagtgagctttgctgggaagatgctttgcagcaaaatcctggagaaaaccgcaaatccacaatggaaccagaacataacgctccccgccatgtttccttcaatgtgtgaaaagatgcgcataagaattatcgattgggataggctgacccataatgatattgtggcaaccacctacctttcgatgtcgaagatttccgcaccaggcggagaaatagaggaggaacctgcaggcgcggtgaaaccctcgaaagcgtcagatctggatgactacctgggttttctgcctactttcggaccttgttacatcaatttgtacgggagcccgcgcgagtttaccggatttcccgatccctacactgagctcaacactggtaaaggagaaggagttgcgtacagaggcagattgctgctctcactggaaactaagctcgtggagcattccgagcaaaaggtcgaagatctcccagcagatgacattttgagggtcgagaagtacctccgcagacgcaagtactctttgtttgccgcattttactccgcgaccatgcttcaagacgtcgacgatgccatccagtttgaagtgagcattggaaactacggtaataagttcgatatgacttgccttccgcttgcatcaactacccaatattctcgcgcggtctttgatggctgtcattactactacctgccatgggggaatgtgaagccagtggtggttttgtcatcatactgggaggacatatcccatcgcattgagacgcaaaatcagctgctgggaattgctgatcgtcttgaggctggtcttgaacaagtgcatctggccctcaaggcacaatgttcaactgaagatgtagactccttggtggcgcaattgacggatgaactgatcgccgggtgttcccaacctcttggagacatacacgaaactccttcagcaactcatctggatcagtacttgtaccagcttcgcacccatcatctgtcccaaatcaccgaagccgctctggcgctgaagttgggtcactcggagcttccagcggcacttgaacaggcagaggattggttgctcagacttcgggcacttgcggaggaaccacaaaacagcctccctgatattgtgatctggatgttgcaaggagataagagagtcgcatatcaacgagtgcccgcgcatcaggtgcttttttcacgtaggggagcaaactactgtggcaagaattgtggaaaacttcagaccatttttcttaagtatcctatggaaaaagtccctggtgcccgcatgcctgtgcagattcgagtcaagctctggtttggactctcggttgatgagaaggagtttaaccaattcgctgaaggaaagctgtccgtgtttgctgaaacctacgaaaatgaaacgaagctcgcactcgtcggaaactggggaaccactggactcacctacccaaagttctcggatgtcaccggtaaaatcaagttgccaaaggactcgtttcggcctagcgcaggttggacctgggccggcgattggtttgtgtgtcccgaaaagaccctgctgcatgacatggacgccggtcaccttagctttgtcgaagaagtgtttgaaaaccagactcgactgcccggcgggcagtggatctacatgtcagataactacaccgatgtgaacggtgagaaggtcctgcccaaagatgatatcgaatgtccactgggctggaaatgggaggacgaggaatggagcaccgacctgaatagagcagtagatgaacaaggttgggaatactcaatcacgatacctccagaacgaaagccaaagcattgggtgccagcagaaaagatgtactacactcatcgtaggagacgttgggtcagactgcggagacgggatctttcgcaaatggaagccctgaagcggcaccggcaagcggaagcagagggtgaaggttgggagtacgcgtcgctgtttggatggaagttccatcttgaataccgtaaaaccgatgctttcaggaggcgtaggtggcggcgtaggatggagccactcgagaaaactggcccggcagcggtctttgcactggaaggtgcgctcggtggtgttatggacgataagtccgaagattcaatgagcgtctccactctgtccttcggagtgaaccgtccgactatcagctgtatctttgactacgggaacagataccatcttcggtgctacatgtatcaggccagggatcttgcagcaatggataaggacagcttctccgatccttacgcaatcgtctcgttcctgcaccaatcgcagaaaacggtggtcgtgaagaatactcttaaccctacctgggatcaaactctgatcttttacgagatagagatttttggcgagccagcgaccgttgccgaacaacccccttccatagtggtggaactttacgatcatgatacctacggcgcagatgagttcatgggtcgatgtatctgccagccttcgcttgaaagaatgcctcggctggcctggtttccgctcacccggggatcgcaaccttccggagaactcctggcatcctttgagttgatccaaagagagaagcccgctattcatcatataccgggtttcgaagtgcaggaaacctcccgcattcttgatgagtccgaagatactgacctgccttacccaccgccccagagagaagcaaacatctacatggtgccgcaaaacataaagcccgccctgcagcgcactgcgattgaaatactcgcctggggactccggaatatgaaatcgtaccagctggcaaatatctcatccccttcgctggtggtggagtgcggtggtcaaaccgttcaatcctgcgtgatccgcaatctccgcaagaatcctaactttgatatttgtaccctcttcatggaagtgatgcttccacgtgaagaactttactgtccaccaattactgtgaaagtcatcgataataggcaattcgggagacgccctgttgttggtcaatgcaccattcgcagcctggaatcatttctctgcgatccctactcggcagagtcaccatcccctcagggtgggccagatgatgtgtcgctcctttccccaggtgaggatgtcctcattgacatcgatgacaaagagcccctgatccctattcaagaagaggaattcattgattggtggagcaagtttttcgcatccatcggtgaacgcgaaaagtgtggatcctacctggaaaaggacttcgatacccttaaagtgtatgacacccaactcgagaacgtggaagccttcgaaggactcagcgatttttgtaacaccttcaaactgtaccggggaaagactcaagaagaaactgaggacccctcagtgatcggtgagtttaagggtttgtttaagatctaccctctccctgaagatcctgccattccaatgcctccacggcaatttcatcaactggcagctcaagggcctcaagagtgccttgtcaggatttacatagtacgggcctttggcctgcagccgaaggatcctaatggtaagtgtgatccttacattaagatctcgatcggcaagaaaagcgtctccgaccaagataactacatcccatgtactctggagcctgtgttcggcaaaatgttcgaactgacctgcaccctccctcttgagaaggacctcaagattaccctgtacgactatgacctgctgtccaaggatgaaaagatcggagaaaccgtggtggacctcgaaaaccgccttctttcaaaattcggagctcgatgtggtttgccccaaacttattgtgtctcgggaccgaaccagtggagagatcagcttagaccatcccagctcctccatcttttttgccaacaacacagagtgaaggcacccgtgtaccggaccgatagagtgatgtttcaagataaggaatacagcatagaagagattgaagcaggaagaatcccaaaccctcatctgggtcctgtggaagaacgcctggcacttcatgtgctgcaacagcagggccttgtgccagaacatgtggagtcgcggcctctgtactcgcctcttcagcctgatatagaacagggtaagctccaaatgtgggtggatttgttccccaaggcgcttggacgtccaggaccaccttttaacattactccaagacgcgcacgtaggttttttctccggtgtataatctggaacacgagggatgtcatcctggacgatctgtccctgaccggcgaaaagatgtcagacatctacgtgaagggatggatgattggatttgaggagcacaaacagaaaaccgatgtgcactaccgctcgctggggggagagggaaatttcaattggagattcatttttccttttgattacctgcctgcagagcaggtgtgtaccatcgccaaaaaggatgccttctggagacttgataagaccgaatctaagattcctgcccgggtggtattccaaatctgggacaacgataagttctcatttgatgatttcctcggatccctccaacttgatctgaaccgaatgcccaaaccagcaaagaccgccaagaagtgctcactcgatcagctggatgatgccttccatccagagtggttcgtgtccctcttcgaacaaaagacggtcaaaggatggtggccgtgcgtcgcagaggagggggaaaagaagattctggcaggaaagttggaaatgaccctggaaatagtggcagaatcagaacacgaagaacgacctgcagggcaaggacgtgatgaaccaaacatgaacccaaaactggaggatccacgaaggccagatacttcattcctctggttcacctcaccctacaaaaccatgaagtttatcctgtggcgacgatttagatgggctattatccttttcataatccttttcattctgctgctgttcctggctatcttcatatacgcattccccaattacgcagccatgaagctggtgaaacctttttcg

SEQ ID NO: 10628 - DNA, 6243 bp, synthetic construct
  misc_feature 1..6243: note = source = /note="Description of Artificial Sequence: Synthetic coding sequence"
  source 1..6243: mol_type = other DNA
atgctgtgttgtctgctggtccgggcgagcaatcttccctccgcaaaaaaagatcgtaggagcgatcctgtcgcatccctcactttcaggggggttaagaaaagaacgaaggtcattaaaaatagcgtcaacccagtctggaacgaagggttcgagtgggatttgaaaggcatccccctggaccagggaagcgagttgcacgttgtagtgaaagaccatgaaacgatgggtcggaacaggtttttaggagaggcaaaggtgcccctgcgggaggtactcgcgaccccttcactcagcgctagttttaatgctccccttctcgataccaaaaaacagcccactggggccagcttagtgttgcaggtgagttacacacctttgccaggagctgtgcctctgttccctccccctactcctctggagccatctcctacattgcctgatctcgatgtcgtcgccgacaccggtggcgaggaagacacagaagaccagggcctgaccggtgatgaggcggagccgttcctcgatcaatccggcggtccaggcgccccaacaactcctcgcaaattgccgtccagaccaccgcctcactatcctggcattaagcggaagcgatcggcacccactagtaggaagttactgtcggataagccacaggattttcagatccgcgtgcaagtgattgaaggtaggcaattgcctggcgtcaatatcaaacctgtcgtgaaagtaacagcagccggtcagactaagcgaacacgtatccataaggggaactctcctttgttcaacgaaaccctcttcttcaatctgttcgacagccccggcgagctgttcgatgagccaatattcatcacagtggtcgattcaagatccctcagaaccgacgctctgctgggcgaattccgtatggacgtgggaactatctacagggaacccagacatgcgtacctgcgaaaatggctgctgctgtccgacccggatgacttcagcgccggcgccaggggctatcttaaaaccagcctttgcgtccttggaccaggtgacgaggccccgttggagagaaaggatccatcagaggacaaagaggatatagaaagcaatctgctcagaccaacaggggtggcactgaggggcgcccacttctgccttaaagtcttcagggctgaagacctgcctcagatggatgatgcggttatggacaacgtaaagcagatcttcgggttcgagtctaacaaaaaaaatctggtagacccgttcgtggaggtctcctttgccgggaaaatgctgtgctcaaagatccttgaaaaaactgccaatccccaatggaaccaaaacataactcttcccgcaatgtttcccagcatgtgcgagaagatgaggatccgcatcatcgactgggataggctgacccacaacgacatcgtagctacgacttatttgtctatgtcaaagatttctgctcccggtggagaaatagaggaggagccagctggcgccgttaaaccctccaaggcatcagatctggacgattacctgggttttttgcctactttcggtccttgttacattaatttgtatggcagtccacgtgagtttacagggttccccgatccttacactgagttgaatacgggcaagggagagggggtggcataccggggacggcttttgctgagtctcgaaaccaagctagttgagcactccgaacagaaagtggaagatctccccgccgacgacatacttcgcgtggagaaatatctgcgaagacggaaatactcactattcgcagccttttatagcgcaaccatgctgcaggacgtggatgacgcgatacagtttgaggtgagtatcggtaactacggaaacaaattcgacatgacctgcctgccgttggcctccacgacccagtacagcagagccgtcttcgacggatgccactattactatcttccctggggaaatgttaagcccgttgtagttttgtcctcctactgggaagacatctctcatcgaattgagacccagaaccaactcctgggaattgccgatcggctcgaagctggcctggagcaagtgcacctggccctgaaggcgcaatgtagtactgaggacgttgactccctcgtggctcaactgacagatgaactgatcgcgggttgttcccagccactaggggatatacatgaaacaccctcagcaacccatcttgaccagtatctgtatcaactgcgtacacaccacctgtcacagataaccgaggccgccctggcactgaagctggggcactctgagttgcctgccgcactcgaacaggccgaggattggcttctgaggttgagggctctggctgaggaaccccaaaatagtttaccagatattgttatttggatgctacagggggacaagcgtgtggcataccagcgggtgcccgcgcatcaggttctcttttcccgccgcggggcaaattactgcggaaagaattgtggaaaactccagaccatttttcttaagtatcctatggaaaaagtcccgggtgctaggatgccagtacaaatccgggtgaaactctggttcgggctgagcgtagacgagaaggagttcaaccagtttgccgagggaaagttgagcgtttttgcggagacctatgaaaacgagaccaagctagccttggtgggcaattggggtaccacaggtttgacgtaccccaaatttagtgatgtgaccggaaagatcaaactgccgaaggatagcttcaggccatcagcagggtggacgtgggccggagactggttcgtatgtcccgagaagacactgctgcacgatatggacgctggacacctgtctttcgtcgaagaagtgtttgaaaatcagacacggcttcctggagggcagtggatttatatgagtgataactatacggacgtgaatggggagaaagtcctcccgaaagacgatattgagtgccctttaggatggaagtgggaagacgaggaatggagcaccgatctgaaccgggccgtggatgagcaaggctgggaatactcgattaccatcccacctgagcgaaaacctaagcactgggtgcctgcagagaaaatgtactacacccacagacgcagacgctgggtgcgccttagaaggcgagacctatctcagatggaggccctcaaaagacaccggcaagcagaggcggagggggagggatgggaatacgcttctctctttggttggaaatttcacctagagtataggaagaccgatgcattcagaaggagacgctggcggcggcgaatggagccactcgagaagaccgggccagcagctgtttttgcgctggagggggcgctcggaggagtgatggatgataagtcagaggacagtatgtccgtcagtaccctgtccttcggtgtcaacagacctactatatcatgcatcttcgattacggcaataggtaccacctgcgatgctacatgtatcaggcgagggaccttgcagcaatggacaaagatagctttagcgacccatatgctattgtgtctttccttcaccagtcacagaaaaccgtcgtggtaaaaaacacgttgaaccccacatgggaccaaaccctgatcttttacgagatagaaatcttcggggagcccgccaccgtggctgaacagcccccctctatcgttgtggagctctacgatcacgatacatacggggctgacgaattcatggggcgttgtatatgccagccttcactggagcgaatgcctcggttagcttggttcccactgactaggggctcccagccatccggagaacttctggcaagcttcgaactaatccaaagggaaaaaccagccatccaccatatccccggtttcgaagtgcaggagactagcagaattcttgatgagtcggaggacaccgacctcccctaccctcctccccagcgggaagccaacatctatatggtcccgcagaatattaagcccgctctgcagcgcacagcaatagagatcctggcctgggggctgcgcaatatgaagtcctatcagctagccaatatctcatccccctcactagtagtagagtgcggcgggcagaccgtgcagtcgtgtgtaatacggaacctgcgaaagaatcctaattttgatatctgtactttgtttatggaggtcatgctgccgcgagaggagctgtactgtcctcctatcacagtgaaagtaattgataaccgccagtttgggcgaaggcccgtggtgggacagtgcacaattagatccctcgagagtttcttatgtgatccttactcagccgagagcccatcaccgcagggaggccctgatgacgtcagtttgctttccccgggcgaggatgtgctcattgacatagacgataaggagcctcttatacctatccaagaagaagagtttattgactggtggagcaagttcttcgcgtcaattggcgaaagagagaaatgcggcagctatctggaaaaagatttcgatacccttaaggtctacgatacacaactcgaaaacgtcgaggccttcgaaggactgtccgatttttgcaacactttcaagctttacagggggaagacgcaggaggagacggaagatcccagcgttatcggagagttcaagggcttgtttaagatctatcctttacctgaggacccggccatcccaatgccgcctcggcagtttcatcaattggcagcccagggccctcaggaatgcctggttcggatctacatagtcagagcatttggtctgcagcccaaagaccctaacggcaagtgtgatccctatattaagatctcaattggaaagaaaagcgtctccgatcaggacaactacatcccctgcacacttgaacctgtgtttggaaaaatgttcgaattgacatgcacacttcccctggaaaaagatctgaaaattacgttgtacgactatgacctgctgagtaaagacgagaagatcggggagaccgtcgtcgatctggagaaccgcctgctatcaaaattcggtgccaggtgcgggctgccacagacctactgcgtatccggacctaatcaatggcgagaccaactaaggccatctcagctgttacatcttttctgccagcagcaccgggtgaaggctcctgtttatcgtacagacagggtgatgtttcaagacaaggaatatagtattgaggagatcgaggccggcagaatacctaacccccatctcggccccgtagaggagaggttggctttgcacgtgctgcaacagcaaggattggttccagaacacgtcgaatcccgcccgctgtactctcctctgcagcctgacatagaacaagggaagctgcagatgtgggtggatctgtttcccaaagctctgggcagacctggaccacccttcaatatcacgccccggagggctcgccggttttttctgaggtgcattatctggaatacaagggacgttattctagacgacttgtcactgacaggcgagaagatgagtgatatatatgtgaaaggttggatgattggtttcgaggagcacaagcagaagacagatgtacactacagatccttgggtggtgaaggcaacttcaactggcggttcatcttccccttcgactatctgcccgctgagcaggtgtgcaccatcgcaaaaaaagatgccttttggaggctagacaagacagagtccaaaattccagcacgcgtcgtttttcagatatgggataatgataagtttagctttgacgactttctcggaagtctgcaactcgatctaaatcggatgcctaaacccgccaaaacagccaagaaatgctccctggatcagctagatgacgctttccaccctgaatggtttgtgtccctatttgaacagaaaactgttaaaggctggtggccctgtgtcgctgaggaaggagagaagaagatcctggccgggaaattagagatgaccttggaaatagtagcggagtctgaacacgaggagcgacctgcgggacagggccgtgacgaacccaatatgaacccgaagctggaagatcctcgcagacctgatacatccttcttgtggttcacttctccttacaagactatgaaattcatactttggaggcgttttaggtgggcaattatactgttcattattctttttatcctgcttttgttcctggcaatattcatctatgctttccccaattacgcagccatgaaactggtcaagcccttcagc

SEQ ID NO: 10629 - DNA, 6243 bp, synthetic construct
  misc_feature 1..6243: note = source = /note="Description of Artificial Sequence: Synthetic coding sequence"
  source 1..6243: mol_type = other DNA
atgctgtgttgtctgttggtgcgagcatccaacttgccttcagccaagaaagatcgcaggtccgaccctgtggctagtttgactttcagaggggtaaaaaaacggactaaggtgatcaaaaattctgtgaatccggtgtggaatgaaggcttcgaatgggacctcaagggaattccccttgatcagggttctgagctgcacgtggttgtgaaagatcacgagacaatgggaaggaaccgcttcctcggcgaggccaaggtgcccctgcgcgaggtcttagcgacaccatctttatctgccagctttaacgccccactgctggacacaaagaagcagcctacaggagcttctctggtactgcaagtgagctatacacctctccccggagccgtacccctgttccccccccctacccccctggaaccttcacccacacttcctgatcttgatgtggtcgccgacacgggtggggaagaggacaccgaggaccagggcctaactggggatgaggccgaacccttccttgaccagagcggggggccaggcgcaccgactacccctaggaagctgccctcccgtccccctccccactatcctggtatcaagcgcaagcgctcagcacctacatcccgcaaacttctgagtgacaagccccaggatttccagatcagggttcaggtcattgagggtcgtcagttgcccggagttaatatcaagcccgtcgtgaaagttaccgccgctggacaaaccaaaagaacccgaattcacaagggaaattcacctctgtttaatgaaaccttgttctttaacttgttcgatagcccgggcgagttgtttgacgagcctatctttatcactgtcgtcgacagccgctctctgcgcactgacgcattgctcggcgagtttaggatggatgttggtaccatttaccgggagccaaggcacgcatatctgcgcaagtggctcctcctgtctgaccccgacgacttttccgccggagcacggggttacctcaaaacttccctatgtgttttggggcctggcgatgaggcccctctcgagcgcaaggatcccagtgaggacaaggaagatatagaatcaaatcttctgagaccgactggggtggccctgcggggtgcacatttctgcctaaaggtgtttcgcgcagaggaccttccccagatggacgatgcggtaatggataacgtgaaacagattttcggattcgaatccaataaaaagaacctcgtggatccttttgtggaagtgagttttgctggcaagatgctgtgcagtaagatcctagaaaagacagctaatccacagtggaaccagaacattacactacccgcaatgttcccctctatgtgcgagaaaatgaggatacgcatcatcgactgggataggctgacgcacaacgatatagtggcgacaacctacctgtctatgagcaaaatttccgcccctggaggggagattgaagaggaaccagctggagctgtgaagcccagtaaagcatcagatctggacgactatctgggtttcttgcccactttcggcccatgctacatcaatctgtatggatctcctagagagtttactggattcccagatccatacaccgaactcaatacgggcaagggcgagggtgtcgcctacaggggtcgattgctcctctctctggaaactaaacttgtagaacattccgagcagaaggtggaagacctgcctgccgatgatattctccgggtggagaagtacttacgcaggcggaaatatagcctttttgccgcgttctatagcgctacaatgttgcaggacgttgatgacgccatacagttcgaagtgagcatcggaaattatggaaataaattcgacatgacttgtcttccactggcttccaccacccaatattcccgcgctgtctttgacggttgccactattactatctgccatggggcaatgtgaagccggtggtggtactgtcgtcctactgggaggatatcagccacagaattgaaactcagaatcaactactgggtatagccgatcgtctcgaggcaggcttggagcaggtgcacctcgccttgaaggcccagtgttcaactgaggatgtggacagcctggttgcccagctcaccgatgaactgatcgcagggtgtagccaacccctgggcgatattcatgaaaccccatccgccacacaccttgaccaatatctctaccaactcaggacccaccatctgtcgcaaattactgaggccgccctggcactaaagttaggtcacagtgagctgccagcagcacttgaacaggctgaggattggctactccggcttcgagcgctcgcagaagagccacagaattcgctccctgatattgtgatctggatgctccagggggataagagggtggcctaccagagggtcccagcacaccaggtcctgttcagccggcggggagcaaattactgtggcaagaattgtggtaagctacagacaattttccttaaatatcccatggaaaaggtgccaggggctcgaatgccagtgcagataagagtgaaactgtggtttggattgtccgtggacgagaaagagttcaaccaatttgccgaggggaaactttccgtttttgccgagacatatgagaatgaaaccaaactggccctcgtggggaattgggggacaaccggactgacctaccctaagttctccgatgtgacaggaaagatcaagttgcctaaggatagctttcgcccgtctgctgggtggacctgggcgggcgattggtttgtttgtcccgaaaaaactttgctgcacgatatggatgcgggccacctgagcttcgtggaggaagtgtttgaaaaccaaacgcggctcccaggcggacagtggatctacatgtccgacaactatacagacgtgaatggtgagaaggtgctgcccaaagatgacatcgaatgtcctctggggtggaagtgggaagatgaagaatggtccactgacctgaaccgggctgttgatgagcagggctgggagtacagcatcaccataccacctgagcgcaagcctaaacattgggtgccggctgaaaagatgtactacacccatcggcggagacgctgggtcaggttgcggcgtcgcgatcttagccagatggaagccttgaagcgtcaccggcaggccgaggccgagggggaagggtgggaatatgcttcccttttcggttggaagttccaccttgagtatcggaagaccgacgcattccgtcgacggcgttggagacgcagaatggaaccactggagaagaccggtccagctgccgtctttgcgctagaaggcgcattggggggagtgatggacgataagagcgaagatagtatgagtgtgtccactttgagcttcggcgtgaataggccaaccatttcatgcatctttgattacggcaataggtatcacctcagatgttatatgtatcaagctagggacctcgccgctatggataaagattccttcagcgatccatatgcaatagtgagctttctgcaccagagccagaagacagtggtggtgaagaacaccttaaacccaacctgggaccagactctgatcttctatgagattgagatattcggcgagcctgcgactgtggctgaacagccccccagtattgttgtcgaactgtacgaccatgatacttacggcgcggatgagttcatgggtcggtgtatctgccagccctccctggaacggatgcccagacttgcttggtttcccctaacgcggggttcacaaccctctggtgagctgctggctagcttcgaactgatacagcgcgagaagcccgctatccatcacattccaggcttcgaggtgcaggaaaccagcaggatactggacgagtccgaagatacagatctgccgtaccctccccctcagcgagaagctaacatctatatggtgccccagaacatcaagcccgcgttgcagaggaccgctatcgagatcctggcatgggggctgcgaaacatgaagagctaccaacttgcaaacatctcgtccccgagtcttgtagtcgaatgtggcggacagaccgtgcagtcttgtgtcatcaggaacctcaggaagaatccaaactttgacatttgcactcttttcatggaagttatgttgccaagagaagaactgtattgcccccccattactgtgaaggtcatcgataatcggcaatttggcagacgacccgtggtcgggcaatgtaccatccgctccttggagtcattcctctgcgacccttattccgctgaaagcccctcccctcaagggggccccgacgatgtctcactgctatcaccaggcgaagatgttctcatcgatattgacgacaaagaacctttgatcccgatccaggaagaggagttcattgattggtggagcaagttctttgcatcgattggagaaagagaaaaatgcggatcataccttgaaaaagactttgacacactgaaggtctacgacacacaacttgagaacgtagaagcatttgagggcctatcagacttctgcaataccttcaaactgtacagagggaagacccaggaagaaaccgaggatccgagtgtgataggggaatttaaaggtctcttcaaaatctacccactcccggaggatcctgccatccccatgcccccacgacagtttcatcaacttgcagcgcagggcccccaagagtgcctcgtgcggatttacatcgttcgggctttcggcctgcaaccgaaggatccaaacggtaaatgtgacccttatataaaaatcagcattggtaaaaagagtgtctccgatcaggacaattatatcccctgtacgttggagccagtgtttggaaaaatgtttgaattaacctgtacccttcccttagagaaagatctgaaaattacactgtacgactatgacttattgtctaaggacgaaaaaattggagaaactgttgtagatctcgagaatcggctcctttcaaaattcggggccagatgcggtctaccacagacgtactgcgtctcaggacctaaccaatggcgggaccaactcagacccagtcaactgctgcatctcttttgccagcagcaccgggtgaaagcccctgtctatcgaacagatcgggtgatgtttcaggataaagagtacagcatcgaggagattgaggcagggaggatacccaatccacacttaggaccagtggaagaacgcctggccctgcatgtgttgcagcaacagggcttagttcccgaacacgtagagtcgagacctctctactcccccctgcagcccgacattgagcagggtaagctgcaaatgtgggtggatctcttcccgaaggcgctgggtcggcctggccccccattcaacattaccccgagacgcgcacgacggttctttctccggtgcatcatctggaatactcgcgatgtaattctggacgacctctccctcaccggtgaaaaaatgtccgatatttacgtcaaaggttggatgatagggtttgaggaacataagcagaaaacagacgtacattacaggtccctcggtggagaaggaaacttcaattggcgctttatcttcccttttgattatctgccagcggaacaggtttgcactatagctaagaaagacgcattttggcggttagataagaccgagagcaaaatacccgctagggtggtgtttcagatctgggacaacgataaattttcctttgatgacttccttggatctctccagcttgacctcaacaggatgccaaagcccgcgaaaaccgcgaagaagtgctccctcgaccagctcgatgatgcgttccacccagagtggttcgtgagcttgttcgagcagaagactgttaagggctggtggccctgcgttgctgaagaaggtgaaaaaaagattctcgctggcaagctggagatgacccttgagatagtggccgaatctgaacatgaggagagaccagctggacagggacgggatgaacccaacatgaatcctaagttagaggacccaagacggccagacaccagcttcctctggttcacatctccctacaagacgatgaaattcatcctgtggcgcaggtttagatgggctatcattctgttcataatactgtttattctcttattatttttggcaatattcatttatgcttttcctaactacgcggcaatgaaactggtgaagcctttctcc

SEQ ID NO: 10630 - DNA, 6243 bp, synthetic construct
  misc_feature 1..6243: note = source = /note="Description of Artificial Sequence: Synthetic coding sequence"
  source 1..6243: mol_type = other DNA
atgctgtgctgtctcctcgtccgggctagcaatctccctagtgcaaaaaaggatcgacggtctgacccggttgcatccctcacgttcaggggggtgaaaaagcggaccaaggtcatcaagaactctgtaaatcctgtgtggaacgaggggttcgaatgggacctcaagggcattcccctcgatcaaggctctgaattgcacgtggtcgttaaggatcatgaaacaatgggcaggaatcggtttctgggagaggcaaaggtgccacttagggaagtactggcaacaccttcactgtcagcctcattcaacgcaccattgttggacacgaagaaacagccgactggagcatcccttgttcttcaagtctcttacacgcctttgcctggcgccgtgccactcttcccaccacctactccgctcgagccttccccaacacttcctgaccttgacgttgtcgccgatacaggtggcgaggaggatactgaggatcagggcttgaccggcgatgaggctgagcctttcctggatcaaagcggaggaccgggagctcctacaacacccaggaaacttccctcaaggcctcccccccattacccaggaatcaagcggaaaagatctgccccgaccagccgcaaactgctttccgataagcctcaggacttccaaatcagagtgcaggtaattgaagggcggcagctgcctggggtgaatataaagcctgtggtgaaggttactgctgccggccagacgaagaggacccggattcacaagggaaacagccccctctttaacgagacactgttttttaacctgtttgactcacctggcgagctgttcgacgagccaatttttatcaccgtggtggacagcagatcattgaggaccgacgccctgctcggcgagtttcgaatggacgtagggacgatctatcgggagcctaggcacgcgtacctgcggaagtggctgctgctcagcgatccggatgatttcagcgctggagcgcggggatatctcaagaccagcctctgtgtgctcgggccaggggacgaggctcctcttgagagaaaggacccatctgaggacaaggaggatatcgaaagcaacctgctgcgccctaccggggtggctctgagaggcgcacacttttgcctgaaggtgttcagggccgaggacctgccacagatggatgacgctgtaatggacaacgtaaagcagatctttggcttcgagtcaaataagaagaacctcgtcgatccatttgtggaggttagttttgctggcaagatgttgtgtagcaaaatcctcgaaaagacagccaatccccagtggaatcaaaacataaccctccctgctatgtttccctctatgtgtgaaaagatgagaatccggattatagattgggacagacttactcacaacgatattgtggctaccacgtatctgagcatgagcaagataagtgcacccggcggggagatcgaggaggagcctgcaggggccgtcaagcccagtaaagcctccgaccttgatgattatcttggtttcctgcccacattcggcccatgctatataaatctgtatgggagccctagggaattcactggatttccagatccctatacagaactcaacacaggaaaaggggaaggcgttgcctaccgcggtcggctgcttctttctctggaaaccaaactggtggaacactccgaacagaaggtagaggacctcccagctgacgacatcctgagagttgagaagtatttgcggaggcgcaagtattccctcttcgctgccttctactctgcaacaatgctgcaggacgtggatgacgccatccagttcgaggtctctataggaaattacggcaataaatttgatatgacctgtctgccactcgcttctacaacacagtattcccgagccgtgttcgatgggtgtcactactattacttgccatgggggaacgttaagcccgtagtagtgctctcctcttactgggaagatatctcccatagaattgaaacgcaaaaccagttgctgggtattgctgatagactggaagccggtctggaacaggtgcacctcgccttgaaagctcagtgcagtactgaagatgttgactcccttgtggcccaactgacagatgaactgattgctggatgctctcaacctctgggggacattcacgagacgcccagtgccacgcaccttgaccagtacctctaccagctgcgaacccatcacttgtctcagattacagaagccgcccttgcgctgaagctgggccactctgagctcccagctgctttggagcaggccgaggattggctgctccgcttgagggccctggctgaagaaccccaaaatagtttgcctgatattgtcatatggatgctgcagggagacaaaagagtggcgtatcaacgggtgcccgcccaccaggtgctgttcagtcgccggggggcaaactactgtggaaaaaactgtgggaagctgcagactatctttctgaaataccccatggagaaagtccccggggcgcgcatgcctgtgcagattcgcgtgaagctctggttcggattgtctgtggacgagaaggaattcaaccagtttgcagagggaaagttgagcgtattcgctgaaacttacgagaacgagaccaaactcgccctcgttggcaattggggcaccaccgggcttacttatcccaagttttccgatgtgactggaaagataaaactcccaaaagactccttccggcccagcgcaggatggacgtgggctggagactggttcgtatgccctgagaaaacactgctccacgacatggatgccggtcacctctcattcgtcgaggaagtttttgagaaccaaacccgactccctgggggacagtggatctacatgagcgacaattacactgatgtgaacggggaaaaagtactgccaaaggacgacatcgagtgtccgctgggctggaaatgggaggatgaagagtggtccactgacctcaacagggccgtggacgagcagggctgggagtattcaatcactattccgcctgaacgcaaacctaaacactgggtcccagccgagaagatgtactacacccacaggcggcgccggtgggttaggctgcggaggagggacctgtctcagatggaggcactcaagaggcatcgacaagccgaggcagaaggcgaaggctgggagtatgccagccttttcggctggaaatttcatctcgaatacagaaaaaccgatgcctttcgaaggaggagatggcggcggcggatggagccgctcgaaaagaccggccccgccgccgtgttcgctctggagggggccctggggggcgtgatggacgacaagtccgaggacagcatgagcgtttcaactttgtcatttggcgtcaatcgacctactatttcttgtatctttgattatggaaacagatatcaccttaggtgttacatgtaccaggctagggacttggccgctatggacaaggatagtttctcagatccatatgcgatcgtgagctttctgcaccaatcccagaaaacagtcgtggttaagaataccctgaaccctacctgggaccagaccctgattttctatgaaattgaaattttcggggaaccagctactgtggcagagcaaccacccagcatagtggtggagctctatgatcatgacacttacggggccgatgagttcatgggtcggtgcatttgccagcccagccttgagcgcatgccgagactggcttggttcccattgacgcgaggatcccagccttccggcgagctgctcgcgtcttttgagcttatacaaagagaaaagcctgcaatccatcatatacctggatttgaagtgcaggaaacctccagaatcttggacgaatctgaagacactgatttgccttacccaccacctcagagagaagcaaacatctatatggtcccccagaacataaaaccagctctgcagcgcacggctattgagatccttgcttgggggctgcggaacatgaaatcttatcagctggcaaacatctcaagtcctagtctcgtcgttgaatgtggcggacagactgtacaaagctgtgtgattcgaaatttgagaaagaaccctaacttcgatatctgtacactgttcatggaagttatgctccctcgagaggaactgtattgcccccctataacggtgaaggtgatcgacaaccgccaattcggacgaaggcccgtcgtggggcagtgtaccatacgaagtctggagagcttcctttgcgacccatattcagcagagtctccttcaccgcagggggggcctgacgatgtatccctcctgtctcctggagaggacgtgctgatagacatcgatgacaaggagcccctgatcccaatccaggaggaagagtttatcgactggtggagcaagttcttcgcttctattggggagagggagaagtgcggcagctatctggagaaggactttgataccctgaaagtatatgatacccaactcgagaatgtggaggcctttgaggggctcagcgacttttgtaacaccttcaagctgtacagggggaagacacaggaagagacagaggaccctagcgtgataggggaattcaagggactctttaagatttaccccctcccagaggaccctgctatcccaatgccaccgcggcagttccatcaacttgcagcccaaggtccccaggagtgcttggtgcggatatacatcgttcgggcgttcgggctgcagcccaaggaccctaacggcaagtgcgatccctacattaaaatctccatcgggaagaaatccgtgtccgaccaggacaattatatcccgtgcacactcgagcctgtgtttggaaagatgtttgaactgacctgtactctgcccctggagaaggacctgaagatcactctttatgactacgatctcctttctaaggacgagaaaattggagaaaccgtggtagacctggagaaccgccttctcagcaaatttggcgctcggtgcggacttccccagacatattgtgtaagtgggcccaaccagtggagggaccagcttcgaccatcccaactcctgcaccttttctgccaacagcaccgggtaaaggcccctgtgtaccgcactgatcgggtgatgtttcaggataaggaatactccatcgaggaaatcgaggcaggcaggatcccaaaccctcacctcggccctgttgaggaaagactcgcactgcacgtactccaacagcagggtctggtccctgagcatgttgagagtcgccccctgtacagccccctgcagcctgacatcgaacaggggaagctgcaaatgtgggttgacctgttccctaaggccctcgggagaccagggccgccctttaacatcaccccacgaagggccagacgcttttttctgcggtgtatcatatggaacactcgggatgttatcctggatgatctgtccttgacaggagagaaaatgagcgatatctatgtcaaggggtggatgataggatttgaggaacataagcagaagaccgacgtgcactatcgaagcctgggcggggaaggaaatttcaactggagatttattttccctttcgactatctgcccgccgaacaagtgtgtactatcgcaaagaaagatgccttttggcgactggacaaaactgagagtaaaattccagcacgggtcgtttttcagatctgggataatgataaattctcctttgacgactttctgggttctctgcagctggatctgaatcgcatgcctaagcctgccaaaacagctaaaaagtgctctctggatcagctggatgacgcatttcaccccgaatggttcgttagtctgtttgagcagaagaccgtcaaaggctggtggccgtgtgttgcagaggaaggagagaagaaaatcctggctggcaaacttgagatgaccctggaaattgtcgcagagtctgagcacgaggagaggccagccggccagggccgggacgagccaaatatgaaccctaagctggaggacccacgcagacccgatacgtcttttctgtggtttaccagtccatataaaacaatgaaatttattctttggcgaaggttcaggtgggccatcatcttgttcatcatcctgttcatactgcttttgttcctggcaattttcatctatgcctttcccaactacgctgcgatgaagcttgtgaagcctttctcc

SEQ ID NO: 10631 - DNA, 6243 bp, synthetic construct
  misc_feature 1..6243: note = source = /note="Description of Artificial Sequence: Synthetic coding sequence"
  source 1..6243: mol_type = other DNA
atgctgtgctgtttgctagttcgagcctccaacttgccatctgccaagaaagatcgccgcagcgaccccgtggcctccctgacgttccgcggggttaagaagcgcacgaaggttattaagaacagcgtgaacccggtgtggaatgaaggatttgaatgggatctgaagggtatccccctggatcaaggaagtgagttgcacgtggtggtgaaggatcatgaaaccatgggacgtaatcggtttctcggagaggcgaaggtgccacttcgcgaggtcctcgcaacccccagcctgtcggcctctttcaacgcgccgctcttggacactaagaagcaaccaaccggagcgtccttagtattgcaagtcagctatacaccattaccaggagctgtaccattgttccctccaccaacgccactggagccaagccccacattgccagatttggacgttgtggccgataccggcggcgaggaggatactgaggaccagggtttaactggtgatgaggccgagcccttcctcgaccaaagtggcggccctggcgcaccaaccacgcctcgcaaactgccgagccgcccgccgcctcactacccaggcatcaagagaaagcgtagcgcacccactagccgtaagctgctgagtgataagccacaggatttccaaatccgagttcaggtcatcgagggccgccagctgccgggtgtcaacatcaagccagtggttaaagtgactgccgctggacagaccaagagaactcgtattcacaagggaaacagtcccttatttaacgaaacgctctttttcaatttgttcgacagcccaggagagctgtttgatgagcctatttttatcacagtggtggatagccgatccctgcgcactgacgctttgctgggcgaattcagaatggatgtgggtaccatttaccgggaaccccggcatgcgtacttgcgtaagtggctgcttctaagtgaccctgatgatttcagtgccggtgcgcgcggctacctgaagacctcgttatgcgtgctgggaccgggcgacgaagctccgctcgagcggaaggacccgtcggaggataaggaggacatcgagtcgaatctcctgcggcccactggcgtcgctctgcgcggtgcccatttctgcttgaaggtgttccgggccgaggatttgccgcaaatggatgatgccgtgatggataacgtgaagcaaattttcggattcgagtcaaacaagaagaacctagtagatccatttgtggaggttagctttgctggaaagatgctatgctccaagatcctggaaaagaccgcgaatccccagtggaaccagaatattaccttgccggccatgtttccgtccatgtgtgagaaaatgaggatacgcatcatcgattgggatcgtcttacacacaacgatattgtcgccaccacttacttgtctatgtcgaagataagtgccccgggtggtgagatcgaggaagaacccgcgggcgcagtgaagccgtccaaggccagtgatctggacgattacttgggcttcctgccgactttcggtccgtgctacatcaacctgtatggaagccctcgcgagttcacagggttccctgatccctatacggaactcaataccggcaaaggagaaggagtggcctatcgtggtcgcctgctcctgtccctggagaccaagctcgtggagcactctgagcagaaagtggaggacctgccggcagatgatatcctgcgagttgagaagtatttgcggcgacgaaagtattccctgttcgctgctttctactccgcaaccatgctccaggacgtagatgatgcaattcagttcgaggtgtcaattggaaattacggaaataaattcgatatgacctgcttgccactagcaagcacgacacaatatagccgcgccgtgttcgacggctgtcactattattacctgccgtggggaaacgtgaaaccggtggtggtgctctcgtcctactgggaggatatcagccaccgcattgagacccagaaccaacttctaggcatagctgatcgtttggaggcgggcttggagcaagtgcacctggccctgaaagcccaatgcagcacggaagacgtggactcattggtggcccaacttacagacgagctgatcgcgggctgctcccaacccctgggagatatccatgagacaccctctgctacacacctggatcaatacttatatcagctcaggacccaccatctatcccaaattactgaggcggccctggccctgaagttgggccacagcgagttgccggcagccttagagcaagcggaagattggctgctgaggcttcgtgccctcgcagaggagccacagaacagcctgcccgatatcgtgatatggatgctgcagggagacaagagagttgcataccagagggtgccagcgcatcaggtgctgttcagccgccgcggagcaaattattgcggaaagaactgcggcaagttgcagacgatcttcctgaagtatccaatggaaaaagtgcccggcgcccgtatgcctgtgcagatccgcgttaagctatggttcggtctgagtgtggacgaaaaggaatttaatcagtttgccgagggtaagctgagcgtcttcgcggagacgtacgaaaatgagacgaaactggcgctggtaggaaattggggtacaaccggcctgacgtatccaaagttcagtgatgtcacaggtaagattaagcttcccaaggactcgttccgtccttcagcgggctggacatgggctggcgactggtttgtctgcccggagaagaccctcctgcatgatatggacgccggtcatctctccttcgtagaggaggtctttgagaaccagaccagattaccaggtggacagtggatctatatgagtgataattacacggacgtcaacggcgaaaaggtgcttccaaaggatgatattgagtgtccgctcggctggaaatgggaggatgaagagtggtcgaccgatttgaatcgggcggttgacgagcaggggtgggagtacagcatcacgattcccccagagcgcaagccgaagcactgggtgcccgctgagaaaatgtattatacacatcggcgtcgtcggtgggtgcgcctgcgccgtagggacctgtcgcaaatggaagctctgaagaggcatcggcaagctgaggccgagggtgaaggttgggagtatgcatcactgttcggttggaagttccacctggaataccgaaagaccgacgcttttaggcgaagaaggtggcgtcgccgaatggaaccgctcgagaaaactggcccggcggccgtgttcgccttggagggagctcttggaggtgtcatggatgataagtctgaggattcaatgtcggtctccacgctatcgtttggcgtcaaccgccccaccatctcctgtatatttgactatggcaaccggtatcatttacgttgctatatgtaccaagcgcgagacctagccgctatggacaaagattcgtttagcgatccctatgctatcgtctcgttcttacatcagagccaaaagactgttgtcgtcaagaataccctgaatcccacgtgggaccaaactttgattttttatgagattgagatctttggagagcccgccacagtggcagaacaaccgccttcaatcgtagtggaactgtatgatcacgacacgtacggcgccgacgagttcatgggccggtgcatatgccagcccagcctggagcgaatgcctcgtttggcatggtttcccctgacgaggggatcacagcccagtggcgaactgcttgccagctttgaactgatacagagggaaaagccagccatacatcatatcccaggttttgaggtgcaggagacgagccgcatcctggacgagagtgaggacactgacctgccgtatccgcctcctcagcgcgaagcgaacatctacatggtgccacagaatatcaagccggcactgcagcgcaccgcaatcgagattctggcatgggggttaaggaatatgaaatcctatcagctcgcaaatatctcctccccgagtctggtggtagagtgcggcggccaaacggtgcaatcttgcgtgatccgcaacctgcgaaagaatccgaactttgacatttgtacgttgttcatggaagtgatgctgcccagggaggagctctactgcccgcccataaccgtaaaggtgattgataatcggcagttcgggcgtaggcccgttgtcggtcagtgtactatcagatccctggaaagctttttgtgcgacccctactccgccgaatctccgagtccacaaggcggtcccgacgatgtctctctgttgagcccgggcgaggatgtcttaatagacatagatgataaggaaccgcttattccaatccaggaagaagagtttattgactggtggagtaaatttttcgccagcatcggcgaacgtgagaagtgcggatcatacctggaaaaggacttcgacaccctcaaggtctacgacacgcagctggaaaacgtcgaggcatttgaaggactgtctgatttctgcaatactttcaaattgtaccggggcaagacccaggaggaaacggaagatccctccgtgataggagaattcaaggggctcttcaaaatctacccactgcccgaggatccggcaattcctatgccgccgagacagttccaccagctcgccgcgcagggaccccaggagtgcctggtgcgaatctatattgtccgtgctttcgggcttcagcccaaagacccaaatggtaaatgtgatccctatattaagatcagcatcggcaaaaagtctgtctccgaccaagacaattacataccatgcaccctggagccggtgtttggcaagatgttcgaactaacgtgcaccctgccgttggagaaggatttgaagataacgctgtacgactacgatctactgtcgaaggacgagaagatcggagagaccgtagttgatctcgagaatcgtctactgtcgaagttcggcgcccggtgcggactgccgcagacatattgcgtatccggccccaaccagtggcgcgatcagctacgaccaagccaactgctccacttgttctgccagcagcaccgtgtgaaggcccccgtctatcgcacagaccgagtcatgttccaagataaagaatacagtatagaagagatcgaggccggacgcattccaaacccgcatctaggcccagtggaagagcgcctcgcgctgcatgtgttgcaacagcaaggtctcgtgccggaacatgtggaatcccgccctttgtactccccactgcagcccgacatcgagcagggtaagcttcagatgtgggtggatctatttcccaaggcgcttgggcgtccgggaccccccttcaacatcacaccgcgccgagcccgcaggttctttttacgatgtatcatttggaacacgcgcgatgttatcttggatgacttgtcgttgaccggtgagaagatgagcgacatttacgtaaagggatggatgattggcttcgaagaacacaagcagaagacagatgtccactacaggagtcttggaggtgaaggaaacttcaattggcggtttatctttcccttcgactatctgcctgctgagcaagtttgtacaattgctaagaaagatgccttttggcgcttggacaaaactgagagcaagattccagctcgtgtcgtcttccagatctgggataatgataagtttagtttcgatgactttttgggcagcttgcagctagatctcaaccgcatgccaaagccggctaaaacagccaagaaatgcagcctagaccagctggacgatgcctttcatcccgaatggttcgtgtctctgttcgaacagaaaacagtgaagggttggtggccgtgtgttgccgaagagggggagaagaagattctggctgggaaactcgaaatgaccctggagattgtagctgagtccgagcatgaagaacgacccgcgggccaaggacgtgacgaaccaaatatgaatcccaagttggaggatccgcgtcgccctgacaccagtttcctgtggttcacctcgccctacaaaaccatgaagttcatcctctggcgccgcttccgctgggccattatcctgtttataatcctgtttatcctattgttgtttctggccatctttatttacgccttcccgaattacgcagccatgaagctggttaagccgttctcc

SEQ ID NO: 10632 - DNA, 6243 bp, synthetic construct
  misc_feature 1..6243: note = source = /note="Description of Artificial Sequence: Synthetic coding sequence"
  source 1..6243: mol_type = other DNA
atgctgtgttgtcttctggtgcgcgcgtctaacctgccgtcagcgaaaaaggatagacggagcgacccagttgcttccctgactttccgcggcgtgaagaaacgcacaaaagttatcaaaaacagcgttaacccggtctggaatgaaggattcgagtgggacctgaaaggcattcctctggaccaaggtagcgagctgcacgtggtcgtcaaggatcatgagaccatggggcgaaaccgctttctgggtgaggcgaaagttccactccgtgaggtcttggcgaccccttcgctgagcgccagctttaatgcaccactgctggacacgaaaaagcaaccgaccggtgcaagcttggtgctgcaagtgagctacactccgctgccgggcgcagttcctctttttccaccgcctaccccactggagccatcaccaaccctgcccgatctggacgttgtggcggatacgggcggggaggaggacaccgaggatcagggtctgacaggtgatgaagctgagccatttctggatcagagcggcggtccaggtgcccctacgacgcctaggaaactgccttcacgaccccctcctcattacccgggcataaaacgcaaacgtagcgcgccaacctccaggaagctgcttagcgataagccacaggactttcagattagagttcaagttatcgagggtcggcagctgccgggcgtgaacatcaagccagttgttaaggtgaccgccgccggtcagacgaagcgcactcgcatccacaaaggcaattccccgttgttcaacgagaccctgttctttaacctatttgacagcccaggcgagctcttcgatgaacctattttcatcactgttgttgattctcgctctttgcgcaccgatgcactgctgggcgaattccgaatggacgtcggaaccatctaccgggagccgcgccatgcgtatctgcggaaatggttattgctgagtgatccagatgacttctctgcaggcgctcgaggttacctaaaaacttcactgtgtgtgctggggccgggagacgaagcgccactggaacgcaaagatccgagcgaagacaaagaggatattgaatcaaacctgttgcgcccaactggcgttgctctgcgaggtgcgcacttttgtctgaaggtgtttcgcgctgaggatctcccgcagatggatgatgcggtaatggataatgtcaaacaaatttttgggtttgaaagcaataaaaaaaatctggtcgatccattcgtggaggtatccttcgcaggcaaaatgctgtgttctaagatactggagaaaaccgctaatccacagtggaaccagaacatcacgctgccggccatgttccctagcatgtgtgagaaaatgagaatccgcattattgattgggatcgcctgacccataacgacattgtcgctaccacgtacctgtcgatgagtaaaattagcgcgccgggtggtgagatcgaggaagaacctgccggcgccgtgaaaccgagcaaggcaagtgatctggacgactacctgggttttctgccgactttcggtccttgctacatcaatttatacggtagccctcgcgagtttactggtttcccggacccttacactgagttgaataccggtaagggtgagggggttgcgtaccggggacgactgctgcttagcctggaaaccaaactggttgagcacagcgagcagaaggtggaagatctgccagcggatgatatccttcgggttgagaagtacttaaggaggcgaaagtactccctgttcgcagcgttttatagcgcgaccatgcttcaagacgtcgacgacgcaatccaattcgaagtctctattggcaattacggtaacaagtttgatatgacttgcctgccactggcctcgactacccaatactcccgcgccgttttcgacggttgccattattactacctgccgtggggtaacgtgaagcctgttgtggtcctctccagttattgggaggacattagccaccgcattgagactcaaaatcagcttctgggtatcgctgacaggctggaagctggattagaacaagtgcacctggcgctgaaagcgcagtgctcgaccgaagacgttgactcgctcgtagcacagctgactgacgagctaatcgccggatgcagccagccgttaggcgatatccacgagactccctcagcgactcatctggaccagtatttatatcaactgaggactcaccatctgagccagatcacggaggccgcgctggccctgaaactgggtcacagtgaactgccggctgccctggaacaagcagaggactggctgctgcgcctgagggcgctggcagaggaaccacagaactctttgccagacattgttatctggatgttgcagggcgataaacgcgtcgcctaccagcgcgttcccgcccaccaggtcctgttcagccgccgtggcgccaattactgcggcaaaaattgtggtaaactgcagaccattttcctgaagtacccaatggagaaggtcccaggagcgagaatgccggtgcagattcgcgtcaaactgtggtttggactgagcgttgacgagaaagagttcaaccaatttgccgaaggtaaattgtcagtattcgcggaaacctacgagaacgaaactaaactggcgctggtgggtaattggggcaccaccggtttgacctacccaaagttcagcgatgtcaccggtaagattaagttaccaaaagactcatttcggccgagcgccggctggacctgggctggggattggttcgtttgtccagaaaaaactttgctgcacgatatggacgctgggcacctgagctttgtcgaggaggtgttcgagaaccaaaccaggctgcctggtggtcagtggatctatatgagcgacaactatacggacgtcaacggtgaaaaggtcctgccgaaagatgatatcgagtgcccactgggttggaagtgggaagacgaagagtggagcactgatctgaatcgtgcggttgacgagcaaggctgggaatacagcattaccatcccccctgagcgcaagccaaagcactgggtgccagcggagaagatgtattatacgcaccgacgccgaaggtgggtgagactgcgccgcagagacctgagccagatggaggcactcaaaaggcaccgccaggctgaagcggaaggggaaggttgggagtatgcaagcctcttcggctggaaatttcacctggagtatcgcaagaccgatgcatttcgacgtcgaaggtggcgcagacgcatggagccgctggagaaaaccggtccggcggccgttttcgccttggagggcgcattaggcggcgtgatggacgacaaatctgaagacagcatgagcgttagcactctgtctttcggagttaaccgacctaccatctcgtgtatcttcgattacggcaatcgttatcatctgagatgttacatgtaccaggctcgggacctggcggcgatggacaaagatagctttagcgatccgtacgccattgtcagctttctgcatcaaagccagaagaccgttgtcgtcaagaacacgctgaatcctacctgggaccagactcttattttctatgagattgagatctttggcgagccggcgactgttgctgaacagcctcctagcatagttgtggagttgtatgaccatgatacctacggcgcagacgaattcatgggtcgctgcatatgtcaaccttccttagaacgcatgccaagactggcgtggttccctctaacccgcgggagccagccatccggtgagctgctcgcctcttttgaactgattcagagagagaaaccagcaatccatcatatccctgggtttgaagtgcaagagaccagccgtatcttggacgagagcgaggacacagatctgccgtacccgccaccgcagcgggaggccaatatttacatggtgccacaaaatatcaaaccagccctgcagcgcaccgcaattgagatcttggcatggggcttgagaaacatgaaaagctatcaattagcgaatattagttcaccttcactggtggtggaatgtggggggcagaccgtacagtcttgtgtcattcgcaacttgcgcaaaaaccctaattttgacatctgtaccctgtttatggaggtgatgctgccacgtgaggaactgtactgcccacctataaccgtcaaagtgattgataatagacagtttggccgccggcccgtggttggccaatgtaccatccgctctctggaatcttttctctgcgacccatattcagctgaaagcccatcccctcaaggcggcccggatgatgtaagcctgttgtcaccaggtgaggacgtcctcattgacattgacgacaaagagccgctgatccctattcaggaagaagaattcatcgactggtggtccaagttcttcgcctcaatcggtgaaagggaaaagtgtggttcctacctggagaaagactttgacaccctgaaagtctatgatacacaactggagaacgtcgaagctttcgaaggtctgagcgacttctgcaacacgttcaaattgtatcgtggtaagactcaggaagaaacggaagacccgagcgttataggcgaatttaaaggcctgttcaagatttaccctctgcctgaagaccccgcaattcctatgccaccgcgccagttccaccagctggcagcccagggcccacaagagtgtcttgttcgaatctatatcgtgcgggcattcggcctgcagcccaaggatccgaatggtaagtgcgatccctatatcaagatttccatcggcaaaaagagcgtgtccgaccaagacaactacatcccttgtaccctggagccggtgtttggcaaaatgtttgagctgacttgcactttacctctggaaaaggacctgaagatcacattgtacgactatgatctgttgagcaaggatgaaaaaataggagaaaccgtggtcgacctggaaaatcgcctgctgagtaagttcggagcgcggtgtggccttccccagacctactgcgtgtcaggaccaaatcagtggcgcgaccagctgcgcccaagtcaactgctgcatctgttttgccagcagcatcgcgttaaggcgcccgtttaccgcaccgatagggtgatgttccaagataaggaatatagtattgaggagatagaagcaggtaggatacctaatccccacctggggccggtggaggagcgcttagcactgcacgttctacagcagcaggggctggttcctgagcacgttgagagccgcccactgtactcgcctctgcagccggatatcgaacaaggaaagctgcagatgtgggttgatctgttcccgaaggcgttgggtcgcccaggtccgccgttcaacattactcctcgtcgggcgcgccgtttctttctgcgttgcattatctggaatacgcgagacgtcattctggatgacctgtccctgactggtgaaaagatgagcgacatttacgttaagggctggatgattggttttgaggaacataaacaaaaaacggacgtccactatcggagcctgggtggcgagggtaactttaactggcgcttcatcttccctttcgactacctgccagccgaacaggtttgcaccattgccaagaaggatgctttttggagactggataaaacggagtcaaagattcctgcgcgagtggtctttcagatctgggataatgataagttctccttcgatgactttctgggctctctgcagctggacttgaataggatgccgaagcctgcaaaaacggcaaagaagtgctccctggaccagttggatgacgcatttcatccagagtggtttgtttccttgtttgaacagaaaacggttaaaggctggtggccttgtgtggctgaagaaggtgagaaaaagatcctggcggggaagctagaaatgacgctggagattgtggcagagagcgagcacgaggagcgtccagcaggccaaggccgcgatgagccaaacatgaaccccaagctggaggaccctcgccgcccggatacttcctttttgtggttcacgagtccctacaagacaatgaagtttattttgtggcgccgttttcgctgggccattatcctttttattatcctgttcattctgttgctgtttctggccattttcatttatgcctttcctaattacgccgccatgaagctcgttaaacctttcagc

SEQ ID NO: 10633 - DNA, 6243 bp, synthetic construct
  misc_feature 1..6243: note = source = /note="Description of Artificial Sequence: Synthetic coding sequence"
  source 1..6243: mol_type = other DNA
atgctgtgttgcctcctggttagggcaagcaaccttccttcagctaaaaaagatcgcagaagcgatccagtcgcttccttaacttttcgtggggtgaaaaaacgaacaaaggtcattaagaacagtgtaaatcctgtgtggaatgagggctttgagtgggacctgaaggggattcccctggaccagggctcagagctccatgtagtcgttaaggatcacgagaccatgggccgcaacagattcctgggagaagccaaagtcccacttcgagaagtgctggctactccctccctctcagcttcttttaatgcccccttactggacacgaaaaaacaacctacgggggccagcctggtgttgcaagtttcatatactccgctccccggtgcggtgccacttttcccaccaccgacccccctcgaaccgtcacccaccctcccagaccttgatgtggtggctgacacaggcggagaggaggatacggaggatcagggattaaccggagatgaagctgagccattcctggatcaaagcggtggccccggggcgcctaccactcctcggaagctgccatcacggcctccaccgcactatcccgggattaaacggaagcgttcagctccaacatcaagaaaactactcagtgataaaccccaggacttccagatacgggtccaggtgatcgaggggcggcagctccctggggttaacatcaagccagttgtgaaagtgactgctgccgggcaaaccaagagaactagaattcacaagggcaattctcctctgtttaacgaaacactgttcttcaatctgtttgacagccccggcgagctgtttgacgagcctatcttcatcacggttgtggacagccgatcactgcgcaccgacgcactgctgggcgagtttcgaatggatgtcggcactatatacagagagccccgacacgcctacctgcgtaagtggttgctccttagcgacccagacgatttctctgctggagcccgggggtacctaaaaacctctctctgcgttcttggtcctggcgacgaagctccccttgagcgaaaggatcctagtgaggataaggaggatattgagtcaaacctccttcgacctacaggcgttgccctgcgcggagctcacttttgtttgaaggtttttagggccgaagacttgcctcagatggacgatgccgtgatggacaatgtgaagcagatcttcgggttcgagagcaacaagaagaacctggtagacccctttgtagaagtgagcttcgccggtaagatgttgtgcagtaagattctcgaaaaaaccgcaaacccacagtggaatcagaacattactttgcctgccatgtttccaagcatgtgtgagaagatgagaatccgtatcattgactgggataggctgacacataatgacatcgttgcaaccacttatttatcgatgtcaaaaatcagtgcccctgggggagaaatagaggaggagcctgccggggccgttaagcccagtaaagccagtgacttggacgattatctaggtttcctgcccacatttggcccatgttacattaacctctatggtagtcctcgcgagtttaccggtttccccgacccttacaccgagctgaataccggaaaaggcgaaggtgtcgcgtacaggggacgtctcctcctgtcccttgagactaagctggttgagcactcagagcagaaggtcgaagaccttccagcagacgatattctgagggttgaaaagtaccttcgacggcgtaagtatagcctcttcgccgctttttattccgccaccatgctgcaagatgtggatgacgctattcagtttgaggtgtcaatcgggaattatggtaacaagtttgacatgacgtgtcttcccctggcatctactacacagtacagcagagccgttttcgatggctgtcattattattatctgccttggggaaacgtgaaacccgtggtagtgttatcatcttactgggaggatatcagccatagaatcgagactcagaaccaactgctggggattgccgataggctggaggctgggctcgagcaggtccacttggccctgaaagctcagtgcagtaccgaagacgtcgattcgctggtcgctcagctcaccgacgagctgatagctggctgttctcaacctctgggagatatccacgaaacaccaagcgcaacacacctagaccagtatctgtaccagttgcgaacccaccacctgagccaaatcacagaggctgcacttgctcttaagttagggcattcagagcttccagctgcactggagcaggcagaggattggctcctgaggctccgagctctcgctgaggagccccagaattcgctgcccgatattgtgatctggatgctgcagggagataaaagagtggcatatcaaagagttcctgcccatcaggttctcttctcgcgacgtggagctaactactgtggtaagaactgcgggaagctccagacaatttttcttaagtacccaatggagaaggttcctggagcccggatgcccgtgcagatcagagtcaagctttggtttggcttgagcgtggacgaaaaggagtttaaccagttcgcggagggcaagctgtctgtctttgccgagacctacgagaacgagaccaaattggctctagttggcaattgggggacgaccggcctcacctacccgaaattcagtgacgtcacggggaagatcaagttgcccaaggattcattcagacccagtgcaggttggacgtgggcaggcgattggtttgtttgtcccgaaaaaacattgctgcacgatatggacgccggacatttgtctttcgtggaagaggtatttgagaatcagactagactgcccggaggacagtggatctacatgagcgataattacaccgatgtgaacggtgaaaaagtcctacctaaagatgacatcgaatgtcccttgggttggaaatgggaggatgaagagtggtccacagatctgaaccgggcagtggacgagcagggctgggagtattccattactatccctcccgaaagaaaaccaaaacattgggtgcctgcggagaagatgtattacacccatcgccgaaggcggtgggtgaggctccgccgaagggacctgagccagatggaagcactcaagaggcacaggcaggccgaggctgaaggggaaggttgggaatacgcctcactgtttggttggaagtttcatcttgagtaccgaaaaactgacgcattccggaggcgcagatggcggcgcaggatggaacccctagagaagaccggccctgctgccgtattcgccttggagggggctctcgggggggtaatggacgacaagtccgaggattcaatgtctgtatctaccctgagcttcggcgtgaatagacccaccattagctgcatctttgattatggaaatcgataccacctccgctgctacatgtaccaggctagggacctagccgcgatggacaaagactcattttctgatccatatgcgattgtttcttttttgcatcagtcccagaagactgtggtggtgaagaatacactgaaccccacatgggaccagacgctgatattttacgaaattgagatcttcggcgagccagcaaccgtcgctgagcagcctccctccattgtggttgaactctacgaccacgacacatacggagcagatgaattcatggggcgctgtatctgccagccctctctagagcggatgcctcgcctggcctggttccccctgacacgaggctcccagccaagcggcgaactgctggcctcttttgagctgattcaaagggaaaagcctgccattcaccacatccccggattcgaagtgcaagagacatcacgtattctagatgagagtgaagacacggatcttccataccctccgcctcagcgtgaggcgaatatttatatggttcctcagaacatcaagcccgccctgcagcgaacagccatagagatcctggcgtggggcttaagaaatatgaagagttaccagctggccaatattagctctccaagtttagttgtcgaatgtggcggccagacagtgcaaagctgtgtaataagaaatttacgcaaaaaccccaatttcgatatctgtaccctgtttatggaggtaatgttgccgcgcgaggaactgtactgccctcctattacagtgaaggtcatcgacaataggcagtttggcagacgccctgtggttggacagtgcacaattcgctcactagaatcgttcttatgtgacccatattctgctgagtctccgagccctcaagggggtccagacgacgtgtctctgttatctccaggggaggacgtgttaatcgatatcgacgacaaggagcccctcattccgattcaggaagaggagttcatcgactggtggagcaaattttttgcgagcattggcgagagagagaagtgtggaagctacctagagaaggacttcgataccctaaaagtatatgatacacagttagagaacgtagaggcctttgagggtctttctgacttctgcaacactttcaaattgtatcgtgggaagacccaagaggaaactgaggaccccagtgtcattggcgagtttaaaggtttgttcaagatctaccctctccccgaagacccagccataccaatgccaccaaggcagtttcatcaactggcagctcagggccctcaggagtgtttggtgcgcatctatattgtccgcgcattcggcctgcagcccaaggacccaaacggcaagtgtgatccttacattaaaatcagtattgggaagaaaagcgtgagcgatcaggataactacattccctgtaccctggagcccgtattcgggaagatgttcgagcttacctgtactctccccctggagaaggacctgaagattacgctctacgactacgacctcctcagcaaggatgaaaagatcggtgagacagtcgtggacctggaaaaccgcttgctgagtaagttcggggcacggtgcggtttgccccagacatactgtgtgagcggtccaaatcagtggagagatcagctgcggccgtcccagctgctgcacctcttctgccagcaacatcgggttaaagcgcctgtatatagaactgatagggttatgttccaggacaaagagtacagtattgaagaaatagaggcgggaagaatccccaatcctcatctggggcctgtagaggaaaggcttgcgttgcatgtgctccagcaacagggattggtccccgaacacgttgaatcaagaccattatatagccccttgcagccagacattgaacagggtaaactgcaaatgtgggtcgaccttttcccaaaggccctgggccgacccggacccccatttaacattacaccacgacgcgcaagacgcttctttctcaggtgcataatatggaacacccgtgacgtgattttggatgatctgtcattaaccggtgaaaagatgagcgatatctatgtgaaaggctggatgattggctttgaggagcacaaacaaaagacagacgtccattacaggtctcttggcggcgaggggaacttcaactggagatttattttcccctttgattatctcccagctgagcaggtttgtactatcgccaagaaagacgccttttggcgcctcgacaaaaccgaaagcaaaatcccagcaagggtggtcttccaaatttgggataacgataagttttccttcgacgatttccttggatccctgcaattggacctaaaccgcatgcctaagccagctaaaactgccaagaagtgctctctcgatcaactcgatgacgccttccaccccgagtggtttgtctctttattcgaacaaaagactgtgaagggctggtggccgtgcgtggcggaagagggcgaaaagaagattttggcgggcaagctagaaatgaccttggagatagtcgccgagtccgagcatgaggagaggcccgcaggccaggggcgagacgagcccaacatgaatcccaagctggaagaccccagacgaccagacacaagcttcttgtggtttacgagcccatataagactatgaagtttatcctgtggcggcggtttcgttgggccatcatcctgttcattatcctgttcatcctgctcttgtttctggctatattcatctacgcgttccccaattacgctgccatgaagcttgtgaaaccattcagc

SEQ ID NO: 10634 - DNA, 6243 bp, synthetic construct
  misc_feature 1..6243: note = source = /note="Description of Artificial Sequence: Synthetic coding sequence"
  source 1..6243: mol_type = other DNA
atgctgtgctgcctcctggtgagagcttccaatctgccgtcggctaagaaggatagaagaagcgacccggtggcgagcctcacgttccggggcgtgaagaagcggaccaaggtcatcaaaaactccgtcaacccggtgtggaacgagggattcgagtgggatctgaagggaatcccgctcgaccagggctcggaacttcatgtcgtggtcaaggaccacgagacgatgggccggaatcgcttccttggtgaagcgaaagtgccactgcgggaggtcttggcaacgccgtcgctgagcgccagcttcaatgcccctctgttggacacgaaaaagcaacccactggagcttccctggtgttgcaggtgtcatacacgccgcttccgggagccgtcccgctgttcccaccaccaaccccgttggaaccaagccctactctgcctgacctggacgtggtggccgatacgggtggagaggaggacaccgaggaccagggcctgactggagacgaggctgaaccgttcttggaccaatcaggaggaccgggtgcgcctaccactccacgcaaattgccgagcaggcctcctcctcattaccctggaatcaagcgcaaaagatctgcaccaactagccgcaaattgttgtcagacaagccacaggacttccagatcagagtgcaggtgatcgagggccgccaacttccgggcgtgaacattaagccagtggtgaaagtcactgcggccgggcaaactaaaagaacccgaatccataaaggaaattctccattgtttaatgagactctctttttcaacctgttcgatagcccaggagaactctttgatgaaccaattttcatcactgttgtcgactcccgctcactcagaaccgacgcgctgctgggcgaattccgcatggatgtcggaaccatctaccgcgagccgcgccacgcatacttgcgtaaatggctgctgttgtccgaccccgatgacttctcggctggcgctcgaggatatctgaaaacttcgctgtgcgtgctgggaccaggagatgaagcaccgctcgagcgcaaagatccttctgaagataaggaggacatagagtcgaacctcctcagacctaccggtgtcgctctgcggggcgcgcacttctgtctgaaagtctttcgcgcagaggatctgccgcaaatggatgacgcagtgatggataacgtgaaacagatttttggtttcgaatcaaacaagaagaatctcgtggacccatttgtggaggtgtcgtttgccggaaagatgctttgctcaaaaatcttggaaaaaaccgccaatccgcagtggaaccaaaacattaccctgccggcaatgttcccttccatgtgcgaaaagatgagaatccgcatcattgactgggatcggcttactcataacgatattgtggccaccacctacctgagcatgtcaaagatcagcgcgccgggtggcgaaatcgaagaagagccagctggagcggtgaaaccctccaaggcatcggacctggacgactacctgggattcctccctaccttcgggccatgctatatcaacctgtacggttcgccgcgggaatttactgggtttccggacccgtacaccgagctcaatacgggcaagggtgaaggagttgcctaccgcggacgccttctcctctcgctggaaactaagctggttgaacattcggagcaaaaggtggaggatttgcccgccgatgacatcctccgcgtggaaaagtacctccggagacggaagtattccctgttcgccgccttctactccgccaccatgctgcaagacgtggacgatgccatccagttcgaagtgtcgatcggcaattatggaaacaaatttgacatgacctgccttccgctggcgagcactactcaatactcccgggctgtgtttgacggatgccattactattacctgccttggggaaacgtcaaaccggtggtggttctctcgtcgtactgggaggacatatcgcaccgcatcgaaacccagaatcaactcctgggcatcgctgatcgactggaggcgggactggagcaggttcacctggccctcaaggcccagtgctcaactgaggacgtggactcgttggtggcccagttgactgacgaactgatcgcgggatgcagccaaccactgggggacatccacgagacgccgtccgccactcatctcgaccagtacctgtaccagcttcgcactcatcatctgagccagatcaccgaggcggcgttggccttgaagctcgggcactcggaactgccagccgcactggaacaggcagaggactggctcctgcgcctgcgcgccttggcagaagagccacagaactcgttgccggacatcgtgatctggatgctccagggagataagagggtggcctaccagcgcgtcccggcgcaccaggttctcttctcccgccggggcgcgaattactgcggcaagaattgtggaaaactgcagaccatctttcttaagtacccaatggagaaggtgcctggagcgcggatgccggtgcagattcgcgtgaagctgtggttcggactctcggtggatgaaaaagaattcaaccagttcgccgagggaaagctgtccgtgttcgcagaaacgtatgagaacgaaaccaagctggccttggtgggaaactggggtactaccggtcttacctacccaaagttctccgacgtcaccggaaagatcaagctcccgaaggactcattccgcccatctgctggttggacgtgggctggtgattggttcgtttgtccagaaaagactctcctgcatgacatggatgcgggccacctctccttcgttgaggaggtgttcgaaaatcaaactcgcctgccgggaggacagtggatctacatgtcggacaattacactgacgtgaacggcgaaaaggtgctgccgaaggacgatatcgagtgcccgctcgggtggaagtgggaggatgaggaatggtcgaccgacctgaaccgcgcggtcgacgagcaggggtgggagtactcaatcaccatcccaccagagcgcaagccgaaacattgggtccccgctgaaaagatgtactacacccacagacggcggaggtgggtccgcttgaggcggcgggacctgagccaaatggaggcccttaagcggcatagacaggcagaagctgaaggagaagggtgggaatacgcatcgctgtttggctggaaattccacctcgaatacagaaagaccgacgcgtttcggaggcggcggtggcgccgccgcatggaaccattggagaaaaccggtcccgccgcagtgttcgccctcgaaggggcgctcggaggagtcatggacgataagagcgaagattcaatgtcagtttccacccttagctttggtgtgaaccgccccaccatcagctgcatcttcgactacggaaatcgataccacttgagatgctacatgtaccaagcccgggacttggcagcgatggataaggactcattttcggatccttacgccatcgtgtccttcctgcaccagtcccagaaaactgtggtcgtcaaaaacacgctcaacccaacttgggatcaaaccctgatcttctatgagatcgaaatcttcggcgagcccgcgacggtcgcggaacagcccccttcgatcgtggtggaactctacgatcacgacacctacggagcggatgaattcatggggcgatgcatttgtcagccttcactggagcgcatgccgcggctggcctggttccctcttacgcgcggaagccagccatcaggagaactgcttgcgtcattcgagctgattcagcgcgaaaagccggccatccaccacattccgggcttcgaggttcaagaaacttctcgcatcctggacgagagcgaagataccgatctcccttacccgccgccccaaagagaagctaatatctacatggtcccgcaaaacatcaaaccggccttgcaaagaaccgctattgaaatcctggcctggggccttcgcaatatgaagtcctaccaactggccaatatctcctcgccgtcactcgtggtggagtgcgggggtcagactgtgcagtcatgcgttatccggaaccttagaaaaaacccgaactttgatatttgcactctcttcatggaggtgatgctgccgcgtgaggagctgtactgtccgccaatcaccgtgaaggtgatcgacaaccggcaattcggtagacggcctgtcgtcggacagtgcaccatccggagcctggagtccttcctctgtgacccatactcagcggaaagcccttccccacaaggaggccccgatgacgtgtctctcctgtcaccgggagaagatgtgctcatcgatatcgacgacaaggaacctctgatcccgatccaagaagaggagtttatcgactggtggtccaagtttttcgcaagcatcggagagcgagaaaagtgcggatcctatctggaaaaggatttcgatactctcaaggtttacgatactcagctggaaaacgtggaggcttttgaaggcctctccgacttttgtaataccttcaagttgtaccgcggcaaaacccaggaggaaaccgaggacccgtcggtcataggcgaattcaagggacttttcaagatctaccctctccccgaggacccagcgatccccatgcccccgcggcagttccaccaactggcagcgcagggaccgcaagaatgtttggtgagaatctacatcgtccgggcatttggactccaacccaaggaccctaacggaaagtgtgatccctacatcaagatctccatcggaaagaagtccgtgagcgatcaagacaactacattccatgcactcttgaaccggtctttggcaagatgttcgagctcacttgcactctccccctcgagaaggacctcaagattactctttatgactacgacctgctgtcgaaggacgaaaagatcggagaaactgttgtggatctggaaaatcggctgctttccaaattcggagctcgctgcgggttgcctcaaacctactgtgtttcgggacctaaccagtggcgggaccagcttagacccagccaactgttgcacctgttctgccaacagcaccgcgtcaaggccccggtgtaccggactgaccgcgtgatgttccaagataaggagtactcgatcgaagagatcgaagcaggaaggatcccgaacccgcacctggggccggtcgaagagcggctggcacttcacgtgttgcagcagcaagggctggtgccagaacacgtggagtcccgcccactttactcccctctccaaccagacattgaacagggcaaactgcagatgtgggtggacctgtttccgaaggccctgggtaggccgggtccaccgttcaacatcaccccccgccgtgctcgcagattcttcctcagatgcatcatctggaacactagggacgtgatcctggacgatctctcgctgaccggcgagaagatgagcgacatttacgtcaaaggatggatgattggctttgaggagcataagcagaaaacggacgtgcattaccggtcgctgggcggcgaaggcaatttcaattggcgattcatctttccgttcgattacctccctgctgaacaagtgtgcaccattgccaagaaggacgccttctggcggctcgataagactgagtcgaaaatcccggcccgcgtggttttccagatctgggataacgacaagttcagctttgatgactttctgggctctctgcagctggaccttaacagaatgccgaagccagcgaaaaccgctaagaagtgctcgctggaccagctggatgatgctttccatccggagtggttcgtctcactcttcgagcaaaagaccgtgaaggggtggtggccgtgtgtggcagaagagggcgagaaaaagatcttggcaggaaagctggaaatgactttggaaattgtcgccgagtcagaacacgaagaaagacccgcggggcaagggcgcgatgaacccaatatgaacccgaagctcgaggatccccgtcggccggatacctcattcctgtggttcactagcccgtacaaaaccatgaaattcatcctctggcgccggttccgttgggccatcattctgtttatcatcctgtttatcctgctcttgttcctggcgatcttcatctatgcgttccctaactacgcagctatgaaattggtcaaaccgttctcc

SEQ ID NO: 10635 - DNA, 6243 bp, synthetic construct
  misc_feature 1..6243: note = source = /note="Description of Artificial Sequence: Synthetic coding sequence"
  source 1..6243: mol_type = other DNA
atgctttgctgtctattagttagagcttctaatttaccatcagctaaaaaggatagaagaagtgatcctgttgcatctttaacatttcgaggtgttaaaaaacgaactaaagttataaaaaatagtgttaatccagtatggaatgaaggatttgaatgggatttaaagggaattccattagatcaaggtagtgaacttcatgtagtagtaaaagatcacgaaactatgggtagaaataggtttcttggagaagcaaaagttccattaagagaagtattagctacaccatcattatctgctagttttaatgcaccacttctagatacaaaaaaacaaccaactggagcttctcttgtgcttcaagtatcatatacaccacttcctggagctgttccattattcccaccaccaactccattagaaccatcaccaacattaccagaccttgatgttgttgcagatactggaggagaagaggatacagaagatcaaggacttacaggtgatgaagcagaaccatttcttgatcaaagtggtggaccaggtgctccaacaacaccaagaaaattaccaagtcgtcctccaccacattatccaggtattaaaagaaaaagatcagcaccaactagtagaaaattattatcagataaaccacaagattttcaaatacgtgtccaagtgattgaaggacgtcagcttccaggagttaacattaaaccagttgtaaaagttacagctgctggtcaaactaaaagaacaaggatccacaaaggaaactcaccattatttaatgaaacattattttttaatttatttgatagtccaggtgaactttttgatgaaccaatttttattacagttgttgactctcgttcacttagaactgatgcattacttggtgagtttaggatggacgttggaacaatttatagagaaccaagacatgcttatcttagaaaatggttacttctttcagatcctgatgacttctcagcaggggctagaggatacttaaaaacttctctttgcgttcttggaccaggagatgaagcaccattagaaagaaaagacccttcagaagataaggaagacatagaatcaaatcttttaagaccaactggagttgcattacgtggagctcatttctgtttaaaagtattcagagctgaagatttacctcaaatggatgatgctgttatggataatgttaagcaaatttttggatttgaatcaaataaaaaaaatttggtcgatccatttgtagaggtttcattcgcagggaaaatgttatgttcaaaaattttagaaaaaacagcaaacccacaatggaatcaaaatattactttaccagcaatgtttccttctatgtgtgaaaaaatgcgtataagaattattgattgggatagattaactcacaatgatattgttgccacaacatatttatctatgtcaaaaatttcagcaccaggaggagaaattgaagaagaaccagcaggtgcagttaaaccatccaaggcaagcgatttagatgactatcttggatttttaccaactttcggaccatgttatattaatctttatggatcaccaagagaatttacaggatttccagatccatatacagaattaaatactggaaaaggagaaggagtagcttatagaggaaggcttttattatcacttgaaacaaaattagtagaacattctgaacaaaaagttgaagatttaccagctgatgatatcttaagagttgagaaatatctacgaagaagaaaatattcattatttgctgctttttatagtgcaactatgcttcaagatgttgacgatgctatccaattcgaagtaagtattggtaattatggaaataagttcgacatgacatgtttaccattagcatctacaacacaatactctagagcagtttttgatggttgtcattactattatttaccatggggaaatgtaaaaccagtagtagtattatcatcatattgggaggatattagtcatagaattgaaacacaaaaccaattacttggaattgcagatagattagaagctggtcttgaacaagttcatttggcacttaaagctcaatgttccacagaagatgtggatagtttagttgcacaacttacagatgaattaattgctggatgtagtcaacctcttggagacattcatgaaacaccttcagcaactcatttagaccaatatctttatcaacttagaacacatcatcttagtcaaattactgaagctgctcttgcactaaaattgggacattcagaattaccagcagcattagaacaagctgaagactggttacttcgtcttcgtgcattagcagaagaaccacaaaattcacttccagatatagtaatttggatgcttcaaggagataaaagagttgcttatcaaagagttccagctcaccaggttttattttcaagaagaggagcaaattattgtggaaaaaattgcggaaaattacaaactattttcttaaaatatccaatggaaaaagtaccaggggcacgtatgccagttcaaattcgagttaaactttggttcggtttatcagttgatgaaaaagaatttaaccaatttgctgaaggtaaattgtctgtattcgcagaaacttacgaaaatgagaccaaattagcacttgttggaaactgggggactacaggattaacatatccaaaattcagtgacgtaacaggtaagattaaattacctaaagattcttttcgtccatcagcaggatggacatgggcaggtgattggtttgtttgtccagaaaaaacattacttcacgatatggatgcaggacatttaagttttgttgaagaagttttcgaaaaccaaactcgtttgccaggaggacaatggatttatatgtcagataattatactgatgttaatggagaaaaggttttaccaaaggatgatattgaatgtccattaggatggaaatgggaagatgaagaatggtcaacagatcttaatagagcagttgatgaacagggatgggagtactcaattactatacctccagaaagaaaaccaaaacattgggtaccagctgaaaaaatgtattatacacataggagaagaaggtgggttcgtcttcgtagaagagacttatcacaaatggaagctttaaaacgtcatagacaagcagaagctgaaggtgaaggatgggaatatgcatctttatttggatggaagtttcatcttgagtatcgtaaaactgacgcatttagaaggagaagatggagaagaagaatggaaccattagaaaaaacaggaccagctgcagtatttgcattagaaggagctcttggaggtgttatggatgataaatcagaagactctatgtctgtttctactctttcattcggtgttaatagaccaactatttcctgtatttttgactatggaaatcgataccatctcagatgttatatgtatcaagcaagagatcttgctgcaatggataaagattcttttagtgacccttatgctattgtttcatttttacatcaatcacaaaaaactgttgttgttaaaaatactcttaatcctacatgggatcaaactcttattttttatgaaattgaaattttcggagagcctgcaacagttgctgaacagccaccatcaatagtcgttgagttgtatgatcatgatacttatggtgctgatgaatttatgggaagatgtatttgtcaaccatcattagaaaggatgccaagattagcttggttcccattaaccagaggatcgcaaccatcaggagaacttctagcatcatttgagcttattcaaagagaaaaaccagctattcatcatattccaggatttgaagttcaagaaacttccagaattttagatgaatctgaagatactgatcttccttatcctccaccacaaagagaagcaaatatttatatggttccacaaaatattaagccagctcttcaacgtacagctatagaaattcttgcttggggtttaagaaatatgaagtcttatcaattggcaaatatttcttcaccatcattagttgttgaatgtggaggacaaacagtacaaagttgtgttataagaaatctaagaaagaatccaaattttgatatttgtacattgtttatggaagttatgttaccaagagaagaactttattgccctccaattactgtaaaggtaattgataacagacaattcggaagaagaccagttgtaggacaatgtactattagatcattagaatcattcttatgtgatccatatagtgcagaatcaccatcaccacagggaggacctgatgacgtttcattattaagtccaggtgaagatgtattaattgatattgatgataaagaaccattgattccaatccaagaagaggaatttatagattggtggtcaaaatttttcgcttctattggagaacgtgaaaaatgtggatcatatttagaaaaagatttcgatacacttaaggtttatgatactcagcttgaaaacgtagaagcatttgaaggtttatcagatttttgtaatacttttaaactttatcgaggtaaaacacaagaagaaactgaagatccttcagttattggagaatttaaaggtctttttaaaatttatccacttccagaagatccagctattccaatgccacctagacaatttcatcaattagcagctcaaggaccacaagagtgtttagtaagaatttatattgttagagcttttggattacaaccaaaagatccaaatggaaaatgtgatccttatattaaaatttcaattggtaaaaaaagtgtttctgatcaagataattatattccatgtactcttgaaccagtttttggaaaaatgttcgaattaacgtgtactcttccacttgaaaaagacttaaaaattactctttatgactatgatttactttctaaagatgaaaaaattggagaaactgtagtagatttagaaaatagattactttcaaagtttggagctagatgtggattaccacaaacatactgtgtttcaggaccaaatcaatggagagatcaacttcgtccatcacaattattgcacttattttgtcaacagcatcgtgtaaaagcaccagtatatagaacagatagagttatgtttcaagataaagaatattcaattgaggaaattgaagctggaagaattccaaatccacatttagggcctgttgaagaaagattagctttacatgttttacaacaacagggattagtaccagaacatgtcgaatcaagaccactttattctccattgcaaccagatattgaacaaggaaaattacaaatgtgggttgatttgtttccaaaagcattagggagaccagggccaccattcaatattactccaagaagagcaagaagatttttcttaaggtgtattatttggaatacacgtgatgttattcttgatgatctttcacttactggtgaaaagatgtcagatatttatgtaaagggatggatgattggatttgaagaacataaacaaaagacagatgttcattatagaagtttaggaggtgaaggaaatttcaattggagatttatcttcccattcgattatcttccagctgaacaagtttgtacaattgcaaaaaaggatgctttttggagattagataaaacagaaagtaaaattccagcaagagttgtttttcaaatttgggataatgataaattttcttttgatgattttttaggaagtttacaattagatttaaataggatgcctaagccagctaaaactgctaaaaagtgttcacttgatcaattggatgatgcattccatccagaatggtttgtgtcattatttgaacaaaaaactgtaaaaggatggtggccatgtgttgcagaagaaggagaaaaaaaaattttagctggaaaattagaaatgactttagaaattgttgctgaaagtgaacatgaagaacgacctgctggtcaaggtagagatgaaccaaatatgaatccaaaacttgaagatccaagacgaccagatactagttttctttggttcacatcaccttataaaactatgaaatttatcttatggagaagatttagatgggctattatacttttcattattttattcattttattattatttttagcaatttttatttatgcatttcctaattatgcagctatgaaattagttaaaccatttagt

SEQ ID NO: 10636 - DNA, 6243 bp, synthetic construct
  misc_feature 1..6243: note = source = /note="Description of Artificial Sequence: Synthetic coding sequence"
  source 1..6243: mol_type = other DNA
atgctatgttgtttattagtgcgggccagcaacttaccatcagccaaaaaggatagaagatcagaccctgtggcaagcctaacattccgcggcgttaagaaaagaaccaaggtcataaaaaactcagtgaacccagtgtggaacgagggatttgaatgggatctgaaaggaataccactcgatcagggatccgaactccacgtggtggtgaaggaccacgaaaccatgggccgcaaccgttttttgggcgaggctaaagtgcccctgagagaagttctcgctacccccagcctgtccgctagcttcaatgcacccttacttgacacaaagaagcagcccaccggggccagcctggtgctacaggtgagctacacccctctgcccggggctgtgcccctatttcccccccctacacctttagagccgtcaccaaccctgcctgatctagatgtggtggccgataccggcggcgaggaggacaccgaggaccagggactgaccggcgacgaagccgaaccatttctagaccagagcggtggtcccggggcacctaccactccaagaaaactgccatctcgccctcctccacactacccaggcatcaaacggaagcggtccgctcctacttctcgcaaactgctgtccgataaaccccaggattttcaaatccgcgtgcaggtcatagagggccgacagttgcctggtgtcaacattaagcctgtggtgaaggtgactgcagctggccaaaccaagcgtacccgcatccacaagggcaattccccactattcaacgaaaccctgttcttcaatctgtttgattctcccggcgagctattcgacgagcctattttcatcaccgttgtcgactcccggagtctgcgaactgacgccctgctcggggagttcaggatggacgttggcaccatctatcgggagcctaggcacgcctatttgaggaaatggttgctactgtccgatcctgacgattttagcgcaggcgcacgcggctacttaaaaacttccctctgtgttctgggaccaggcgatgaggcaccactggaaagaaaggacccaagtgaggataaagaagacatagaaagtaacctactgcggccaactggcgtggctctgagaggcgcacacttttgcctgaaagtgttccgtgccgaggatctacctcaaatggatgatgccgttatggacaatgttaagcagatctttgggtttgaaagcaataagaaaaatctggtggaccctttcgtggaagtttcttttgccggaaagatgctttgctccaagatcctcgaaaaaactgccaacccccagtggaaccagaacataactttacctgccatgtttccctcaatgtgcgaaaaaatgcggatccgcatcatcgactgggaccgtttgacccacaacgatattgtggccaccacctacctgagcatgagcaagatatccgcaccaggcggagagatagaggaggaacctgccggcgccgttaaaccttccaaggcctctgacctggacgactacctcggcttcctgccaacttttggcccctgttacattaatctctacggctcaccaagggagttcaccgggtttcctgatccatatacagagttaaacacaggtaagggcgagggcgttgcctatagaggccgcctattgctatccctcgagaccaagttagtcgagcatagcgagcagaaggtggaagatctcccagccgatgacatcctccgcgtggagaaatatcttcgcagacgtaaatattcattattcgccgcattttactctgccacaatgctgcaagatgtggatgatgcaatacagttcgaagtttctatcggcaattacggtaacaaatttgatatgacctgtctgcctttagcaagcactacccaatatagccgcgccgtttttgacgggtgccactattactatctgccatgggggaacgttaagcccgtggtggtgttatcaagctactgggaagacatttctcacaggatcgagactcagaaccagctgctcggcatcgccgacagactggaagctggcctggaacaggttcaccttgccctgaaggcccagtgttcaaccgaggatgtggactccctggtggctcagttgacagacgaactgattgctggatgtagccagcctttgggcgatatccacgagaccccctctgctacccatctagaccagtacctgtaccagttacggacccatcacctgtctcagatcacagaggctgctctggctttaaagctggggcactctgaactacctgccgctttagagcaggcagaggactggctgctgcgcctccgtgccctggctgaggagccacagaactctttgccagacattgtcatttggatgctgcagggcgacaagagggttgcataccaacgtgtgcctgcccatcaggtgctgttctccaggagaggggccaactattgtggtaagaattgcggcaagctccagactatatttctgaaatacccaatggagaaagtcccaggcgcaaggatgcctgttcagattcgggtgaagctgtggtttgggctgagtgtggatgagaaagaattcaatcagtttgccgaaggcaagctgagtgtgttcgctgaaacttacgagaatgagaccaaactggcactagtgggaaattgggggaccaccggcctgacctaccccaagttctctgatgtgaccggtaaaatcaagcttccaaaagacagttttaggccctctgcagggtggacctgggccggagactggttcgtttgccccgaaaagaccctccttcacgacatggatgccggtcatctaagtttcgtggaggaggtttttgagaatcagactagactccccggtggacagtggatttatatgagcgataattatacagacgtgaacggcgaaaaggttttacccaaggatgacatagagtgcccactgggatggaaatgggaggacgaagagtggtccaccgacttaaatagggctgtggatgaacaaggatgggaatatagcataacaattccccccgagagaaaaccaaagcactgggtgcctgcagaaaaaatgtattacacccaccggagaagacgatgggttagactgcgacgacgagatctgtctcagatggaagcccttaagaggcatagacaggctgaggccgaaggggagggatgggagtacgcttccctattcggctggaagttccatctggaataccggaaaaccgatgcatttaggagaagacgctggcgacgccgtatggagcctctggagaaaactgggcctgctgccgtgtttgccctggagggcgctctaggcggtgtgatggacgacaagagcgaggattccatgagtgtatccacattatcctttggagtcaatcggcctactatttcctgtattttcgattacggaaatcggtaccatctcaggtgttacatgtatcaggctcgggacctcgccgccatggataaggatagttttagtgacccatatgctatagtgagctttctgcatcagtcccagaaaacagtggtggtgaaaaatacactcaaccctacctgggaccagaccctgatcttttacgagattgaaatcttcggagaaccagctaccgtggccgaacagcctccttccatcgttgttgagttatacgaccacgatacctatggcgcagacgaattcatgggacgttgtatttgtcagcctagcctagaaagaatgcctagactcgcttggttccccctcactaggggctctcaacccagtggcgagctgctggccagcttcgagctgatccagagggagaagcctgcaatccaccacatccccggattcgaggttcaggagactagccgaatacttgacgaatctgaagacacagatctcccgtatcctcctccccagcgagaggcaaacatatacatggtcccccagaatatcaaaccagccctgcagcggaccgcaattgaaattctagcctggggactgcgcaacatgaagtcctaccagctggctaacataagttctccaagcttagtagttgaatgtggcggacagactgttcagtcctgtgtgatacgcaatctacgaaaaaatcctaatttcgacatctgcactctgttcatggaagtgatgctgccacgggaggaactatattgtcctcctataacagtaaaagtgattgataatcggcagtttggcaggcggccagtggtaggacaatgtactatccgctcactcgagtctttcctatgcgatccatactctgccgagagtccttcccctcaggggggccctgatgacgtgtccctgctgagccctggggaagacgtgctgatcgatatagacgacaaagaacctctgatacccattcaggaagaagagtttatagactggtggagcaaattctttgctagcataggcgagcgggaaaagtgtggcagctacttagaaaaggatttcgacaccctaaaggtgtacgacactcaacttgagaacgtagaagccttcgaaggcttaagtgatttctgcaacactttcaaactttacagggggaagacccaggaggaaactgaagaccctagcgttattggggaatttaaaggcctatttaaaatttatccactgcctgaagatcccgctattccaatgccaccaaggcagttccatcagctggcagcacagggcccacaggagtgcctggtgagaatctacatcgttcgggccttcggtttacagcctaaggatccaaacggtaagtgcgacccatacataaaaattagcatcggtaaaaagtctgttagtgaccaggataactatatcccatgtactttagaacccgtgttcggcaagatgttcgagctaacatgtactctgcctctggagaaagacctgaaaattaccctctatgattacgaccttctgagtaaagacgaaaagataggtgagacagtggtggacctcgagaatcggttactgagtaaatttggagccagatgtggccttccccagacatactgcgtttctggccccaatcagtggcgcgatcagctaaggccaagtcagctgttacacttattctgccagcagcacagagtgaaagcaccagtttacaggaccgatcgggttatgtttcaagataaggaatatagcattgaggagatcgaagctggtagaatacctaatccacaccttggtcccgtggaagaaaggttggccctgcacgtactgcagcagcagggtctggtgccggaacacgtggaaagtcgtccactctactctccattacagccagatatagagcaaggcaagttacagatgtgggttgatttatttcccaaggccctggggaggcctggccctccttttaatattacacctcggagagcccgtaggttctttttaagatgtattatatggaacacccgagacgtcatcctagatgatctgtcccttacaggggagaagatgtccgacatttacgtgaagggctggatgataggttttgaagaacacaaacagaagaccgatgttcattaccggtccctgggcggtgaaggaaacttcaattggaggtttatattcccctttgactatctgccagctgagcaggtgtgtactattgcaaaaaaagacgcattttggcgactggacaaaaccgagagtaagatcccagctcgggtggtgttccaaatatgggataacgacaagttctcttttgacgatttcctaggatccctacaactggatttgaacagaatgcccaagcccgccaaaacagccaagaaatgctccctcgatcagctcgacgacgcatttcatcctgagtggttcgtcagcctgtttgagcagaaaaccgttaagggatggtggccttgcgttgctgaggaaggcgagaagaaaattctggccggcaaactggagatgactctcgagatcgtagcagagagcgaacacgaggagcgtcccgcagggcaggggcgcgatgaaccaaacatgaaccctaaattagaagatcctcggcggcccgacacctctttcctgtggtttacaagcccctataaaacaatgaaattcattctctggcgcagattccggtgggccataatcctgtttattattctgtttatcctgctgctgtttctagctatcttcatctatgctttccccaactatgctgctatgaagctggtgaagcctttttcc

SEQ ID NO: 10637 - DNA, 6243 bp, synthetic construct
  misc_feature 1..6243: note = source = /note="Description of Artificial Sequence: Synthetic coding sequence"
  source 1..6243: mol_type = other DNA
atgctatgctgcctgcttgtccgagcgagcaatcttccatctgcaaagaaggatagacggtcagatcccgtcgcatccctgaccttccgaggtgtcaaaaagcgcacaaaagtgatcaagaattccgtcaatccagtctggaacgaaggatttgagtgggacctcaagggcatcccactcgatcagggcagtgagctgcatgttgtcgttaaggatcatgaaacgatgggtcggaaccgttttctcggcgaagcgaaggttcccctgagggaggtcttggccacgcctagcctgtccgcatcgttcaacgcacccctactggacaccaagaagcagccgacgggcgccagcttggtcctacaggtttcatatacccccttgcctggggctgtgcctcttttccctccacccacgccacttgagcctagtccgacactccccgatctggacgttgtggccgataccgggggagaagaagatacagaagatcaaggtttaacaggcgatgaagccgagccgtttctggaccaatctggtggaccaggagcccctactacccctcgcaagttgccctcccggccgccgccccactatcctggcatcaagcgaaagcgctcggctccgacaagccgcaagctcttatccgataagccccaggatttccagattcgggtacaggtgatcgagggacggcaattgcccggagttaacattaaacctgttgtaaaggtcaccgccgctggtcagacgaaacgcacacgtatccacaagggaaactcgcctctcttcaacgagactttgttcttcaatctcttcgattcgcctggtgaactgttcgatgaaccaatattcattactgtcgttgacagccgatccctacgcactgatgcactactcggtgagttcagaatggacgttggcaccatttatcgtgagcctagacatgcctaccttcgaaaatggttgcttctctcggacccggacgatttttcagcaggtgcgcgtggttatttaaaaaccagtctgtgtgtgcttggtccgggagacgaagcgccccttgagcgcaaggacccgtctgaagacaaggaggacattgagtcgaacctacttagacccaccggcgtcgccctccgtggagcccatttttgtctgaaagtgttccgcgccgaagatctcccgcagatggacgatgccgtgatggataatgtcaagcagatttttggcttcgaaagtaacaaaaaaaaccttgtcgacccttttgttgaggtgtcttttgctggcaagatgctgtgctcgaaaatcctagagaaaacggcgaacccccaatggaaccagaatatcaccctgccagcgatgttccctagtatgtgcgagaaaatgcgcatcaggatcatcgattgggatagattgacacataatgacattgttgctacaacttatctttccatgtccaagatctctgcgccgggcggcgagatagaggaggaacctgctggggccgtcaagccatcaaaagccagtgatctagacgattatctgggtttcttgccgacgttcggtccctgttacatcaacctgtacgggtctccccgtgagttcaccggctttccagacccgtatactgagttgaacacaggtaaaggagagggggtcgcatatcgtggtcgccttctgctgtcacttgagactaagctagtagaacactcagagcagaaggtggaggacctcccggccgacgacattctccgcgtagaaaaatacctacgaaggcgaaaatattcactatttgctgccttctactcggccacgatgcttcaagatgttgacgacgctatccagttcgaggtttccatcggcaattatggtaacaaattcgacatgacgtgcttgcccttggcttcgacgactcagtactcgcgggcagttttcgatggatgtcattactactacttaccttggggcaacgtcaagccagtcgtcgtgcttagctcgtactgggaggatatctcgcatcggattgagactcagaatcagttattgggcatcgccgaccgtctcgaggctggtctcgaacaggttcatctcgcgttgaaggcccaatgtagtactgaggacgtcgattccctcgtcgcccagcttacagatgaactcatcgccggatgcagccagccactcggggatattcacgaaacaccatcggcaactcatctggatcaatacctctatcagttgaggacccatcatctctctcagataacggaagccgctcttgctttaaagcttggacatagcgagttgcctgccgcccttgagcaggccgaggattggctccttcggcttcgcgccttggccgaggaaccccagaattcactccccgatatagtaatctggatgctgcaaggcgacaaaagggtcgcgtaccagagggtccctgcccaccaggtgcttttctctcgccgaggtgcaaattattgtgggaaaaactgtgggaagttacagaccatcttcctaaagtatccgatggagaaagttccgggagctaggatgcctgttcaaatcagagtaaagctttggttcggtctcagtgtcgatgagaaagagttcaaccaatttgctgagggcaagttatctgtgttcgcggagacctacgagaatgagacgaagttggctcttgtcggtaactggggtaccaccgggttgacatatccgaaattttcagacgtaaccgggaagattaagctgccgaaggactctttccggccgtcggcggggtggacttgggccggcgactggtttgtttgcccggagaagacgctcttgcatgacatggacgccgggcacttgtcgttcgtggaggaagtgttcgaaaaccagacgcgtctgcccggaggacaatggatttacatgagtgacaactacactgatgtgaacggcgaaaaagtcttaccaaaagacgatatcgagtgcccccttggttggaagtgggaggatgaggaatggagcacagatctaaaccgggccgtcgacgaacagggatgggagtactccattacgattccacccgaacggaagccaaagcactgggtgcccgctgagaaaatgtattatacccatcgccgtcgtcgatgggtgcgccttagaaggcgggacctatcgcagatggaggccctgaagcgccatagacaagcagaggccgagggagaaggctgggagtatgcatctctgtttggatggaaatttcatttggaataccgaaagaccgacgcattccgccgtcggcggtggcgccggaggatggagcctttggagaagactgggcccgccgctgtgttcgctctcgaaggtgcgctcggcggtgtcatggacgacaaatccgaagattccatgagcgtctctacactcagcttcggagtaaatagaccgactatttcctgtattttcgattacggcaatcgatatcatctgcggtgctacatgtatcaggcgcgagaccttgcggctatggataaggatagtttctccgacccgtatgcgattgtgtcgttccttcatcagtctcaaaaaacagttgtcgttaaaaacacgctaaaccccacctgggaccaaacactaatcttctacgaaattgagatctttggcgagcccgccaccgttgctgaacaaccaccgagcattgtggtggaattgtacgatcacgatacctacggggcagacgagttcatggggcgatgtatctgccagccttcgctagaacgtatgccgcgactagcctggttcccattgacccgtgggtcacaaccgtccggtgaacttttggcaagctttgaattgatccaacgggagaaaccggcaatccatcacattccaggcttcgaggtccaggaaacgagtcgtattttagacgaatctgaggataccgatctcccctacccgccacctcagcgtgaagctaacatctacatggttcctcagaatattaagccggccctgcaaaggacagcgatcgaaatcctcgcgtgggggttgcgcaatatgaagtcgtatcagttggccaacatcagtagtccgtcgctcgtagtcgagtgtggtggtcaaacagtacaatcctgcgtcattcgaaatttgcgaaaaaatcccaactttgacatctgcacccttttcatggaagtgatgcttccacgggaggaactctactgtcctccgatcacagttaaggtgatcgacaaccgccaattcggacgacgcccggtcgttggacagtgtaccattcgcagccttgagtcattcttgtgtgatccctactctgcggagtcccctagcccgcagggggggcccgatgatgtgagcctcttgtctcccggggaggacgtcctgatcgacatagacgacaaagagcctctcatacccatacaagaggaagaatttattgattggtggtcgaaattcttcgcatcgattggcgagcgggaaaagtgcggttcatacctagaaaaggatttcgatacattaaaggtatacgatacgcagctggaaaatgtcgaggcgttcgagggtctctcggatttctgcaacacttttaaactctatcggggaaaaacgcaagaggaaacagaagacccaagcgtaattggggagtttaagggcctcttcaaaatttatcctttgcctgaggaccctgcaatacctatgccgccgcgacagttccatcagcttgctgcacagggtcctcaggaatgcctggtgcgtatatacatcgtgcgcgcgtttggccttcagccgaaggacccaaatggcaaatgcgatccatacatcaaaatcagtattggtaagaagtccgtctccgaccaggataactacataccatgtaccctcgagccagtttttggaaagatgttcgaactgacatgcaccctgccactcgagaaagatttgaaaattactttgtacgactatgacttgcttagcaaggatgaaaaaataggcgaaacggtcgtggatctcgagaaccgactgttgtccaagtttggtgcccgctgcggtctccctcagacctactgcgtaagcggtccgaaccaatggcgcgaccagcttcgtccaagccaactccttcatctgttttgccaacagcatcgtgtcaaggctcccgtctatagaaccgatagggtgatgttccaggacaaggagtattccattgaggaaattgaagcgggaagaatcccgaacccacatctcggtcctgtggaagagcgcctggcactgcatgttttgcaacaacagggactggtcccagagcacgtggagtcccgacctctttattcgcctcttcagcccgacatcgaacaagggaaattgcagatgtgggttgatctattcccgaaagcgctggggcgcccaggtccacctttcaacatcacgccgcgccgtgccagaaggttttttcttcgctgcatcatatggaacacacgcgacgtgatcttagacgatctctctcttacaggcgagaagatgtccgatatctacgtgaagggctggatgatcggctttgaagaacacaagcagaaaactgatgtgcattaccggtcgcttggcggcgaaggaaattttaattggcgctttatcttcccgttcgattatctgcctgcagagcaggtatgtacgatcgcgaagaaggatgcattctggcgccttgacaagaccgagtcaaaaatcccggcgcgtgtggtgttccagatctgggataacgataagttctctttcgacgactttttggggtccctccaactagacttgaaccgtatgcctaaaccagcaaaaacagctaagaagtgctctctagatcagctggacgacgcatttcatcccgagtggttcgtcagcctgtttgagcagaagaccgttaagggctggtggccttgcgttgctgaggagggggaaaagaagatcctggctgggaagctcgagatgaccttagagattgtggcggaaagcgagcatgaagaacgacccgcaggccaaggcagggacgaaccaaacatgaatccgaagttggaagaccctcggcgcccggacacctctttcctctggtttacgtccccctataagactatgaaattcatcctttggcgtagattccggtgggccatcatactatttataattctgttcattctgctcctgtttcttgcaatcttcatatatgcttttcccaattacgccgcgatgaagttggttaagccattttcc

SEQ ID NO: 10638 - DNA, 6243 bp, synthetic construct
  misc_feature 1..6243: note = source = /note="Description of Artificial Sequence: Synthetic coding sequence"
  source 1..6243: mol_type = other DNA
atgctttgctgcttgctggtgcgggccagcaacctgcctagcgccaaaaaggatagacgctcggacccagtggcttccctcactttccggggtgtgaagaaacgcacgaaggtgatcaagaactcagtgaacccagtatggaacgagggattcgaatgggaccttaagggcatcccgctcgaccaaggaagcgaactgcacgtagttgttaaggatcacgagactatggggaggaatcgctttctcggagaagccaaagtccctctgagagaggtccttgccactccgtcactcagtgcctccttcaacgctccacttctggacactaaaaagcaaccaaccggcgcttcgctggtgctgcaagtgtcgtatactcctctgcccggagctgtgccgctgtttcctccaccgactcccttggagccatccccaactctgcctgacctcgacgtcgtggccgatactggaggagaggaggacaccgaggatcagggattgacgggtgacgaagcggaaccatttctggatcagtctggtggcccaggcgcaccgaccaccccgagaaagctcccgtcccgcccacccccgcactacccaggaatcaaacggaagaggagcgcgccgacgagccggaagctgctttccgacaaaccccaggacttccagattagagtccaggtgattgagggccgccagctgccgggagtgaatatcaagccagtcgtaaaagtcaccgccgccggccagactaagagaactagaatccataaaggaaattcaccgctcttcaacgagactctgttctttaatctgttcgactccccaggagaactctttgacgaaccgatcttcattaccgttgtggattcgcgcagcctccgcaccgacgccctgttgggagaattccgcatggacgtgggcaccatctaccgtgaaccgcggcacgcctacctgcggaagtggctgttgctgagcgacccggatgacttcagtgccggcgcccgcggttacttgaaaacttcgctctgcgttctcgggcccggagacgaagccccgctcgaacgcaaggatccgagcgaggacaaggaggatatcgagtcgaatctcctcagacccaccggtgtggccctcaggggtgctcacttctgcctcaaggtgtttcgggcagaagatctgccgcaaatggatgatgccgtgatggacaacgtcaagcagatctttggttttgaatcgaacaaaaagaacctcgtcgacccgttcgtggaggtgtcattcgccgggaagatgctctgcagcaagattctggaaaagactgccaacccacagtggaaccagaacatcacgcttccggcaatgttcccgtcgatgtgtgaaaagatgcggattaggatcatcgactgggacagactgacccacaacgacatcgtggccactacctacctgagcatgtccaagatctccgccccgggtggagagattgaggaagaaccggcgggagccgttaagccctccaaagcgtccgacctggacgactacttgggtttcttgccgaccttcggcccgtgctatatcaatctgtatggttcaccacgcgagttcaccggattccccgacccttacactgaactcaacaccggaaagggagaaggagtcgcataccgcggaaggctcctgctctcgctggaaaccaagctggtggagcattcggaacaaaaggtggaggacctgccggctgatgacatcctccgcgtcgaaaagtacctgagacgacgcaagtacagcctgttcgcagctttctacagcgccactatgcttcaggacgtggacgatgcaatccagttcgaagtgtcgatcggtaactacgggaataagttcgatatgacttgcctgccgctcgcttcaaccacccaatactcccgggccgtgttcgacggatgccactattactacctgccgtggggaaacgtgaagccggtggtggtgctgtctagctactgggaggatatctctcaccggatcgaaacgcagaatcaactgctgggaatcgccgacagactggaggcaggccttgagcaggtccacttggccctgaaagcacagtgctcgactgaagatgtggacagcctggtggctcaactcaccgacgagctcatcgcgggttgctcccagcctctcggcgacatccatgaaactccttcagcgacccacttggatcaatacctctaccaattgcggactcatcatttgagccagatcaccgaagcagcactggcacttaagctggggcactcagagctccctgcagctctggaacaggcagaagattggctgctgcgcctgcgcgccctggctgaagaaccacagaattcgctcccggacatcgtaatctggatgctccagggggacaagagagtggcttaccagagagtgccagcgcatcaagtgctgttttcgcgccgcggagcgaactactgcgggaagaactgtggcaagttgcaaacgatctttctgaagtaccccatggagaaggtgccaggcgcacgcatgccggtgcaaatccgcgtcaagctctggttcgggctgtctgtggatgaaaaagaattcaaccaattcgccgagggcaagctgtccgtgtttgccgaaacctacgagaatgaaaccaagttggcactggtcggcaactggggaaccaccggcctgacttacccgaagttctcggacgtcaccggcaagattaagttgcctaaggattcgttccgcccttccgccggctggacctgggccggggattggttcgtctgtccggaaaagaccctgctgcatgatatggacgcgggacacctgtcctttgtggaggaggtgtttgaaaaccagacccgactgcctgggggacagtggatctacatgtccgataactacaccgatgtgaacggggaaaaagtccttccaaaagatgacatcgaatgcccactgggatggaaatgggaggacgaggaatggtccactgaccttaacagggcggtggatgaacagggatgggagtattcaataacgatcccgccagagcgtaaacccaagcactgggtgccggctgaaaagatgtactacacgcatcgtagaaggcgctgggtcaggcttagacggcgggatttgtcgcagatggaagctctgaagcgccaccggcaggcggaagctgaaggggaggggtgggagtacgcaagcctgttcggatggaaattccaccttgaataccgcaaaaccgacgcttttagaaggcggaggtggagaaggcggatggaaccacttgaaaagacgggacctgcagcagtgttcgcactggagggagcactcggaggagtgatggacgataagtcagaagattccatgtcagtctctaccctgagcttcggagttaaccggccaacgatctcctgcatcttcgactacgggaacaggtaccatctgcgctgctacatgtaccaggcccgggacctggccgcgatggataaagacagcttctccgacccgtacgctatcgtgagctttttgcaccagtcccaaaagactgtcgtcgtgaagaatactttgaaccctacctgggatcaaacgctgatattctacgaaatcgaaatctttggagaaccggccaccgtggcggaacagcctccgagcatcgtggtggagttgtacgatcatgatacctacggggctgacgagttcatgggacggtgcatctgtcagccttccctcgagcggatgccccgcctggcgtggttcccgttgactcgcggcagccagccctccggagagctgctcgccagcttcgaattgatccagagagaaaagccagcaattcaccatatccccggattcgaagtgcaagaaacttctcggatcctggacgagtctgaagatactgacctgccgtaccctccaccgcaacgggaggctaatatctacatggtgccgcagaacattaagccagccctgcagagaaccgccattgaaattctggcttggggcttgcgcaacatgaagtcctaccagctggccaacatctcgtcgccgtctctggtcgtggagtgtggaggacagaccgtccagagctgcgtgattaggaatctgcggaagaacccgaacttcgacatctgcactctcttcatggaggtgatgctgccgcgggaggaactttattgtcctcccatcacggtcaaagtgatcgataaccggcaattcggaagaaggccggtggtgggccagtgtactatccgctcgcttgagtcctttttgtgcgatccttactcagcagaatccccaagccctcaaggcggacccgacgacgtgtcactgttgtcgcctggggaagatgtgctgatagatatcgatgacaaagaaccgttgatcccaattcaggaagaagaattcattgattggtggtccaaattcttcgcctccatcggagagagggagaagtgtggatcgtacttggagaaggatttcgacactctgaaggtgtatgacacccaactggaaaatgtggaagccttcgagggactgtccgacttttgcaacactttcaagctctaccggggaaagacccaagaggagactgaggacccgtcagtcatcggcgaattcaagggcctgttcaaaatctaccctctcccagaagatccggcgatcccgatgccaccgcgccaattccatcagctcgccgcgcagggcccacaggaatgcctggtgcgcatttacatcgtgcgggcattcggcctgcagccaaaagatccgaacggaaagtgcgatccgtacatcaaaatctcaataggaaagaagtcagtctcagaccaggacaactacataccatgcaccctcgaacccgtgtttggaaagatgttcgagctgacctgtactcttcctctcgagaaggacctcaagatcactttgtatgattacgatctcctgtccaaggatgaaaagatcggggaaactgtggtggatctcgaaaaccgcctcttgtccaagttcggcgcgcggtgtggactgcctcagacctactgcgtgtccgggccgaaccagtggagagatcaactccgaccttcccagctgctccatctcttttgccagcagcaccgggtgaaggcgccagtgtaccggactgatcgcgttatgttccaagacaaagagtactcaatcgaggagatcgaggcaggccggattccaaaccctcacctgggtcctgtggaagagagacttgccctgcacgtcctgcagcaacagggactcgtcccggaacatgtggagtcgcgcccactgtactcaccactgcagccggacatcgaacaaggcaaactgcagatgtgggtcgacctgtttccgaaagcgctggggcgcccgggaccacctttcaacatcacgccaaggagagcacggcgcttctttctccgctgtatcatttggaatacccgggatgttatcctcgatgatctgtcactgactggagagaagatgagcgacatttatgtgaaggggtggatgataggtttcgaggagcacaaacaaaagaccgacgtgcattatcgcagcctgggaggcgaaggcaatttcaattggcggtttatctttccattcgactacctgcctgcagagcaagtgtgcaccatcgctaaaaaggatgctttctggcgcctggacaagaccgaatcaaaaatcccggcccgcgttgtattccaaatctgggataatgacaagttttcctttgacgactttctgggatcgctgcagctcgacctgaatcggatgcctaaaccggctaagactgcgaagaagtgctcgctcgaccaactcgatgacgcgttccaccctgagtggttcgtctcgctgtttgaacagaaaaccgttaaaggttggtggccttgcgtcgccgaagaaggagagaagaaaatcctcgcgggaaaattggagatgactctcgagatcgtggcggaaagcgaacacgaggaacgcccagcaggccaaggacgcgacgagcctaatatgaatcctaagttggaagatccgcgccgacctgacacctctttcctgtggtttacttcaccgtacaagactatgaagttcattttgtggaggcggttcaggtgggccatcatcctcttcattatcctgttcatcttgctcctgttcctggccatctttatctacgccttccccaattacgccgctatgaaattggtcaagccgttctca

SEQ ID NO: 10639 - DNA, 6243 bp, synthetic construct
  misc_feature 1..6243: note = source = /note="Description of Artificial Sequence: Synthetic coding sequence"
  source 1..6243: mol_type = other DNA
atgctgtgctgcctgttagttagggcttccaacctaccatctgcgaaaaaggatcgccggtctgatccagtggcaagcttgacattccgaggagtcaagaagagaaccaaggtgattaaaaactccgttaaccctgtttggaacgagggattcgaatgggatttgaagggcatacccctcgatcagggatccgagcttcacgtcgtagtcaaagatcatgagacgatggggaggaacagatttctgggggaggcaaaggtccctcttcgagaggtgctggctaccccgagcctgtccgctagtttcaatgcgcctcttctggacaccaaaaaacagcctacaggggcgtcactggtcctgcaggtctcctatactcctctgcccggtgctgtgcccctctttccaccaccaacacctctggaaccgagtccgactctgcctgatctggacgtagtggctgacactgggggtgaggaagatacagaagatcaaggactgactggagacgaggctgagccgtttttggaccagtcaggtgggcccggagcgcccacaacgcctcgcaagctcccaagccgcccccccccacactatcctgggatcaagagaaagcggtcagcaccaacaagtcgcaaattactgtccgataagccccaggacttccagatcagagtgcaggtgattgaaggccgtcaactgcccggggtgaacatcaagcctgttgtgaaggtgacggcagccgggcagacaaagaggacccgcatccacaaggggaactcccctctgtttaatgagactctgttttttaacctctttgatagtcccggagaattgtttgatgaacctatattcattacggtagtcgattccagaagtttgaggactgacgccctgctcggcgagtttcgcatggatgtgggcactatctaccgagagcctaggcacgcctacctgaggaagtggttgctcctgtctgatcctgatgacttttccgcaggagcgaggggctatctgaaaaccagcctttgcgtcctgggccctggagacgaagcccctctggaacgaaaggatcctagcgaagacaaggaggacatagaaagcaacctgctgcggcctactggtgttgcgttgagaggcgcacacttttgtttgaaggtcttcagagctgaagatctgccgcaaatggatgacgccgtcatggacaatgtgaaacagatttttggcttcgagagtaataaaaagaacctggtcgatccttttgtagaagtgagttttgccgggaaaatgctttgctccaaaatcctcgaaaagactgccaaccctcaatggaatcaaaatattaccttaccagccatgttcccctcaatgtgcgagaaaatgaggattaggatcatagactgggataggcttacacataatgacattgtagcaaccacatacttaagcatgtcaaaaattagcgctccaggcggggagatcgaagaggagccagctggagccgttaagccttccaaggctagcgatttagatgattacctgggcttcttgcccaccttcggcccatgctatatcaacctatacggcagccccagggaattcacgggctttccagatccatatactgagctaaatactggcaaaggggaaggtgtggcctacagaggaagacttcttctttccctcgagaccaagctggttgagcacagcgaacagaaggtggaggatctccctgccgacgacatcttacgggtcgaaaagtacctgagaaggcgcaaatactctctgtttgcagcgttttattccgccaccatgctgcaggatgttgacgacgctattcagttcgaggtttctatcggcaattacggcaataaattcgacatgacatgcctcccactcgctagcaccacccagtactcacgggccgtgttcgatggatgtcattactactacctgccctggggtaatgttaaacccgttgttgttctgagtagctattgggaagatatctcgcacagaatcgaaactcaaaaccaactgctcggaattgctgataggctggaagctggtttagagcaggtgcatctcgcccttaaggcacaatgctccacggaggacgtggactcgctggtcgctcagctcaccgacgagcttattgcaggatgctcccaacctcttggtgatattcatgaaactccaagcgccacccacctcgaccagtacttgtatcagctgcggactcatcatctctcccagatcaccgaagctgcactggctctgaagctgggtcattccgagctgccagctgccctggagcaggcagaagactggctactgaggctacgggccctcgctgaggagccacagaatagcctacccgatatcgtcatatggatgttacagggcgacaagcgggtggcctaccagcgggttcccgcccaccaagtattattctctcgccgcggcgcaaattactgtggcaagaactgcgggaagttacagaccatttttttgaagtatcctatggaaaaggtccctggcgcccgcatgccagtgcagatcagagtcaaactgtggttcggtctgtctgttgatgagaaagagtttaaccagttcgctgaaggaaagcttagcgtgttcgcggagacttacgagaacgagaccaaattagccctcgtggggaattggggcaccactgggctcacgtacccaaagttcagcgacgtgaccgggaagatcaaacttcctaaggattcatttaggccttccgccgggtggacgtgggctggggactggttcgtgtgccctgaaaagacacttctgcacgacatggatgctggccacctgtcatttgtagaagaggttttcgaaaaccagactaggcttcccgggggccagtggatttacatgtccgacaactacaccgatgtgaacggcgagaaagtgcttccaaaggatgacattgagtgccctctgggctggaaatgggaagatgaggaatggtcaacagacctcaatcgcgcagttgatgaacagggatgggaatattctatcacgattcctcctgagcgtaaacccaagcactgggtgccagccgagaaaatgtactacactcatcgaaggaggcgctgggtgcggttacgccgcagagatttgtcacagatggaggctcttaagcgtcaccggcaggctgaggccgagggggaggggtgggaatacgcctcactattcggttggaagttccacctggagtaccggaagacagatgctttcagaaggaggcgatggagacgcagaatggaaccgctcgaaaaaacaggccctgcggcagtgttcgctttagagggagccctagggggcgtgatggacgataagtctgaggacagtatgtcagtcagtacgcttagttttggcgtcaataggcccacaatctcgtgtattttcgattacgggaacagataccatctgcggtgttacatgtatcaggcccgagacctggcagcaatggataaggactccttttcggatccctacgccattgtgagcttcctccatcaatcccaaaagaccgttgtggtcaaaaacaccctgaatcctacttgggaccagactctgatattctacgagatcgagatcttcggggaacccgccaccgtagccgaacaaccacccagcatcgtggttgagctatatgaccacgatacatacggcgccgatgaatttatgggccgctgtatctgccagccatctctggaacgcatgcccagattggcctggttccccctcacaaggggctcgcaaccaagcggcgagctgctggcctcatttgagctcattcaacgcgagaaacccgccatccatcacattccaggattcgaggtgcaggagacgtcgcggattcttgacgagagcgaagatacagacctcccatatcctccaccacagcgcgaggcaaacatctacatggttccacaaaacatcaagccagcgcttcagcgcactgcaattgagattcttgcatgggggctgcgcaatatgaaatcttaccagctggccaatatttcatcacccagcctggttgttgagtgtggcggtcagaccgtacagtcctgtgtgataagaaacttgaggaaaaacccaaacttcgacatctgtaccctttttatggaggtcatgctgcctcgcgaggaattatattgtcccccaattacagtgaaggtcatcgacaacagacagttcggaagaagacccgtagtgggccagtgcaccatcaggtcgctcgaaagtttcctatgcgacccttactcagccgaaagccctagcccacagggaggaccggacgacgtatcactactgagcccaggtgaggatgtcctgattgacatcgacgacaaggaaccactgatacccattcaggaagaagaatttatcgattggtggagcaaattctttgcatccattggggaacgcgagaaatgcggctcatatctcgagaaggactttgacacactgaaggtttacgacacccagttggagaacgtggaagcttttgagggcctttcggatttctgcaatacatttaagctgtatcggggcaaaacccaggaggaaactgaagatccaagtgtcatcggcgaatttaagggtttgtttaagatttaccctcttccggaggatccagctatacctatgcccccccgtcaatttcatcagctggccgcccagggcccccaggagtgcctggtgcgcatatatatcgtgagagcgtttggtctgcagcctaaagatcctaacggaaagtgcgacccctatataaagatttcaatcggcaagaaaagcgttagcgaccaagacaactatatcccatgtacactggaaccagttttcggcaagatgttcgaactgacttgtacgctgcctctagaaaaggacctgaagattactttgtacgattatgatttgttgtccaaagatgagaagatcggggagacagtggttgacctggaaaacaggctgctgtcaaagtttggcgcgcgttgtggcctgccacagacatactgtgtgtcgggtccaaaccaatggagagatcagctgagaccaagccagcttctacacctcttctgtcagcagcaccgggtgaaggctcctgtctaccgcaccgatcgcgttatgttccaggataaagaatacagcatagaagagattgaagctgggcggattccaaatccacacttggggcctgtggaagaaaggttggctctccacgtattgcagcagcagggccttgttcctgagcatgttgaatcaaggcccctctactctccgctgcagcccgatatcgagcaggggaagttacagatgtgggttgacttgtttcccaaagcactggggagaccaggtcctccatttaacataacaccacggcgcgcacgcagattctttcttcgttgtattatctggaacactcgggacgttattctcgatgatcttagcctaaccggtgagaagatgtctgatatctatgtcaagggatggatgataggcttcgaggaacataaacagaagactgacgttcactaccggtcgcttgggggcgagggcaatttcaattggaggttcatcttccccttcgactatctccctgctgagcaggtgtgcaccattgccaagaaggacgccttctggagactggataagactgagagtaagattccagcccgcgtggttttccagatttgggataatgacaagttctcatttgacgacttcctcggctctctacagctggacctgaaccgcatgcctaagcccgctaagaccgccaaaaaatgttctctggatcagctggacgatgctttccatcctgagtggtttgtctctctgttcgagcaaaagacagtgaaggggtggtggccatgcgtggcggaggagggggaaaagaagatccttgccggtaaactggaaatgaccctggagattgtggcagaatccgaacacgaggaacgacccgcggggcaaggccgcgatgagcccaatatgaatcccaaattggaagacccaagacggccagatacatctttcctctggttcacctccccttacaagacgatgaaattcatcctgtggcgcaggttcagatgggctatcatattgtttatcatcctattcattctcttgctgttcctggctatcttcatatacgccttccctaactacgccgctatgaaactggtaaaaccgttcagt

SEQ ID NO: 10640 - DNA, 6243 bp, synthetic construct
  misc_feature 1..6243: note = source = /note="Description of Artificial Sequence: Synthetic coding sequence"
  source 1..6243: mol_type = other DNA
atgctctgctgtctactggttagggctagcaatctcccctcggccaagaaagaccgcaggagcgatcccgtggcgagcctcactttcaggggagtcaagaaacgcacaaaggtcatcaagaatagcgttaatcccgtctggaacgagggtttcgagtgggacctcaagggcatccccctcgaccaaggctccgaactgcacgtcgtggtcaaggatcacgagacgatggggcgtaaccggttcctcggcgaggcgaaagtgcctctccgcgaggtgctggccaccccgagtctgtccgctagcttcaacgccccccttctcgacaccaagaaacagcccaccggcgcttcgttggtgctccaggtctcatacacaccgctgcccggcgccgtgcccctcttccccccccctacaccgttggagccctcccccaccctcccagacctagacgtcgtcgccgacaccggtggagaggaggatactgaagaccagggtctcacaggcgatgaagccgaaccatttcttgaccagtccggtggtcccggtgcccccacgacaccccgtaaactgccgagtcgccccccgcctcactaccccggcatcaagcgtaagcgctccgcgcccactagccgaaagctactatctgataagccacaggactttcaaattcgggtccaggtcatcgagggccgccagctgcctggcgtgaatatcaagcccgtggtgaaggttactgccgctgggcagacgaagcggactcgcatccacaagggcaacagtccgctcttcaacgagactttgttctttaaccttttcgactctcccggggaattgttcgacgagcctatctttattaccgtggtcgattcccgttccttgcgaacggacgcacttctgggtgagtttaggatggacgtgggtaccatttatcgcgagccgcgacatgcatacctccggaagtggttgcttctgagtgatccagatgacttttccgctggtgcccgtggttatttgaaaacctctctatgtgtcttgggccctggtgatgaggctcctttagagcgtaaggacccctccgaagacaaggaagatatcgaaagcaacctcttgaggccaaccggtgtagcgttgcgtggagcccatttctgccttaaggtgttccgggccgaggacttgcctcagatggacgatgccgttatggataacgtcaagcagatctttggctttgagagtaataagaagaacctggtcgacccgttcgtggaagtctcgtttgctggtaagatgctgtgttcgaagattctcgagaagacggccaacccgcagtggaaccagaacattacgctacctgccatgttccccagcatgtgcgaaaagatgagaatccgtatcattgattgggaccgcctgacgcacaacgatatcgttgcaaccacgtacttgtccatgtcgaagatcagcgccccgggcggagaaatcgaggaagaacccgctggggccgtcaagcctagcaaggcctcggatctggacgactacctgggcttcctgcctaccttcggtccgtgttacattaacctgtacggctcgcctcgtgagttcaccggctttcccgacccttacacggaactgaacacgggcaagggcgaaggagtggcctaccgcggcaggctccttctctccctcgagaccaagctcgttgagcactcggagcagaaggtcgaggacctgcctgcagacgacatcctccgcgttgagaagtacctccggcggcgtaagtacagtttgttcgccgccttttactcagcgaccatgctgcaggacgtggacgacgctatccagttcgaggtctccatcggcaactacggtaataagttcgatatgacgtgccttccgttagcttctaccacgcagtacagccgagctgttttcgatggttgtcactactactatcttccctggggcaacgtcaagcccgttgtcgtcctgtctagttactgggaagatatttcgcaccggatcgagactcagaatcagctgctaggtatcgccgatcggctggaggccggtcttgagcaggtgcacctcgcccttaaagcccagtgctctaccgaggatgtagacagcctggtggcccaactgacggatgagctgattgcaggctgtagccagcccctaggagatatccacgagactcccagcgccacccatctggaccaatatctgtaccagcttcggacccaccacctaagccagatcactgaagccgccctggctctcaagcttggccactccgaattaccagccgctctggagcaggccgaggattggttgctccggctgcgcgccttggcggaggagccccaaaactctcttccagacatcgttatttggatgttgcaaggcgacaagcgcgtcgcgtaccagcgtgtgccggcccatcaggtgctgtttagccgccgcggtgcaaactactgcggcaagaactgtggaaagttgcagactatatttctgaagtaccccatggaaaaggttccgggagcgcgtatgcccgttcaaatccgtgtcaagctgtggtttggcctctccgttgacgagaaggagttcaaccagttcgccgagggtaaactgagcgtcttcgctgagacttatgagaacgaaaccaagctcgccctagtgggcaactggggtaccaccggcctcacctacccgaagttctccgacgttaccgggaagatcaagctgccgaaggattcattccgtccctccgctggatggacgtgggcaggtgactggttcgtctgtccggagaagacgttgttgcacgacatggatgccggccacctctcgtttgtggaggaggtcttcgaaaaccagacccgtcttcccggcggccaatggatttatatgagcgacaattacaccgacgtcaacggcgagaaggtactgcctaaggacgacatcgagtgtcctctcggatggaaatgggaagacgaagaatggtcaacagacctcaaccgcgcggtcgacgaacagggttgggaatattctattaccattcctcccgaaaggaagcctaagcattgggtgccggccgagaagatgtactacacccaccgccgccggagatgggtacgtctgcgtcggcgtgatctgtcgcaaatggaagcactgaagagacaccgccaggcagaagcggagggcgagggatgggagtatgccagcttgttcggttggaagtttcacctggagtatcggaagacagatgcattccgcagacgccgctggaggcgtcgtatggagcctttggaaaagaccggtcccgccgccgtttttgcgttggaaggcgccctcggcggagtcatggacgacaaatccgaagattcaatgtccgtcagcactttgagctttggtgtaaacagaccgacgatcagctgcatcttcgactacggcaataggtaccatctgcgctgctacatgtaccaagcacgcgaccttgcggctatggataaagattctttctcggatccttacgccatcgtcagcttcctccatcagagccaaaagaccgtcgtcgttaagaacacactcaacccgacatgggaccaaacgcttatcttctacgaaatcgagatctttggagagcccgctactgtggctgaacaacctccaagcatcgtggttgagctgtatgaccatgatacttacggtgccgacgaattcatgggacgttgcatatgtcagccctctctggaacgtatgccccgtttggcgtggtttcccctcacccgcggtagccagcccagcggcgagctcctcgctagcttcgagcttatccagcgggagaagccggccatccaccatatccctggctttgaggtccaagagacctcacgcatcctagatgaatctgaggacaccgaccttccgtacccgcccccacagcgcgaagccaatatttatatggttccccagaacatcaagcctgcccttcagcgcacggccatcgagatccttgcttggggtctgagaaacatgaagtcctaccagctcgccaacatctcaagtccctccctcgtggtggaatgcggcggtcagacagtccagtcgtgcgtcattcgcaaccttcgcaagaacccaaacttcgacatatgtactctgtttatggaggtgatgttgccccgcgaggagctctattgccccccgatcacagtgaaggtcatcgacaataggcaattcggacggcgccccgtcgtcggccaatgcactatccgctccctggagagttttttgtgcgatccttattccgcagaaagccccagcccgcagggcggccctgacgacgtctcccttctttccccgggagaggacgtcctaatcgacatcgacgataaggagcccttgatccctatccaggaggaggagttcattgactggtggtctaagtttttcgccagcattggcgagcgcgaaaaatgcgggagttacctcgagaaggacttcgatactctgaaggtctacgacactcagctcgagaacgtggaagccttcgagggtctttctgacttctgcaacaccttcaagctctatcgcggcaaaacccaagaggagacggaggatccttcggtgatcggggagtttaagggactgtttaagatctaccctttgcccgaagatcccgcaattcccatgccgccgcgccagttccatcagttggcggctcagggtccacaagaatgcttggttcgcatctacattgtccgggctttcggccttcaacctaaagacccaaatggtaagtgcgatccttacatcaagatttcgatcggtaagaagtccgtctcagaccaggacaattatattccttgcaccctggagcctgtcttcggtaagatgttcgagcttacatgcaccctgccactcgagaaggacctcaagattaccctctacgattacgaccttttgtccaaggatgaaaagatcggcgagactgttgttgatctggagaaccgtctccttagcaagtttggtgctcgctgcggtttgccccaaacgtattgcgtaagcggtcctaaccagtggcgtgaccaactccgacctagccagctcctccatctcttctgtcagcagcatagggtcaaagcgcctgtctaccgtaccgatcgcgttatgttccaggataaggaatactcgattgaggagatcgaagccggccgtatccccaacccgcacctcggtcccgtcgaagagcggctcgctctgcacgtgctgcagcagcagggcctcgtgcctgagcacgtggaatcccgcccgctatacagccccctccaacccgacattgaacagggtaagttgcagatgtgggtcgatttgttccctaaggctctcggacgtcctggccctcccttcaacataaccccccgcagggcccgtcggttcttcctgcgctgcatcatttggaacacccgcgatgtgattctggacgacctttcactgaccggcgaaaagatgtccgatatctacgtcaagggttggatgattggcttcgaggaacacaagcaaaaaacagacgtgcactacagatcccttggaggcgagggcaatttcaactggcgcttcatttttccttttgactacctccccgctgaacaggtgtgcaccatcgcgaagaaggacgccttctggcggctggataagaccgagtccaagatccctgcccgcgttgtgttccaaatttgggataacgacaaattctcgtttgacgacttcctgggctccttgcagctcgacctgaaccgcatgccaaagcctgccaagacggctaaaaagtgcagcctcgaccagctcgatgatgctttccacccagaatggtttgtctctttgttcgaacagaagactgtcaagggttggtggccttgtgtcgctgaggagggcgaaaagaagatcttggccggtaagttggaaatgaccttggagatcgtcgcagagtctgagcacgaggaacgcccggctggtcagggtcgggacgagcccaatatgaaccccaagctggaagaccctcggcgtcctgatacctcgttcctctggttcacctccccttacaagacgatgaagttcatcctttggcgtagattccgctgggccatcattcttttcatcatcctcttcatattgctgctcttcctggcaatctttatctacgccttccctaactatgccgccatgaagctggttaagccattctcg

SEQ ID NO: 10641 - DNA, 6243 bp, synthetic construct
  misc_feature 1..6243: note = source = /note="Description of Artificial Sequence: Synthetic coding sequence"
  source 1..6243: mol_type = other DNA
atgttgtgttgtctattagtccgcgcctctaacctgcctagtgctaagaaggaccgtcggagcgatcccgtcgcctcgctgactttcagaggagtcaaaaagcgcaccaaagttatcaaaaacagcgtcaaccctgtttggaatgaagggtttgagtgggatctgaagggaatcccactggatcaggggtctgagctacacgtcgtggttaaggatcacgagaccatgggcagaaaccgctttttaggggaggccaaggtcccactgagagaggtccttgctaccccctccctgagcgcgagctttaatgccccattacttgataccaaaaagcaacccaccggagcctccttggtcctgcaggtcagctacacaccgctgccaggagccgtgcctcttttcccaccacctacccctctagagcctagccccaccctgccggatctcgacgttgtcgctgatactgggggagaggaggatactgaggaccagggcctcaccggcgatgaggctgagccatttctggatcagtctggaggaccaggtgccccaaccacccctagaaagctaccctctagaccccctccacactatcctggtattaagaggaagaggtccgccccaacctcccgcaagctgttgagtgacaagcctcaggactttcagattagggtgcaggtaatcgagggccgccaacttcccggcgtgaatataaagcccgtggtgaaagttaccgcagcaggacagaccaagagaacacgcatccacaaaggtaactctcctctgtttaacgaaacattgttttttaacctctttgactcgccgggtgaattgttcgacgagccaattttcattacagtagtcgattctagaagcctaagaaccgacgccctgttaggggagtttcgcatggatgtggggaccatctatcgggagcccagacatgcctacctgcgaaaatggctgctgctgtctgaccccgacgatttcagtgccggggctcgcggatacttaaaaacttcgctttgtgtccttggtcctggcgacgaggcgcccctggagcgcaaagatccttcagaggacaaggaggatatcgaatccaacctgctcaggcctactggagtggccctgcggggcgcccatttttgcctgaaagtgtttagggccgaggacctgcctcaaatggacgatgcggtgatggacaacgtgaaacagatattcgggttcgagtcgaataagaagaatctggttgacccttttgtcgaggtgtccttcgccgggaagatgctttgcagtaagatactggaaaaaacggcaaatccgcagtggaaccaaaacatcacccttcctgctatgttccccagcatgtgcgagaaaatgcggattagaattattgactgggataggctcacgcacaatgacatcgtagctaccacatatctcagtatgtctaagataagtgctcccggaggcgagatagaggaagagccggccggcgcagtgaagccttccaaggcatctgacctggacgattacctcggttttttgccaacctttggaccatgctacatcaacctctatggctctcccagggaattcaccggattccccgatccttacacggagctgaatacgggaaaaggcgagggagtcgcgtatcgcgggagactcttgttatctttggaaacaaaactggtcgaacacagcgagcagaaagtagaggatttgcccgccgatgatatcttgagggtagaaaagtatcttagacgccgcaagtattctctcttcgcagccttttacagtgccaccatgctgcaagatgttgacgacgccatccagtttgaagtatctatcggtaattacggaaacaaattcgacatgacctgcctgccccttgcatctactacacagtacagccgtgcagtgttcgacggttgccactattattacctgccttggggcaatgtcaaaccagtcgtggttctcagctcatactgggaagacatatcccatcggatcgagacacagaatcagcttctgggcatagcagataggctggaagcgggcctggaacaggtgcatctcgctcttaaggcccagtgcagcacggaagatgtggatagcttggtcgcccagcttaccgacgaactgatagccggctgtagtcaacctctgggtgacattcatgagaccccttccgccacacatctggatcagtatctctaccaactgcgtacccaccatctatcccaaattactgaggctgccctggccttgaagcttgggcacagtgagctcccggccgcccttgagcaagctgaagactggctgctgcgcttgcgagctctggcagaggaacctcagaatagcctccccgatattgtgatctggatgctccagggcgacaagagggtagcctaccaacgtgtccccgcccatcaagttctgttcagcaggcgtggtgccaactactgcgggaagaactgtggaaagctgcagactatcttcttgaagtaccctatggagaaagttcccggggctaggatgcctgtccagattcgggttaaactgtggttcggtctcagcgtggacgagaaggagtttaaccagtttgcggaggggaagctcagcgtttttgcagaaacatatgagaatgagactaagctggctctggtgggcaattgggggaccaccggtctgacatatccaaagttcagtgacgtgaccggcaaaattaagctgccaaaagatagcttccgcccttcagcaggctggacatgggcaggagattggttcgtgtgtccagagaagaccctcctacatgatatggatgccggccatttgtcattcgtcgaagaggtgttcgagaatcagactcgcctccctggggggcaatggatctacatgtccgacaattataccgacgttaatggtgagaaagttctgcccaaagacgatatagaatgtccactgggatggaagtgggaagacgaggagtggtccactgatctaaaccgtgctgtcgatgagcagggctgggagtatagtatcactatccctcctgagagaaagcctaaacattgggttcctgctgagaagatgtactacacccatcgacggcgcagatgggtcagattacgccggcgagatctatcacagatggaggccctcaaacgtcatcgccaggctgaggccgaaggcgagggatgggaatacgcgtccctttttggctggaagtttcacctggagtataggaagactgatgcattcaggcgaaggagatggagaaggaggatggaacctctcgaaaagacaggaccagctgcagtgttcgcactcgaaggagcactagggggagtgatggatgacaagtctgaggatagcatgagcgtgtccaccctgagtttcggcgtgaaccgcccgacaatatcttgcatttttgactacggtaatcggtatcacctgcgctgttatatgtatcaggcccgggaccttgccgcgatggataaggactccttttctgacccgtatgccatcgtctcttttctgcaccagtcccagaagaccgtggtcgtcaagaacactctgaatcccacatgggaccagacactaatcttttatgagattgaaatcttcggagagcctgcgacagttgccgaacagccaccgagtatagtcgtcgagctctatgatcatgatacctatggcgccgacgagttcatgggacggtgcatttgccaaccctcactagagcgcatgccccgcctggcctggttccccttgacacgcggctcccagccctctggcgaactcctcgcttcgtttgagctgatccagagggaaaagcccgccatacaccacatcccaggattcgaggtgcaggaaacgtcccgaatactggacgaaagcgaggatactgatctcccctatccacctccgcagagagaggcaaatatttacatggttccgcagaacatcaagccagcactccagcgaactgccattgagattctggcatggggccttagaaatatgaagtcctatcagctcgcaaatatctcaagtccctctctggtggtggagtgcggaggacaaacagttcaatcttgcgtgatccgcaatctacgaaagaacccaaattttgacatctgtactctcttcatggaagtgatgctgccacgggaggagttgtactgcccaccgattacagtgaaagttatagacaatcggcaatttggtcgccgccctgtggtgggacagtgcacaatcaggagtctggaaagcttcctgtgtgacccatactcggcggagtcgccctcacctcaaggcggtccagacgatgtgtcactactgagcccaggcgaggatgtgctcattgatatagacgacaaagagcctctcattccaatacaagaggaggaattcatagactggtggtcgaaattttttgcttccataggagagcgggagaaatgtgggtcataccttgagaaagacttcgacaccctgaaggtgtatgatacgcagcttgaaaacgtggaagcctttgaagggctgtcggatttctgcaatacctttaaactatataggggtaagacccaggaggaaactgaggatccctccgtaataggtgaatttaaagggctgtttaagatataccccttgccagaggaccctgcaattcctatgccaccacgccagttccaccagttagccgcacaagggcctcaagagtgtcttgtcagaatctatatcgtgagagcgtttggactccagccaaaggacccaaacggaaagtgcgatccttacatcaaaatcagcataggcaaaaagtcggtctcagatcaggacaattacatcccctgcacactggagccggtttttgggaagatgtttgaactgacttgtaccctgcccctggaaaaggatcttaaaatcacattgtacgactacgacctgctgtccaaggatgagaagatcggggagactgtggtggacttagaaaatcggctgctctcgaaatttggggctcgctgtgggctgccacagacgtactgcgtgtctggaccaaatcagtggagagatcaacttcgtccctcccaactcctgcatctgttttgccagcagcatcgtgtgaaggctccagtgtaccggacagaccgggtcatgtttcaagataaggagtattctatcgaagagatcgaagccgggaggatcccaaacccacatctcgggcctgtagaggagcgtcttgcgctccatgtgcttcagcagcagggtctggtgcccgagcacgtcgaaagccggcccctatacagtccacttcagccggacattgagcaagggaagctgcagatgtgggtagacctgttcccaaaggctctggggaggcctggccccccgtttaacattacccccaggcgtgcaaggcgattcttccttcgatgtatcatttggaatactcgggacgtgatcctcgatgacctgagcctaaccggtgagaagatgtcagatatttatgtgaagggctggatgattggttttgaggaacacaaacaaaagaccgacgtgcattatcgctccctggggggggagggcaactttaattggcgttttatttttccattcgattatctccccgctgagcaagtttgcacaattgctaaaaaagacgccttctggagattagataagactgagtctaaaatacccgcccgcgttgtgttccagatctgggacaacgataagttttcgtttgacgatttcctgggcagcctgcagctagatctgaatcgtatgccgaaacctgccaagacggcgaagaagtgttccctggaccaactggatgatgcttttcatcccgaatggttcgtgtccctgtttgaacaaaagaccgtaaagggatggtggccgtgtgtcgcagaggagggtgaaaagaaaatcctggcaggcaaattggagatgactctggaaatcgtggccgagagtgagcacgaagaacggccagccgggcagggccgcgatgagccaaacatgaaccccaagctggaggatccccgcagacctgacacttcctttctgtggtttacaagtccgtacaagactatgaaattcattctctggagacgattccgatgggcgattattctgttcatcatcttatttattctgttgttgttcctggcgatttttatttacgccttcccaaattatgcagctatgaagctcgtgaaaccattctcg

SEQ ID NO: 10642 - DNA, 6243 bp, synthetic construct
  misc_feature 1..6243: note = source = /note="Description of Artificial Sequence: Synthetic coding sequence"
  source 1..6243: mol_type = other DNA
atgctctgctgtttgttagttagggcgtccaacctgccttccgcgaaaaaagatcgaagaagtgacccagttgccagtctgactttccggggagtcaaaaagagaactaaagttatcaaaaattccgtcaatcccgtgtggaacgaaggatttgaatgggatcttaaaggaataccactagaccagggatcagaattacacgtagtggtgaaagatcatgaaactatggggaggaatcggtttctcggagaggctaaagtgccgctacgagaggtgcttgccacacccagtctgtccgcttcttttaacgccccactgctagatactaaaaaacagcccactggagcctccctcgtactccaagtgtcctatacacctctccccggagctgtacccttatttcccccacccactcctctggaaccctctccaactcttcccgatcttgatgttgtggctgatactggaggggaagaagatactgaagatcagggactgacaggggatgaagctgaaccctttctggatcagtcaggaggacctggagctccaacaacacccaggaaacttccttctagacctcctccgcactatcccggaataaaaagaaaaagaagtgctcccactagtaggaaactactcagtgacaagccacaggatttccagatacgggtacaggtaatagaagggagacaactgcctggagttaatattaagcctgtggttaaagtgacggccgccggacagactaaaagaacaaggatacacaaagggaattcacctctttttaatgaaacactcttctttaaccttttcgattctcccggagaactttttgatgagccaatctttattactgtggttgattctagatccctcaggacagacgctcttcttggggaattcaggatggatgttgggacgatctatagagaaccccggcatgcatatcttcggaaatggctcttgttgagtgatccagatgatttctccgcgggggcacgcggatatcttaaaacttccctctgtgtactaggacccggggatgaagcaccgcttgagcggaaagatcctagtgaagataaagaagacatcgaatccaaccttttaagacccacaggagtagcgctgcgcggagcccatttctgtctcaaagtttttagagccgaggatctgccacagatggatgacgcagtcatggataacgtcaagcagatatttgggtttgaatccaataagaagaatctagtcgatcccttcgtcgaagtgtcttttgccgggaaaatgttgtgttctaaaatcctcgaaaaaacagcaaatccccagtggaatcagaatatcacactccctgccatgttcccttccatgtgcgaaaaaatgcgcatccggatcatagactgggatcgcctcacacataatgatattgtcgccacaacttatctatccatgtcgaaaatctccgcgcctggaggagaaattgaagaagaacctgccggggccgtgaaaccatccaaagcttccgatctggatgattatttggggtttcttccaacatttggaccttgctacatcaacttatacgggtcaccaagggaatttacagggttcccagatccatatactgagttgaacacagggaagggagaaggggtggcctatagaggacgtctccttttgagtctggaaacgaaattagtcgagcattctgagcagaaagttgaggatctccccgctgatgatatactcagagtggaaaaatacctgagacggagaaagtattccttgttcgccgctttttattcagccactatgctgcaggatgtggatgacgctattcaatttgaggtctctataggaaactatggaaacaaattcgatatgacatgcctcccactggcttctacaactcagtatagtcgggccgtatttgacgggtgccactattactatcttccctggggaaatgttaaacccgtggttgttctgtcctcttattgggaagatatctcgcacaggatagaaacacagaatcagctactggggatcgcagacagactggaagccggacttgaacaagtacatctcgccctaaaagcccagtgttctacagaggatgtcgactccctcgtggcccagttgacggacgaattaattgctggatgctcacagcctctcggagatatacatgaaacacctagtgccactcaccttgaccagtatttgtatcagttacgaactcaccatctatcccaaataactgaggctgccctcgccctgaaactaggacactcagaattgcccgctgcactggaacaggctgaagattggctcctcagactgcgggctctagctgaggaaccccagaactcactccccgatattgtcatctggatgcttcagggagataaaagggtagcatatcagagggttcccgctcatcaggtgctgttctcacgccgcggagctaactattgcgggaaaaattgtgggaaactacagactatattccttaaatatcccatggaaaaagttccaggggctcgaatgccggtgcagatcagagtaaaactctggtttgggctatccgtggatgaaaaggaattcaatcagtttgcagaagggaagttatctgtgttcgcagaaacatatgaaaatgagacaaaattagccttagttggaaattggggaacaacagggttaacttatccaaaattctctgatgtcacaggaaaaatcaaactccccaaggattcattcaggcctagtgccgggtggacatgggctggagattggtttgtatgcccagagaaaactctattacacgatatggatgccggacacttatcatttgtggaggaagtcttcgaaaatcagacacggcttcccgggggacagtggatttatatgtcggataactatacagacgtgaatggagaaaaagtgcttccaaaggatgatatcgaatgtccccttggatggaagtgggaggatgaagagtggtccactgatcttaacagagctgtagatgagcaaggatgggagtattccatcacaatcccaccagaaaggaaaccaaagcattgggtcccagcagaaaaaatgtattatacacatagacggagacggtgggtgagacttaggaggagagatctctcacagatggaagctcttaaacggcacagacaggcggaggctgaaggggaagggtgggaatatgcttccttattcgggtggaaatttcatctcgaatatcgcaagacagatgccttccgaagacgcaggtggcggcggaggatggaaccccttgaaaaaactgggcctgctgccgtttttgccctggagggagcactcggaggggtaatggacgataaatccgaagacagtatgtccgtatcaacactttccttcggagtcaaccgccctactatttcgtgcatcttcgattacgggaatcgctatcaccttcgctgctatatgtaccaggccagggacctcgctgcgatggataaagattcattctctgatccttatgctatcgtttctttcctgcatcagagtcagaaaactgtagttgtaaaaaatactttaaacccaacatgggaccagacactgatcttctacgaaatagaaattttcggggagccagcaacagtagctgagcagccacctagtatcgtcgtcgaattgtacgatcatgatacatacggagccgacgagtttatggggcggtgtatatgtcagccctcactagaaagaatgccacggttagcttggttccccttaactcgggggagtcagccctctggagaacttctagctagttttgaactcatacagcgcgaaaaaccggcaatccatcacatccctgggttcgaagtgcaagaaacttctagaatcctggatgagtcagaagatactgatctaccataccccccaccccagagggaagccaatatatatatggtacctcagaatataaaacccgccctgcagaggacagccatcgaaatcctggcatgggggctcaggaacatgaaatcctatcagctggccaatatctcctctccaagtttagtagtggaatgtgggggacagactgtccagagttgcgtgatccgaaatctacggaaaaatcctaatttcgatatatgcacactgttcatggaagtaatgctccccagagaagaactttattgccctcccattactgtgaaagtgatagataacaggcagtttgggaggaggcctgtggtcgggcagtgcacaataagatccctcgaatccttcctatgtgatccatactcagccgaatcgccgtcacctcaaggagggcctgatgatgtatctcttctctcacccggggaagatgtcctaattgatatcgatgataaggaacccctaattcctattcaggaagaagaatttatagattggtggtccaaattcttcgcctctatcggagaacgggaaaaatgtggatcttatctagagaaggattttgatacactcaaggtttatgacactcaactggaaaatgtcgaagcattcgaaggactatctgacttctgtaatacttttaaactatatcgcgggaagacacaggaagaaactgaggatccaagtgtgatcggagagtttaaagggctctttaaaatatatccacttcccgaggatccagccatccccatgccccctagacagtttcatcagcttgctgcccaaggaccacaggaatgtctagtcagaatctatatagttagagcgttcgggcttcagccaaaagatcccaacgggaagtgtgatccatacataaaaatatccatcgggaaaaagtccgtgagtgatcaggataattatatcccctgcactctagaacctgtgttcggaaaaatgttcgaattaacatgtacactacctctggaaaaagacctaaaaataacattgtacgattatgatcttttatccaaagatgagaaaattggggaaacagttgttgatctcgaaaatcggctgttaagtaaattcggagcgcgctgtggattaccccagacttactgcgtgtccgggccaaaccagtggcgtgatcagctcagaccctcacagctcctccatttattctgtcagcaacatagggtgaaagccccagtttataggactgatcgagtaatgtttcaggataaagaatactccattgaagaaatcgaagcagggcgaatccctaatcctcatttagggccagttgaggaaaggttggccctccatgtactccagcagcaggggctggtgcccgaacacgttgaatctcgcccactgtattctccgctacagcccgatatagagcagggaaagctccagatgtgggtcgatttgttccccaaagcattgggaaggcccggacctcccttcaatatcacacccaggcgggctcggcggttctttctcaggtgtatcatttggaatactagggacgttatcctggatgatctatctctgactggggaaaaaatgagtgacatctatgtaaaggggtggatgatcgggtttgaggaacacaagcagaaaactgacgtgcattatcgatcactcggaggagaaggaaatttcaactggcgattcatttttccatttgattatctccccgccgaacaagtctgtacaatcgcgaaaaaagacgctttttggaggctagataaaacagaatctaaaattcccgctagagtggtcttccaaatatgggataatgataaattttccttcgatgatttcttgggatccctccagctagatctcaaccgcatgcccaagccagcaaaaactgctaaaaaatgttctcttgaccagctcgatgatgctttccaccccgaatggtttgtctccctcttcgaacagaaaactgtgaaagggtggtggccctgcgttgctgaagaaggagaaaaaaaaattcttgcagggaaacttgaaatgactcttgagattgtcgctgagagtgaacacgaagagagacctgcagggcagggaagagatgaacctaacatgaaccccaagcttgaagatcccaggcgaccagatactagtttcctgtggtttacatccccttataaaactatgaaatttatcctctggaggaggtttaggtgggccatcatactctttataatactgtttatcctactgctattcctggctatcttcatctatgcttttcctaactatgccgctatgaagcttgtgaaacctttctca

SEQ ID NO: 10643 - DNA, 6243 bp, synthetic construct
  misc_feature 1..6243: note = source = /note="Description of Artificial Sequence: Synthetic coding sequence"
  source 1..6243: mol_type = other DNA
atgttgtgctgcctgctggtgcgcgcttccaacttgccgagcgcaaaaaaggacagacggagcgaccccgtcgcctcgctcaccttccggggagtcaagaagcgcaccaaagtgatcaagaattcagtgaatcccgtgtggaacgagggattcgagtgggacctcaagggaattcctctcgatcaaggctcggaactccatgtggtggtcaaggatcacgagactatgggtcggaatcggtttctcggagaagcaaaagtgccactgcgagaggtgctggcaaccccatccctgtccgcctcctttaacgctcctcttctggacaccaaaaagcagccgaccggagcgagcctggtccttcaagtctcgtacacgccacttccgggcgccgtgccactgttcccgccgcccaccccgctcgaaccctcccctacccttccagacctcgatgtggtcgccgacaccgggggagaagaggacaccgaggaccagggccttaccggagatgaagcggaaccgtttcttgatcagtccggcggccctggtgcacctaccaccccgcggaaactgccctcgcgcccgcccccgcactacccggggatcaagcggaagcggtccgccccgactagccggaaactgctgtccgacaagccgcaggattttcagatccgggtgcaggtgatcgaaggaaggcagctgccgggcgttaacatcaagcctgtggtgaaagttaccgcagctgggcagaccaaacgaactcggatccacaaaggtaactcgccactgttcaacgaaaccttgtttttcaacctgttcgactcgccaggagagctgtttgatgaaccgattttcatcacggtggtggactcgagaagcctgcgtaccgatgccctgctgggcgagtttagaatggacgtcggaacgatttaccgcgagccgagacacgcttacctccgcaaatggctgctgcttagcgatccagacgattttagcgctggggcccgggggtatctgaaaacgtcgctgtgcgtgctgggaccaggcgacgaagcacctctggagcgcaaggatccaagcgaagataaagaggacattgaatcaaacctgctgcggcctactggagtggccttgaggggagctcacttctgtctgaaagttttccgggccgaggacctcccgcagatggacgacgcggtgatggacaatgtgaaacaaatcttcgggttcgaatctaacaaaaagaaccttgtggatccttttgtggaagtctcctttgcggggaagatgctttgctccaaaatcctcgaaaagactgcgaatccacagtggaaccagaatatcacgctgccagccatgttcccctcgatgtgtgagaagatgcgcattagaatcatcgactgggaccgcctgacgcataacgatatcgtggccactacctacctctcgatgtccaagatctctgccccaggaggcgagatcgaggaggagccggctggagcagtgaagccttccaaggctagcgatcttgatgattacctgggattcttgccgacctttggaccgtgctacatcaacctttacggctcgccacgcgaattcaccggcttcccggacccgtacaccgaactgaacaccggaaagggcgaaggagtggcctacagagggaggctcctgctgtctcttgaaaccaagctggtcgaacattcggagcagaaggtggaagatctcccggctgacgatatcctgcgcgtcgagaagtacctgaggcgcagaaagtactccctgtttgccgctttctactcggcaaccatgctgcaagacgtggacgatgcgatccaattcgaggtgagcatcggtaactacggaaacaagtttgatatgacctgcctgccgcttgcgtccactacccagtacagccgggctgtgttcgacggatgccactactactacctgccgtggggaaatgtgaagccggtggtggtgctgtcctcgtactgggaagatatctcacaccgcattgaaactcagaaccagttgctcggcatcgcagatcggctggaagctggactggagcaggttcatctggccctcaaggctcaatgctcgactgaagatgtcgactcgctcgtggcccaacttactgacgagctgatcgctgggtgctcccagccgctgggagacatccacgagactcccagcgccacccacctggatcagtacctttaccagctgcgcactcatcacctgtcccagatcactgaagccgctcttgctctgaaactgggtcactccgagctcccggctgccctggaacaggccgaggactggctgcttagactgcgcgccctggcggaggagccacaaaacagcctcccggacatcgtgatctggatgcttcaaggagataaaagggtggcctaccagagggtgccggctcaccaagtgctgttttctcgtcggggtgccaactactgcggtaagaactgcggaaagttgcagactatctttttgaagtacccaatggaaaaagtcccgggtgcacggatgccggtccaaatcagggtcaagctgtggttcggactgtcagtggatgaaaaagagttcaaccagttcgccgaagggaaactgtccgtgttcgcagaaacttatgaaaatgagactaagctggcgctggtcggaaattgggggacgaccggactgacctacccgaagttcagcgacgttaccggaaagatcaaactgccgaaagactcgtttagaccatcggcaggatggacctgggccggagactggtttgtgtgccccgaaaagaccctcttgcacgacatggacgccggtcacctgtcgttcgtggaagaagtgttcgagaatcagactcgcctgccgggagggcaatggatctatatgtcggacaactacacggacgtcaatggagaaaaggtgctgccaaaggacgacatcgaatgtcctttggggtggaaatgggaggacgaggaatggagcaccgacctgaatcgcgccgtggatgagcagggttgggaatattccatcactatccctccggagagaaaaccgaagcattgggtgccggccgagaagatgtattacacccacagaagaaggcgctgggtccggctgcggcgacgcgatctgtcacaaatggaagcgctcaagcggcacaggcaagcggaagcagaaggggagggatgggagtacgccagcctgtttggatggaagttccatcttgagtaccggaaaactgacgctttccgccggcgcagatggcgccggcgcatggaaccgctggagaaaaccggcccggctgccgtgttcgccttggagggcgcgctcggaggagtgatggacgacaaatcagaggattcgatgtcggtgagcactctttccttcggtgtcaaccgcccaacgatcagctgcatcttcgattacggcaaccgctaccatctccgctgctacatgtaccaggcgcgcgatctggccgcgatggacaaggactcattttccgatccatacgccatcgtgagcttcctccaccagtcacaaaaaactgtggtggtgaagaacaccttgaacccaacctgggaccagactctcatcttttacgaaattgaaatcttcggtgaaccggctaccgtggcggagcaacctccgtcaatcgtggtggagctttacgaccatgacacttatggagccgacgaattcatgggacgctgtatctgccagccttcgctggagaggatgccacgcctcgcctggttcccgctcactcggggctctcagccgagcggagaactgttggcgtcgttcgagctgatccagagggagaagccggcgattcaccacatcccgggtttcgaagtgcaagaaacttcacgaatcctggatgagtcggaagatacggacctgccttaccccccgccacaacgcgaggctaacatatacatggtcccacaaaacatcaagccagcactccaaagaactgcgattgagatcttggcatggggactgcggaacatgaagtcataccaactcgcaaatatctcgtccccgagcttggttgtcgaatgcggtggacaaactgtccagtcctgcgttatcaggaatctccggaaaaaccctaacttcgacatctgcaccctctttatggaggtcatgctcccacgcgaagagttgtactgtccccccatcactgtgaaggtcatcgacaatcgccagtttggtagacggccggttgtgggtcaatgcactatcagatcgttggagtctttcctctgcgacccttactcggctgaatcaccatcaccgcagggaggtccggacgacgtctccctcctgtcacccggcgaggatgtgctcatcgatatcgacgacaaggagccactcatccctatccaggaagaggaattcatcgattggtggtccaagttcttcgcctcgatcggagagcgggaaaagtgcgggtcctaccttgagaaagactttgataccctcaaagtctacgatacccagctcgaaaatgtggaagcctttgaaggacttagcgacttctgtaacaccttcaaactttaccgcggcaaaactcaagaagaaaccgaagatccctcggtgatcggagaattcaaggggctgtttaagatttacccgctgcccgaggacccggccatccccatgccacctagacagttccaccaacttgccgcccagggaccccaggagtgcctggttagaatttacatcgtgagggccttcggcctgcagccaaaggacccgaatggaaagtgtgatccgtacatcaagatctcgatcggaaagaaaagcgtgtcggaccaggacaattacattccctgcaccctcgaaccggtgttcggaaaaatgttcgaactgacctgcacgctcccgcttgaaaaggacttgaagatcaccctgtacgactacgaccttctcagcaaggacgagaagatcggagaaaccgtcgtcgatctggagaatagattgctgtcgaaatttggagcacggtgtgggctgcctcagacttactgcgtctcaggtcctaaccagtggcgggaccaactgcggccctcccagctgcttcacctgttctgccaacaacaccgcgtcaaggcgccggtctaccgcactgacagagtgatgttccaggataaggagtactcaattgaggagattgaagccggaaggatcccgaatcctcacctgggtcccgtggaagaacggctggcgctgcacgtgctccagcagcaaggcctggtgcccgagcacgtggagtcgcgcccgctttactccccactgcagccagatatcgagcaaggaaaattgcagatgtgggtggacctcttcccaaaggcgttgggcagaccaggacccccgttcaacatcactccgagaagagcgcgccgcttctttctccggtgtatcatctggaacaccagagatgtgatcctggatgatctctcactcactggagaaaagatgtcagacatctacgtgaaggggtggatgattggatttgaggagcacaagcagaaaacggatgtgcactacagatcgctgggaggagaggggaacttcaactggaggttcatctttccgttcgattatctgcccgctgaacaggtgtgtactatcgccaagaaggatgccttctggagactggataagaccgaatccaagatcccggctcgcgtggtgtttcagatctgggacaacgacaaattctcgttcgacgactttctcggatcactgcagcttgacttgaatcggatgccaaagccggcaaagactgctaagaaatgctccctcgaccaactggacgacgcgtttcaccctgagtggttcgtttccctcttcgagcagaaaactgtgaaaggatggtggccatgcgtcgccgaagagggagaaaagaagatcctggcaggcaagctggagatgactttggagatcgtggccgaaagcgagcatgaggagcggccggcgggacagggccgcgacgaaccgaacatgaatccaaagctcgaggatccgcggcggccggacacgagcttcctctggttcacttcaccgtacaaaaccatgaagttcatcctgtggcgtcgcttcaggtgggcgattatcctgttcataatcctgtttatcctccttttgttcctggccatcttcatctatgcgttccctaattacgcggcgatgaaactggtgaagccgtttagc

SEQ ID NO: 10644 - DNA, 6243 bp, synthetic construct
  misc_feature 1..6243: note = source = /note="Description of Artificial Sequence: Synthetic coding sequence"
  source 1..6243: mol_type = other DNA
atgctttgttgtctgcttgtccgcgccagcaatctgccaagcgccaagaaggacagacggtcggatccggtggcctccctgacttttagaggggtgaagaagagaactaaggtcattaagaactctgtcaatccggtgtggaatgagggatttgagtgggatctgaagggcatccctctcgatcaaggttccgaactgcacgtggtcgtgaaagaccatgagactatgggacgcaacagatttcttggggaagcaaaggtgccactgagggaggtgctcgccactccttcgctgtcggcatcgtttaatgcaccactgctggatactaagaagcagcctactggggcatcgcttgtgctgcaggtcagctacaccccactgcccggggcagtgccactttttcctccgcctacccctctggaaccttccccaactctccctgatcttgacgtggtcgccgatacgggcggtgaggaggacacggaggatcagggtctgaccggtgacgaagcagaaccattcctggaccaatctggtggaccgggagcgcctaccaccccacgaaagctgccttcacggcccccaccacactaccccggaatcaagcggaaaagaagcgcaccaaccagccgcaagctcttgtcagataagccgcaagattttcagatcagagtgcaagtcatagaagggagacagctcccgggtgtgaacattaaacctgtggtgaaggttactgcagccgggcagactaagagaactcgcattcataaaggtaactccccactgttcaacgaaaccttgttctttaacctttttgattcaccaggagaactctttgatgaacccattttcatcaccgtggtggactcgagatcgctgcgaactgatgcactcctcggagaatttcgcatggacgtgggtactatttacagagagccaaggcacgcatacttgcgtaaatggctcttgctgtcggatccggatgatttttcagcgggtgcaaggggataccttaagacctcgctctgtgtccttggaccaggagatgaagccccgcttgaacggaaggaccctagcgaagataaggaggacatcgaatcgaacctcctgaggcctaccggagtcgcccttagaggagcgcatttctgtctgaaagtttttcgggccgaagatctgccccaaatggacgatgccgtgatggacaacgtcaagcagatatttggctttgagagcaacaaaaagaacctggtggatccatttgtggaggtgtcctttgcgggaaaaatgctgtgttcgaagatactcgaaaagacggccaatccacaatggaaccagaatatcactcttcctgcgatgtttccttcgatgtgcgagaagatgaggattcggattatcgactgggatcggcttacccacaacgatattgtcgctactacctatttgagcatgtcgaagatctccgcaccaggtggagaaattgaagaagagccagcaggagccgtcaaaccttcgaaggcctcggaccttgatgactaccttgggttcctgcctacttttggtccttgctacatcaacctgtacggaagcccacgtgaattcactggattccctgatccttacactgagctgaacaccggcaagggtgaaggcgtggcatacagggggagactgctgcttagcctcgagactaaactcgtggaacactccgaacagaaggtggaggaccttccagcagacgacatcctgcgcgtggagaaatacctgcgtcggagaaaatactccctctttgcagccttttactcggcaactatgctgcaagacgtggatgacgcaatccaatttgaggtgtccattggtaactacggaaacaagtttgatatgacttgccttccactggcatcgaccacgcaatattcgcgagcagtgttcgatggatgccattactactacctgccctggggcaatgtgaagccggtcgtggtcctttcctcctactgggaagatatctcccatagaattgaaacccaaaatcaactgcttggcattgcagatcgactggaggcaggcctggaacaagtgcatcttgcactgaaagcccagtgttccactgaagatgtggattctcttgtggcacaactcactgatgaactgatcgcaggttgttcgcaacctcttggtgacattcatgagactccttcggcaactcatcttgatcaatacttgtaccaactgcgtactcatcaccttagccaaattactgaagcagcacttgcgctgaagctgggtcatagcgaactccctgcagcgctggagcaagcggaagattggcttctgagactcagagccctggcggaagagcctcagaattccctcccagatatcgtgatttggatgctgcagggcgacaagcgtgtggcttaccagagagtgcctgcacaccaagtgctcttctcgcgtcggggagcgaactattgtgggaagaactgtgggaagctgcaaaccatttttctcaaatatcctatggaaaaggtgccaggtgcgaggatgccggtccagattagggtgaagttgtggttcggtctttccgtggatgagaaggagttcaatcagtttgccgaaggaaagctcagcgtctttgccgaaacctacgagaacgagactaaattggcacttgtcggaaattgggggactaccgggcttacctaccccaagttttcggatgtcaccgggaaaatcaagctgccaaaggatagctttcgaccctcagcaggttggacgtgggctggagattggttcgtgtgtccagaaaagacccttcttcatgacatggatgcgggacatttgtcatttgtcgaggaagtgtttgagaatcagactagacttcccggtggtcagtggatttacatgtccgataactacaccgatgtcaacggagaaaaggttctgcctaaggacgacattgaatgcccactgggatggaaatgggaggacgaagaatggtcaaccgatcttaatagggcagttgatgagcaaggatgggaatactcgattactataccacctgagcggaagccaaaacattgggtccccgcagaaaagatgtactacactcatagaagaagaagatgggtgcgattgcgcagaagagacttgtcgcagatggaagcccttaaacgtcatagacaggccgaagcagagggagagggatgggagtacgcgtcgctctttggatggaaattccatctcgaatatagaaagacggatgcctttcgtcgccgtagatggcgacggcgcatggaaccactggaaaagactggacctgccgctgtctttgctcttgaaggcgcacttggaggtgtcatggacgataagtctgaggattccatgtcggtgtcgactctgtcgttcggggtgaaccgaccaaccatttcttgtattttcgattatggtaaccgataccatctgaggtgctacatgtaccaagcgagggatcttgcagcaatggacaaggattccttctccgatccatacgcaattgtctcctttcttcaccagtcacaaaaaactgtcgtggtgaagaacacccttaatcctacgtgggatcagacgttgatcttttatgaaattgagatatttggcgaacccgcaaccgtcgccgaacagcctccatccattgtggtggaactgtacgaccatgatacctacggtgcggatgaattcatgggacggtgtatatgtcagccatcccttgagcgaatgcctagacttgcatggtttcctcttacgagaggaagccagccatccggagaactcctcgcatccttcgagcttatccaaagagaaaaaccagcgattcaccatattcctggttttgaagtgcaagaaacttcaaggattcttgatgaatcagaagataccgacctcccttacccccctccccaaagggaggcgaacatctatatggtgcctcagaacatcaagcctgctctgcagcggaccgctattgaaatccttgcatggggtcttagaaacatgaagtcctaccagctcgccaacatctcatcgccttccctcgtcgttgaatgcggcgggcagactgtgcaatcctgcgtcatccgcaacctcagaaagaaccccaatttcgacatatgcacgttgtttatggaagtcatgttgcccagagaggagttgtactgtccgcccatcactgtcaaagtgatcgacaatcggcaatttggacggcggcctgtggtgggccagtgcaccattcgatcgcttgagagcttcctgtgtgatccgtacagcgcagaatcaccctcgccccaagggggtcctgacgatgtctcactgctttcacctggtgaggatgtgcttatagacatcgacgacaaagaaccactgattccaattcaagaagaagagttcatcgattggtggtccaagttttttgcgtccatcggtgaaagggagaagtgtggttcgtacctcgaaaaagattttgacacccttaaagtttacgacacccagctggaaaacgtcgaagcgttcgaaggtctttcagatttttgcaacactttcaaactttaccgtggaaagacccaggaagagactgaggatccgagcgtgattggagagtttaaaggcctctttaagatttacccactgccggaggacccggcaattcctatgcctccgcggcaattccatcaactggccgcacagggaccgcaggagtgccttgtgaggatttacattgtgcgtgcattcgggctgcaacctaaggaccccaacggaaagtgcgatccgtacatcaaaatctcaatcggaaaaaagtcagtgtcagatcaggacaattacattccttgcacccttgaaccagtgtttggtaagatgttcgagctgacctgtaccctccctcttgaaaaggatctgaagatcacgctttacgattacgaccttctctcgaaagatgagaagatcggcgaaacggtggtcgacttggaaaatcggttgctttcgaagttcggtgcaagatgcggactcccccagacgtactgtgtgagcggacctaaccagtggagggatcaacttcgaccatcgcagcttcttcacctgttttgccagcagcaccgggtgaaggcacccgtgtaccgcactgatcgagtgatgttccaggacaaggaatacagcatagaagaaattgaggctggcagaattcccaatcctcatctgggacccgtggaagagagactggccctgcatgtgcttcagcagcaagggctcgtgcctgagcatgtggagagccgacccctgtattcacccctgcagccggacattgaacagggcaagttgcagatgtgggtggacctctttccaaaagcactcggacgcccgggaccaccattcaacatcactccaagaagagcgcggcggttttttctcagatgtatcatatggaacaccagagatgttatcctggatgatctgagcctcaccggagagaagatgtcggacatttacgtgaaaggatggatgattggctttgaggagcacaaacaaaagaccgacgtgcactaccgttcccttggaggtgaaggtaacttcaattggcgatttatcttcccttttgactacctccctgccgagcaagtctgtaccattgcaaagaaagacgcattttggaggctggacaagactgaatcgaaaattcccgcaagagtggtgtttcagatctgggataatgataagttcagctttgacgactttctgggctcccttcagcttgatctgaaccgcatgcccaagccagctaagactgcaaaaaagtgttcccttgatcagctcgatgatgcgttccatcccgaatggttcgtgtccctctttgagcaaaagacggttaagggttggtggccttgtgtggcagaagaaggtgaaaagaagatactcgcggggaaacttgagatgactctcgagattgtggccgaaagcgagcacgaggagaggccggcaggacaaggtagagacgagcctaacatgaatcctaagctcgaagatccacgccgaccggatacctcgttcctctggttcacctcgccctacaaaacgatgaagttcatcttgtggagacgttttagatgggccatcattctcttcatcattcttttcatactgctgctgtttctggccattttcatctacgcatttcccaactacgcagctatgaagttggtgaagcctttttca

SEQ ID NO: 10645 - DNA, 6243 bp, synthetic construct
  misc_feature 1..6243: note = source = /note="Description of Artificial Sequence: Synthetic coding sequence"
  source 1..6243: mol_type = other DNA
atgctctgctgtctgttggtacgcgctagcaatctcccatcagccaagaaggaccgaaggtctgatcccgtagcctctctgacgttcaggggcgtcaagaagcgcactaaagttataaagaattcagtcaatccagtctggaacgaaggatttgaatgggacctgaaaggaatccccctggaccagggctcagaactccatgtggtggtgaaagatcatgaaacgatgggacgaaatcggttcctgggcgaggcaaaggtccctttgcgtgaggtgctagccactccaagtttaagcgcatccttcaacgcacctcttctggacaccaagaaacagcccactggagccagtctcgtccttcaagtgagctacacgccgctgcccggagccgtgcctcttttcccaccacccactccgctggagccgagccccaccctcccggacctggacgtagtcgctgatacaggaggagaagaagatactgaggatcagggcctgaccggggatgaggcggagccgttcctggaccagtctggaggtccaggagcacctaccacaccccgaaagctgcctagtcggccgccccctcactaccccgggattaaacgcaagcgcagcgcccctacctctcggaaattgctgagtgataagccgcaggattttcagatccgagtgcaggtaattgaaggcaggcagcttccaggggttaatattaaacccgtcgtgaaggtcacagcggcgggccagaccaaaagaacccgcatccataagggcaactctccactgttcaatgaaacgctcttttttaatctgttcgacagcccaggtgagctgtttgatgaacctattttcataaccgtggtcgatagtagatctctgcggacagacgccttgctgggcgaatttaggatggacgtcggaaccatctacagagaacctcgccacgcctatcttcgaaaatggcttttattgagcgaccccgacgactttagtgcaggagccagaggctacctcaagacctctctatgcgtgctgggcccaggggatgaggctccgctggagaggaaagacccaagcgaagataaggaagacattgagtctaatctcttgcggccgaccggggtggcactccggggagctcacttctgcttaaaagtctttcgggcagaggaccttccccaaatggacgacgccgtgatggacaacgtgaaacaaatctttggatttgaatctaacaagaagaatttagttgaccctttcgtagaagttagcttcgccggcaaaatgctctgtagcaagatcctggaaaaaaccgccaaccctcagtggaaccagaatatcactctccccgccatgttcccaagcatgtgcgaaaaaatgcgaatacgtatcatcgactgggaccgtttaacccacaacgatattgtggccacgacctacctttcgatgtccaagatttcagcccccggaggggaaattgaagaggaacccgcaggtgctgtaaaaccaagtaaggcatcagacttagatgactacttgggatttttaccaacctttggcccttgctatattaatttatatggatctcctcgggaattcactggtttcccggacccttatacagagctgaatactggcaagggagaaggcgtcgcatatcgcggaagactgctgctgagcttagaaaccaaacttgtggaacattccgaacaaaaagtggaagatcttcccgccgatgacatcctgcgagtggagaagtacctcaggcgacgaaagtatagtctgtttgcagccttttattcggccacaatgctgcaggatgtggacgacgcaatccagttcgaagtgtccatcggaaactacggaaataaatttgatatgacctgtctcccactcgcatcaacgacccagtatagtagggcggtatttgacggctgccactactattatttgccttggggaaatgttaagcctgtggtggtccttagctcttactgggaggatataagtcaccggatcgagacccaaaatcagctgttaggcatcgctgatcggctcgaagctggactcgaacaggtacacctagccctcaaagcccagtgcagcacagaagacgttgattctctcgtggcgcaactgacggatgaacttatcgctgggtgctctcagcctctgggggacatccatgagactccttcagccacgcatcttgaccagtatctttaccagttgcgtactcaccacctctctcaaattaccgaagcagctctggctttaaagctcggacattcggaacttcctgcagccttggagcaggccgaggattggctcctacgattgcgcgcgttggctgaggagccacaaaattctctgcctgacatcgtcatttggatgctgcagggtgataaacgagtggcttaccagcgggtgccagctcatcaagtcttgttcagcaggcgaggggccaactattgtggcaaaaactgtggcaagctgcagactatctttcttaaataccctatggagaaagtgcccggtgctagaatgcctgttcagattcgagtgaaactgtggtttggcctttcggtagacgagaaagagtttaaccagttcgccgagggaaaactgagtgtgtttgccgaaacctacgagaatgagaccaaattggcgttggtgggcaactggggcactaccgggctgacgtatccaaagttcagtgacgtgaccggcaaaatcaagctgccaaaggatagcttcagaccaagcgcaggatggacctgggcaggggattggtttgtgtgtccggagaaaactttgctccacgatatggatgccggccatctatcctttgtcgaagaagtgtttgagaaccaaacaagactgccagggggccagtggatctacatgtccgacaactacactgatgtgaacggagaaaaggtactccccaaagatgatattgagtgcccgctgggatggaaatgggaagacgaggagtggagtacagatctcaacagggccgtcgacgagcaggggtgggagtattccattacaatcccacctgaaagaaaaccgaaacactgggtgcctgcagaaaaaatgtactacactcatcgtcggaggcggtgggtccgtctccggcggcgcgacctgtctcagatggaggcactcaagcgccacaggcaggcggaggcggagggcgaagggtgggaatacgcaagcctgtttggatggaagttccatctggagtataggaaaaccgatgccttccgcagaagacgttggaggcgtagaatggagccattggaaaagacaggccccgccgccgtattcgcattggagggagccttggggggtgtgatggatgataaatccgaggattcaatgagcgtgagtacgctatcttttggggtgaacaggcctacaataagttgtatcttcgactacggaaacaggtaccatttgcgttgttacatgtatcaggctcgagacctggccgcgatggataaagattcttttagtgacccatacgccatcgtcagcttcctgcatcaatctcagaagacagtggtagtgaagaatactctgaacccaacttgggatcaaaccctcatcttctatgaaatagaaattttcggagagcctgcgaccgtcgcagagcagccccctagtatcgtcgtcgagctttatgaccatgacacttatggcgctgatgaatttatgggccggtgtatctgccagccatcgcttgagcgaatgcccaggttggcatggtttccccttacccgtggctcacagcccagcggggagttgctggcctcgtttgagctgattcagcgagagaagccggccatccatcatatccccggttttgaggtgcaagagacatcacgcattctcgacgagtcagaggacaccgacttgccctatccgcccccacagcgggaggctaacatctatatggttccacaaaatatcaagcctgccctacaacgaacagccattgagatcctggcctgggggctacgcaacatgaaatcgtatcaactggcaaacatctccagccccagcttggtggtcgagtgtggggggcaaacagtccagtcttgcgttatccggaacttacggaaaaatcccaacttcgacatttgtacactgttcatggaggtcatgctcccccgcgaagaattgtactgtccgccaattacagttaaagtaatcgacaacaggcagttcggccggcggccagtcgtggggcagtgtacaatccgatcgctggaatccttcctttgtgacccctattcagcagaatcaccatcaccccaaggcggaccagacgacgtgagtcttttatctccgggcgaggatgtgctgatagacatcgacgacaaggagccgctcattcccatccaggaggaggaatttatcgactggtggagtaagttctttgcatctattggcgaaagggagaaatgtggcagctacttagaaaaggactttgatacgctgaaggtttacgacactcaactcgagaatgtggaagcatttgaaggccttagtgatttctgtaataccttcaaactataccgggggaaaacccaagaggagacagaagacccctcagtcataggggaatttaagggcctgttcaaaatatatcccctccctgaagatcccgcgatccccatgcccccacgacaattccaccagctcgcggcacagggacctcaagaatgccttgtccgaatctacatcgtgcgagccttcggactacaacctaaggatcccaatgggaaatgtgacccatacataaagatttccatcggcaagaagagcgtgtccgaccaggacaattacattccctgtacactggaacctgtgttcggtaagatgtttgaattgacctgcacattgccacttgaaaaggacctcaaaattaccctgtacgattacgacctgctgagcaaagatgagaaaatcggtgaaaccgtggttgaccttgaaaataggcttctatcaaagtttggggcccggtgcggtttgcctcagacctattgtgtgtccgggcctaaccagtggcgcgaccagcttaggccatcccagctgctgcatctattttgccaacagcatagagtgaaggccccagtgtacaggaccgaccgagtcatgtttcaggacaaagagtatagtatcgaagaaatcgaggcgggccggatacccaatccccacctcggcccggtcgaggaacgcctggccttgcatgtgctgcagcagcagggcctagtcccggaacacgttgagagccgccctttatactcaccccttcagcccgacattgagcagggcaaattgcagatgtgggtggacctgtttcccaaagcactggggcgaccaggcccaccattcaacattactccaagaagagcacgtcgctttttcctgcggtgtataatctggaatacacgtgatgtgatattagacgacctcagcctgactggtgagaagatgagtgacatctatgtgaagggatggatgattggctttgaggagcacaagcagaaaactgatgtgcactaccggtccctcggcggagaaggaaactttaattggcgttttatttttcccttcgactacctcccggccgaacaagtgtgcacaatcgctaaaaaggacgctttttggagactcgacaagactgagtctaagattccagcaagagtggtgttccaaatctgggacaacgataaattctcttttgacgactttcttggttcattacagttagacctgaatcggatgccaaagccagcaaagaccgcgaagaagtgttccttagatcagcttgatgacgcattccatcctgagtggttcgtgagtctgttcgagcagaagactgtgaaggggtggtggccatgcgtcgcagaggagggtgaaaaaaagattctggccggtaagctggagatgaccctggagatcgtggcggagagtgaacacgaggagcgcccagcaggacagggcagagacgaacccaatatgaatcccaagctggaagacccgcgaagaccagacaccagctttctctggttcacaagtccatacaaaaccatgaagtttatcctatggaggcgttttagatgggctattatcctgtttattattctctttattttactgttatttctagcaatcttcatctacgcatttccgaactatgcagctatgaaactggtgaaacccttctct

SEQ ID NO: 10646 - DNA, 6243 bp, synthetic construct
  misc_feature 1..6243: note = source = /note="Description of Artificial Sequence: Synthetic coding sequence"
  source 1..6243: mol_type = other DNA
atgttgtgctgcctgcttgttagagcaagcaacctgccatccgcaaaaaaggacagacggtcggaccctgtggcttcattgactttccggggcgtgaaaaaacggactaaggtcattaagaattccgtgaatccggtttggaacgaaggcttcgagtgggatttgaagggaatccccctcgatcagggctctgaactgcacgttgtggttaaggatcacgaaaccatgggaagaaatcggttcctgggagaggccaaggttccactgagagaagtcctggccacaccttctctctctgccagcttcaacgcccctcttttggacaccaaaaagcagcctactggggcctctttggtactccaggtgtcatacacacctctgcctggggctgtgcctctgttcccaccccccactcccctggaacctagccccacattgcccgatctggacgtggtggctgatactggaggagaggaggatactgaggaccagggccttactggcgatgaggccgagcctttcctcgatcaatcgggcggccccggtgcacccaccactcccagaaaactcccttccagaccgccaccccattaccctggcatcaaaaggaagcggtctgcaccaacttcacgcaagctgctgagcgacaaaccccaggacttccaaatccgcgtgcaggtcatagagggcaggcagctccccggtgtcaacatcaagccggttgttaaggtgacggctgccggtcaaacgaaacgcaccagaatccataagggaaactcccctttgtttaacgaaacgcttttcttcaatctgtttgactcacccggtgaactgtttgacgaacccatcttcattactgtggtggatagccgttcattaagaactgacgcgctgctgggagagtttagaatggacgtcggaactatatacagagaaccgcgccacgcctatctgaggaaatggctgctgctttcagatcctgatgatttttcagcaggcgcgcgaggctacctgaagacgtctctctgcgtgctgggcccaggggacgaggctccactcgaacgaaaggatccatccgaggacaaagaggatatcgagtctaacctcctccgacccactggtgtggcactgcggggagcacacttctgcctgaaagtgttccgggctgaagatctcccacagatggacgatgccgtgatggataacgtgaaacagatattcggctttgaatccaataagaaaaatctggtagacccattcgtggaggtgtcctttgcaggaaaaatgctgtgctctaaaatcctggaaaagaccgccaaccctcagtggaaccagaacatcactctccccgctatgtttccaagtatgtgtgaaaagatgcgaatacggattattgactgggaccggctaacgcacaatgacatcgtggctactacatacttgagcatgagtaagattagcgcccccggaggagagatcgaagaggaaccagcaggcgcggtgaaacccagtaaagcctccgatctcgacgattacttagggttcctgccaacgttcggaccctgttatatcaacctctatggtagccccagagagttcacaggcttcccggacccatatacagaattgaacactgggaagggcgaaggagtggcttatagaggaaggcttctcttgtcccttgagacaaagctcgtagaacattctgaacagaaggtggaggatctcccggcggatgacatccttcgcgtggagaagtatctacgaaggcgtaaatacagcctctttgcggcattttactccgcgacaatgctgcaggacgtagatgatgctattcagtttgaagtgtccattggcaactatggcaacaagtttgatatgacgtgtctacctcttgcttccaccacgcaatactcgcgggctgtctttgacggatgccactactactacctgccctggggcaacgtaaaacctgtggttgttctcagttcctattgggaggacattagtcaccgcatcgaaactcagaatcagcttctgggtatcgccgataggctggaggctggcctggaacaggtccacttggcgctgaaagctcagtgtagcacagaagatgttgactctctcgtcgcacagttgactgacgagctgattgctgggtgttcacaaccgttgggtgatatccacgagaccccgtctgctacacacctagaccagtacctgtaccagctgcggacgcatcacctgtcccaaatcaccgaggccgccctggcccttaagttgggtcattcagagctgcctgctgccctggagcaggcggaggattggttgctacgtttgcgggccctggctgaagaaccccagaattctctgcctgacatcgtcatctggatgctgcagggcgacaagagggtggcatatcagcgggttcctgcacatcaggtgctgttttccagaaggggagccaactattgcggtaagaactgcggcaagctgcagactattttcctgaagtacccaatggaaaaagttccaggggctagaatgcccgtgcagattcgggttaagctctggttcggcttatcggtagacgagaaagagtttaatcaattcgcagaggggaagctctccgtcttcgcagaaacttacgaaaacgaaaccaaacttgctctagtggggaactggggcactacaggcctaacataccccaagttctccgacgtgacaggaaagatcaagctccctaaggacagttttaggcccagtgctggttggacatgggctggcgactggttcgtttgccccgagaagacccttcttcacgatatggatgcagggcacctgagcttcgttgaagaggtgtttgaaaaccaaaccagattgccgggcgggcaatggatttacatgtcggacaattacactgatgtcaacggggagaaagttctgcctaaagatgatattgaatgcccactgggatggaaatgggaggacgaagaatggtccaccgatctcaatagagcagtggacgaacagggctgggagtactcgatcacgattcctcctgaacgaaaacccaaacattgggttcccgctgagaaaatgtattatactcaccggcgaaggcgttgggtccggttacggaggagagatctttctcagatggaggccttgaaacgccaccgccaggccgaagccgaaggggaaggttgggaatatgctagcctgtttggctggaagttccacttggagtatcggaagaccgacgcatttaggcggagacgctggcgacgaagaatggaaccgctcgagaaaacagggcctgctgcggtgtttgcactcgagggagcactggggggagttatggacgataaatccgaggattctatgtcagtatctacgttaagcttcggggtgaacagaccgaccatttcctgcattttcgactacggaaaccgctatcatcttcggtgttacatgtatcaggctagggacctggccgcaatggacaaggacagttttagcgacccctacgccatcgtttccttccttcatcagtctcagaaaaccgtagtcgtgaaaaataccctcaacccaacttgggaccagacactgattttttatgagatagaaatttttggagagcctgcgactgtcgctgagcagccaccctctatcgtggtcgaattgtatgatcacgatacctacggggctgacgagtttatggggcggtgtatttgccagccctctctggaacgcatgccaaggctggcttggtttcccctgaccaggggttctcagccttctggcgagctgttagcgtcattcgagctgatccaaagggagaaacccgccatacaccatatccctgggtttgaggtccaggagacaagccgcattttggacgagtccgaagacacggacctcccgtacccccctcctcaacgcgaagccaatatctatatggtcccacagaacattaagcctgccctccaaagaacggccatcgagattctagcttggggattacggaacatgaagtcataccagttggcaaatatctcttctccatcacttgtggtcgagtgcggtggacaaaccgtccagtcatgcgttatcaggaacctacggaaaaatccgaattttgacatttgtaccctttttatggaagtgatgttgccgcgggaagagctgtattgtccccccatcacagtgaaggtgattgataatcgtcagtttggccggcgtcccgtcgtaggtcagtgtaccatccgaagcttggaatcctttctgtgcgacccctactcggcggaaagcccttcaccccagggcgggccggacgacgtctctttactctctcccggggaagatgtactgatcgacatagacgataaggagcccctcatcccaattcaggaggaggagttcattgactggtggtcgaagttctttgcatcaattggagagagagagaaatgcggaagttatctggaaaaagactttgacaccctaaaggtgtacgacacacagctcgagaacgtcgaggccttcgaaggactgtctgatttttgtaacacgttcaaactgtaccgggggaaaacacaggaagagacagaggatcctagcgtcatcggcgagttcaaggggctgttcaaaatctatccgctgcctgaggaccctgctatacctatgccacctcgccagtttcatcaactcgcggcacagggaccccaggaatgcttggtgcgcatctatatcgtgcgagcattcgggctccagcctaaggacccaaatggcaaatgtgacccgtacatcaagatcagtattgggaaaaaatctgtgtctgaccaggataactacatcccttgtactctggagcccgtgttcggcaagatgttcgaactaacttgcactttacccctggagaaagacttgaagatcactctgtacgattacgatcttctgagcaaagatgaaaagatcggggagactgttgtcgatttggagaacagactcctgagcaaattcggagcccgatgcggcctgccacagacctattgtgtatctgggccaaatcagtggagagaccagttgaggccttcccagctcttgcatctgttctgtcagcaacaccgtgtgaaggctcccgtttataggacagaccgtgtgatgtttcaagataaggagtacagtatcgaggaaatcgaggcaggaagaatcccgaatccacatctcggacctgttgaggagcggttggcgttgcatgtccttcagcagcagggtctggtgccagagcatgtagagtcgaggcccctctacagccccttgcagccagatatcgagcagggaaaactccagatgtgggtggacctattccccaaagctctgggcagaccaggcccacctttcaacattaccccgcggagggctaggcgttttttcttgaggtgtatcatctggaacaccagggatgtcattctggatgacctaagtctgaccggggaaaaaatgtctgatatttatgtgaagggatggatgatcggcttcgaggagcacaaacagaagacagatgtgcactacaggtccctgggtggagagggcaattttaattggaggttcatctttccattcgattacttgccagccgaacaggtttgtacaattgccaagaaagacgccttttggcgactggacaaaaccgagagtaagatccctgccagagttgtgtttcagatctgggataatgataaattcagcttcgatgatttcttggggagccttcagctggatctaaaccgtatgccaaaacccgccaagacagcaaagaaatgttcgctggatcaactggatgatgctttccatcccgagtggttcgtgtctctgtttgagcagaagacagttaaaggctggtggccatgtgttgctgaagaaggcgagaagaaaatcctagcgggaaagctcgagatgaccttggaaattgtcgctgaatcagaacatgaagagaggcctgccgggcagggaagggacgagccaaatatgaacccaaagctggaggacccaaggcggccggatacatcctttttgtggtttacgtctccgtataaaacgatgaagttcattttgtggaggcgattcaggtgggctatcatattgttcataatactgtttatcctcttacttttcctggccatcttcatctacgctttcccaaattacgccgcgatgaaactagtaaagccattttcg

SEQ ID NO: 10647 - DNA, 6243 bp, synthetic construct
  misc_feature 1..6243: note = source = /note="Description of Artificial Sequence: Synthetic coding sequence"
  source 1..6243: mol_type = other DNA
atgctgtgttgccttctggtccgcgcatccaacctgccgagcgcgaagaaggaccgccgcagtgaccctgtggcctcgctcaccttcagaggagtcaagaagcggaccaaggtgatcaagaattccgtgaatccggtgtggaacgagggatttgagtgggacctcaagggaatcccccttgaccaaggatcagagctgcatgtcgtcgtgaaagaccatgaaaccatgggccggaacagattcctgggggaggctaaggtgccgctcagggaggtcctggctaccccatcgctgagcgccagctttaacgcgccgctcctggacacgaagaagcagccaactggtgcatccctggtgctccaagtttcatatactccgctgcctggggcagtgcccctgttcccaccgcccactccactggagccgtcacccaccctcccagacctggatgtggtcgccgacactggtggagaggaagatactgaagatcaagggttgaccggagatgaagcggagcccttccttgaccaaagcggaggaccgggagcgccgaccaccccaaggaagttgccatctcggcctcctccgcattacccgggtataaagcggaaacgctctgcgcctacttcgcggaaacttctctcggacaagccgcaagatttccagatccgggtgcaagtgatcgagggacggcaactcccaggagtcaacatcaagccggtcgtcaaggtgactgcagcgggtcaaaccaagcggacccggatacacaagggaaactcgcccctctttaacgagacgctgttctttaacctcttcgactcccccggagaactgtttgacgaaccgatcttcatcaccgtcgttgattcacgctcgctccgcaccgacgccctgctcggagaattccggatggatgtgggcactatctaccgggaaccccgccacgcatacctgcggaagtggctcctcctgtccgaccctgatgacttctccgccggtgcaagaggatatctcaaaacctccctctgcgtcctcggcccaggagatgaagcacctttggaacgcaaggatccgagcgaggacaaagaagatattgagtcgaacctgcttcggccgaccggagtggctttgagaggagcacatttctgcttgaaggtgttccgcgccgaggacctcccacagatggacgacgccgttatggacaatgtcaagcaaatctttggcttcgaaagcaacaagaagaatctggtggacccgtttgtcgaagtcagcttcgcgggcaagatgctgtgctcgaaaatcctggaaaagactgcgaacccacagtggaatcagaacatcacccttccggcaatgtttccctccatgtgtgagaagatgcgaatcagaattatcgattgggatcgcctcactcataacgacatcgtcgcaaccacctacttgtcgatgtccaagatctcggccccgggaggggaaatcgaggaagagccggccggcgcagtgaaaccgtcgaaggcgtccgacctggatgactacctgggatttctgccaaccttcggaccgtgctacattaacctctacggatcgccaagggaatttacgggattcccggacccttatacggagctcaacaccggaaaaggcgaaggggtggcctaccgcggacggctgctgttgtccctggaaaccaaactcgtcgagcacagcgagcaaaaagtggaagatctgccagcggacgatattctgagggtggagaagtacctgcgccgccggaagtactctctgtttgctgcgttctactcagccactatgctccaggacgtggatgacgctatccaattcgaagtgtcgattggaaactatgggaacaagttcgacatgacttgcctgccactggcgtccaccacccagtacagccgcgctgtttttgacggatgccactactactaccttccttggggcaacgtgaagccggtcgtggtgctgagcagctactgggaggacatttcacaccgcatcgagactcagaaccagctgttggggatcgcagatcgactggaggccgggctggagcaagtgcacctggccttgaaagctcagtgctccaccgaggacgtggacagcctggtggcccaactcactgatgaacttattgctggatgctcgcaaccgcttggagacatccacgagactccctccgccacccaccttgatcagtatctgtaccagcttagaacgcaccacctgtcccaaattacggaagcggcactcgccctcaaactgggacacagcgaactcccagcggcgctggagcaggctgaagattggctcctgagattgcgggccctcgcagaggaacctcagaactccctgccggacattgtgatctggatgctccagggcgacaagcgcgtggcctaccagcgggttccggcacaccaagtgctgttttcacgccgcggtgccaactattgcggcaagaattgtggtaagctccagaccattttcctcaagtacccgatggaaaaggtcccgggagcccggatgccagtgcaaatcagggtgaagctgtggttcggcctgtcagtggacgaaaaggaattcaatcagtttgccgagggaaagctgtcggtgttcgccgagacttacgagaacgaaaccaaacttgcgctggtggggaattggggcacgacgggattgacctacccgaagttctctgacgtgaccggtaagatcaagctgccgaaggactccttccgcccttcggcgggttggacttgggccggcgattggttcgtctgcccggaaaagactctgctccatgatatggatgcgggacacctgagctttgtggaggaggtgttcgagaaccagactcgtttgcctggagggcaatggatttacatgtcagacaactatacggatgtcaacggcgaaaaagtgctgcctaaagatgatattgaatgcccactgggctggaagtgggaggacgaggaatggtcgactgatttgaaccgggcggtggacgaacaaggctgggagtactcaatcaccattccacccgagcggaaacctaaacattgggtgccggccgagaagatgtactacacccaccgccgacgccgctgggtcaggctgaggcgccgcgacctttcccagatggaggccctgaaaaggcacagacaagccgaagctgaaggggaagggtgggaatacgcctcgctttttggctggaagttccacctggaataccgcaagacggatgccttcagacgaagaagatggcggcggaggatggaaccacttgaaaagaccggtccagctgcagtgttcgccttggaaggcgccctcggaggagtcatggacgacaagagcgaggactcaatgtcggtgtcgaccctcagcttcggagtcaatcggccgacgatcagctgcatcttcgactacggaaatcgctaccacctcagatgctacatgtaccaggcgcgcgatctggcggccatggacaaagattctttttcagacccgtacgccatcgtgtcctttctgcatcagagccaaaagaccgtggttgtgaagaacacgctgaatcctacctgggatcaaaccctcatcttctatgaaattgagatcttcggcgagcccgctaccgtggcagagcaaccgccatccatcgtggtggaactctacgatcatgatacctacggggcggacgagtttatgggccgctgcatctgtcagccaagcctcgagcgcatgccgcggctggcttggttcccgctgactcgcggatcacaaccaagcggagagcttttggcgtcatttgaactgatccaaagggaaaagcccgccatccaccatatccctggattcgaagtccaggagacgtcacggatccttgacgagtctgaggacacggacctgccgtacccgcccccgcaaagagaggcgaacatctacatggttccgcagaatatcaagccagcccttcagcggactgcgatagaaatcttggcctgggggctgcggaatatgaaatcctatcaactggctaacatctcgtcaccgtcgcttgtcgtcgagtgtggaggtcaaactgtgcagtcgtgcgtgatccgaaaccttaggaagaatccgaatttcgatatctgcactctgttcatggaagtgatgctgccgcgcgaagaactgtactgcccgccgatcaccgtcaaggtgatcgacaaccggcagtttggaaggcggccggtggttggacagtgcactatccggagcctggaatctttcctgtgtgatccgtattcggcggaatcgccctcgccacagggaggtccggatgatgtgtcacttctcagcccgggagaggatgtgctgatcgacatcgacgacaaggagcctcttatcccaatccaggaagaagagttcatcgactggtggtccaagtttttcgcgtctattggagagcgagaaaagtgtggctcatacctcgagaaggacttcgataccttgaaggtgtacgacactcaattggaaaacgtggaggccttcgagggactctccgatttttgcaacacctttaagctgtatcgcggaaagactcaagaagagactgaagatccctccgtgatcggcgagtttaaggggctcttcaagatttatccgctgcctgaagatccggccatcccgatgccaccacgtcagttccatcagcttgccgcccaagggccacaggagtgcctggtgcgaatctacatcgtgcgggcattcggcctgcagccgaaggatccgaatggaaagtgtgacccttacatcaagatctctatcgggaagaaatcggtgtcggaccaggacaactacatcccgtgcactcttgaaccggtgtttgggaaaatgtttgaacttacttgcaccctgccactcgaaaaggatctcaagatcactctgtacgactacgatttgctgtcaaaagacgaaaagatcggagagactgtggtcgaccttgagaaccggctgctctcgaagtttggagcacgctgcggactcccgcaaacttactgcgtctcagggccgaaccagtggcgggatcagctccggccttcccaattgctccaccttttctgccagcagcatcgagtgaaggcgccggtgtaccgtaccgatcgggtgatgttccaggataaggaatactccattgaggagattgaagccgggaggatccctaacccgcacctcggacctgtcgaggagcggctcgctctgcatgtcctccagcaacagggactggtgccagagcatgtggaatcgaggccgctttactccccactccagccggatatcgagcagggcaagctccagatgtgggtggacttgttcccgaaagcgttgggacgtccgggccccccgttcaacataaccccccgcagagcacggaggttctttctgcgctgcatcatctggaacacgcgggatgtgatcctggatgatctgtccctgaccggagaaaagatgtccgatatctacgtgaaaggatggatgatcggattcgaagaacacaaacaaaagaccgacgtccattacagatccctggggggcgagggaaactttaactggagattcatctttcccttcgactacctccccgccgaacaggtgtgtactatcgcaaagaaggatgctttctggcgcctcgataagactgagtcaaaaatcccggcacgcgtggtgttccagatctgggataacgacaaattctcctttgacgacttcctgggcagcctgcaactcgatctgaaccggatgccaaagcccgccaaaactgccaagaagtgcagcctggaccagctggacgatgctttccacccagagtggtttgtgtcgctgttcgagcaaaaaaccgtcaagggatggtggccctgtgttgccgaggagggcgaaaagaaaatcctggctggcaagctcgagatgaccctcgagatcgtcgcagaaagcgagcacgaagaacgcccggcaggccagggacgggacgagccgaacatgaatccaaaactcgaggacccgaggaggcccgacaccagctttctgtggttcactagcccatacaagaccatgaagttcatcctgtggcgcagattccggtgggccatcattctcttcatcatcctgttcatcctgctgctctttcttgccatcttcatttacgccttcccgaattacgccgcgatgaagctcgtgaagcctttttcc

SEQ ID NO: 10648 - DNA, 6243 bp, synthetic construct
  misc_feature 1..6243: note = source = /note="Description of Artificial Sequence: Synthetic coding sequence"
  source 1..6243: mol_type = other DNA
atgctctgttgtcttctcgttcgagcttcgaacctgcccagtgctaaaaaagacaggcgatccgaccccgtggcgagcctgaccttcaggggtgtaaagaagaggaccaaggtgatcaaaaatagcgtgaatcctgtttggaacgaaggtttcgagtgggatttgaaaggaattcctcttgaccagggaagcgagttacacgtggtggtcaaagatcacgagaccatgggtaggaacaggtttttgggcgaggctaaggtgccacttcgggaggtactggcaactccatcactgtccgcctcttttaacgcccccttgcttgacaccaagaaacagccaacaggtgcttcactggtgctccaggtgtcctataccccgctaccaggggccgttcctctgttcccgcctcctacccccttggagccctcacccaccctccccgatttggatgttgtggctgatacggggggggaggaagacactgaggatcaggggctcacaggagatgaggccgagccattcctggatcagtctggcggtcctggtgcccctaccactccccgaaagctgccatctaggcctcctccgcactatcctgggataaagaggaaacgctccgccccaacttctaggaagttattgtccgacaagccccaagatttccagatcagggtccaggtgatcgaagggagacagttaccgggggtgaatataaaacccgtggtcaaagtgaccgccgcggggcaaaccaagaggacacggatccataagggtaattcgccattgttcaatgaaacactattcttcaatcttttcgacagccccggcgaactgtttgatgagcccatctttatcaccgtggtagactcccggtcactcaggacagacgccttgcttggcgagtttaggatggacgtgggaacaatttaccgcgagccacgccatgcttatctgcggaaatggctactcctttctgatccagacgattttagcgctggggctaggggctacctcaagacatcgttgtgtgtgctgggtcccggcgatgaagcacctttagaaaggaaagatccttccgaggataaggaggacatcgagtccaacctcctgcgccctacaggagtggcactgcggggagcccacttttgcctaaaggtatttagagccgaagatctgccccaaatggacgatgctgtgatggacaatgtcaaacagattttcggattcgaatccaataaaaagaacctggtcgatccttttgtggaagtctcatttgccggaaaaatgttgtgcagcaagatcctggaaaagaccgcaaacccccagtggaatcagaacatcaccctgccagcgatgttccccagtatgtgtgaaaagatgcggataagaatcatcgactgggatcgcctgacgcacaatgacatagtagccactacatatctgtcgatgtccaagataagtgccccggggggggaaatcgaggaagaacccgcaggtgccgtgaagccatctaaggcatcagacctggatgattacctaggttttcttcctacatttgggccttgttatatcaacctgtacggaagcccacgtgagtttactggatttccggatccgtacacagagctgaatacaggcaagggtgagggggtcgcttaccggggcagattgctcctgagcttggaaaccaagctggtggaacacagtgaacagaaagtggaggacctgccggctgacgacatcctgagggtggagaaatacctgagacggaggaagtatagcctgttcgccgctttttattctgcaacaatgctccaggacgtggacgatgctatccagttcgaggtgagtattgggaactacggaaacaaatttgatatgacctgcctaccactggcgagcaccacccagtactctagggccgtctttgatggctgccactactattatctgccatgggggaatgtgaaacccgttgtagttcttagttcctattgggaggatatctcccataggatcgagactcaaaatcagctgctgggaattgccgatcgcctcgaagcgggcctggaacaggttcacctagcactcaaggcccaatgttcaaccgaggatgtagatagtctggttgctcagttgacggacgaattgatcgccggatgtagccagcctctcggagacatccatgagaccccttccgccacgcatcttgaccaatatctctaccagctccgaactcaccatttatcccagatcaccgaagcggcactggccctcaagctgggacactctgaactacctgcggcccttgagcaagcagaagactggctgttacggctgcgagccctcgctgaagaacctcaaaattccctgcccgatatcgttatatggatgctgcagggggataagagagtagcataccagagagtccctgcacaccaggtgttattctctagacgaggtgcaaattactgtggcaaaaattgtggcaaattgcagactatcttcctgaaataccccatggagaaagtccccggagccagaatgccagtgcagatccgcgttaagctgtggtttggactgtcggtggatgagaaagagtttaatcagttcgccgaggggaaactgtctgtctttgcagaaacttacgagaatgagactaagctggctctcgtgggcaactggggcacgacgggtttaacctaccctaagttcagcgacgtgacaggaaagattaagctacccaaggattccttcagaccctcagctgggtggacctgggctggggactggtttgtgtgtcctgagaagacgctattgcatgatatggatgctggccacctttcatttgtggaggaggtctttgagaatcagactcgcttacccggaggtcaatggatctacatgtctgataactacaccgatgttaacggggagaaggtactgcccaaggatgatatagagtgccctcttggctggaagtgggaggacgaggagtggtctaccgacctgaatcgcgcagtggatgaacaaggttgggagtactcaatcacgatccctcctgaaagaaaacctaaacactgggtacccgctgagaaaatgtactacacacatagacggcgaagatgggtacggttgcgacgacgtgacctctctcagatggaggctttgaaacgtcaccggcaggccgaggcagagggtgaggggtgggaatatgcttctttgttcggttggaagttccacctggagtatcgaaagacggacgcattcagacgtaggcgatggagaagaagaatggaaccgttggagaagacggggccagctgcggtctttgcacttgaaggggctctcggtggtgtgatggacgacaaaagtgaggattccatgagcgtgagcacactatcatttggagtcaatcgacctaccattagctgtatctttgattacggaaaccgctatcatctgcgctgttacatgtaccaggcgcgggacctagcggccatggacaaagattccttctcagacccttacgcgatcgtatcttttttgcatcagtcccagaaaactgtggtggtaaagaatactctcaatcccacttgggatcagaccctcatcttctatgaaatcgagatttttggcgagccagccacagtggccgaacagccaccaagcatagtggtcgaactgtacgatcacgacacatacggcgctgacgaattcatgggtagatgtatctgccagccaagcttagagaggatgcctaggctggcctggtttccactgacgcgaggctctcaaccatctggggaactgctcgcctcttttgaattgattcagagggagaagcctgcaattcatcatatcccagggtttgaggttcaggaaacatctagaattctggacgaaagtgaagacacggatttgccttaccctccaccacagagagaggcaaacatatacatggttccccagaacattaagcccgctttgcagcggaccgctatagaaatacttgcatggggactgcggaacatgaaatcttatcagctcgccaatatcagctcaccaagtttggtagtggagtgcggcggccagaccgtacagagttgtgtcattagaaacctccgaaaaaatcccaattttgatatctgcactctcttcatggaggtgatgctgcccagagaggagctgtactgcccacctattacggtaaaggttatcgataataggcagtttggaaggcggcctgttgtcgggcaatgcaccatcaggtcgctggaatctttcctctgtgacccctacagcgccgagtcaccaagcccccagggtggacctgacgacgtctccctgctgagccccggcgaagatgtattgatcgatatagacgacaaggagcctttgatccccatacaggaagaggaattcatcgactggtggtctaagtttttcgctagcatcggagaaagggaaaagtgcgggtcatatctggagaaggatttcgacacccttaaggtctacgatactcagctagagaacgtcgaagctttcgagggactgtctgacttctgtaatacgtttaaactatacaggggaaagactcaagaggagacagaagacccctcggtcatcggagaattcaaaggactgtttaaaatttaccctcttcccgaggatccagcaatcccaatgccccccagacagttccaccagctcgcggcccagggaccacaggagtgtctcgtgcgcatctatattgtgcgcgcgttcggacttcagccgaaggatccaaatggaaaatgtgacccctatatcaaaatcagcatcgggaaaaaaagcgtaagtgaccaggataattatatcccctgtacgctggaaccagtgttcgggaaaatgttcgagctgacatgcacgctccccctcgaaaaggatttgaagattactctttacgactacgaccttttatctaaagatgagaagatcggggagaccgtggtggatttggaaaatcggctcctgagtaagtttggggcccgctgcgggttaccgcagacctattgcgtctccgggcctaaccagtggagagaccaattaagacccagtcagttgttgcacctcttctgtcagcagcaccgagttaaagcccccgtctacagaaccgatagggtgatgttccaggacaaggaatacagtattgaagagatcgaggctggtcggatccctaatccccacctcggtcccgttgaggagagattggcccttcatgtgctgcaacagcaggggctggtgcccgagcacgtagagagtcgtcccctgtactccccactccagcccgatatcgagcagggtaaattgcagatgtgggtggatttattccctaaggccctaggaagaccagggcccccgtttaacatcacgcccaggagggctcgacggttctttctacgctgtattatatggaatacacgagacgtgatactggacgatctgtctctgaccggcgagaagatgagtgacatctatgtgaaaggttggatgatcggtttcgaggagcacaagcagaagaccgacgtccactaccgcagcttagggggcgaggggaacttcaattggagattcattttcccattcgattacctgcctgcagagcaagtgtgcacaatcgccaagaaagatgctttctggcggctggataagaccgaaagtaagattccagcaagagtcgtcttccaaatatgggataacgacaaattttccttcgatgatttccttggcagtctgcaactagaccttaaccgaatgcctaagcctgccaaaacagccaagaagtgttctctggatcaactggatgatgcattccaccctgagtggttcgtttccttgttcgaacagaagaccgttaagggctggtggccatgcgttgccgaagagggcgagaaaaaaattcttgccgggaaactggaaatgacattggaaattgttgccgagtcagaacacgaggagcgaccggcgggccagggccgcgacgagcctaatatgaatccaaaactggaagatccacgcaggccagatactagtttcctatggttcactagcccgtacaagactatgaagttcatcctgtggcggaggttccgatgggccattatcctttttatcatcttgttcatactcttattatttctcgccatctttatctatgctttccccaattacgccgcaatgaagttggtgaagcctttctca

SEQ ID NO: 10649 - DNA, 6243 bp, synthetic construct
  misc_feature 1..6243: note = source = /note="Description of Artificial Sequence: Synthetic coding sequence"
  source 1..6243: mol_type = other DNA
atgctttgctgtctgctggttagagcctccaacctgccttccgcaaaaaaggataggcgttccgacccagtggctagcctgactttcagaggcgtgaagaaaagaactaaggtgattaagaactcggtgaatcctgtctggaatgaaggattcgaatgggatctcaagggtatccctctcgatcaaggctcggagctccacgtggttgtgaaagatcatgaaaccatgggaaggaaccgcttccttggtgaagccaaggttccgcttcgagaggtcctcgccactccctcgctcagcgcatcattcaacgccccgctgcttgatactaaaaagcagcctacgggggcctctctcgtcctgcaagtgtcatacacccctctgcctggcgcggtccctctttttcctccccctactcctctggaaccatccccaaccctccccgatctggatgtggtcgcagacaccggcggagaagaagatacggaagatcaaggcctcactggtgacgaagcggagccattcctggatcaatccggtgggccaggagcaccaaccaccccccgcaaattgccatcgcgaccgccgcctcactatccaggaatcaagcggaaaagatccgcacctacttcgcggaagctgctgagcgataaaccccaggatttccagattagagtgcaagtgatagagggtcgccagctccctggtgttaacatcaaaccagtcgtgaaggtcaccgctgcaggtcaaaccaagaggaccagaatacataagggaaactctccacttttcaatgaaaccctgttcttcaacctttttgattccccaggcgaactgttcgatgaaccaatctttatcacggtggtcgattcgcgttcgcttcgaacggatgcgctgcttggcgaattcagaatggacgtcggtactatataccgggagccacgccatgcatacctcaggaagtggctgttgcttagcgacccggacgacttttctgcaggtgcacgaggatatcttaagacttcgctttgcgtgctgggaccaggtgatgaagcacctcttgaacggaaagatccatcagaagataaggaggacatcgagagcaacctgctgcggcccactggagtggcacttcgtggcgcacacttctgcctgaaggtgttcagagcagaggacctccctcagatggatgacgccgtcatggacaatgtcaagcagatctttggatttgaatcaaataagaagaaccttgtcgatccgttcgtggaagtctcgtttgcagggaagatgctttgtagcaagattcttgaaaagaccgcgaatccccagtggaatcaaaacatcaccctgcctgccatgttcccctctatgtgtgagaaaatgcgaattcggatcatcgactgggaccgccttactcataacgacattgttgcaaccacttacttgtcgatgtccaagatctcggcacccggtggagaaattgaagaggaacctgccggagcggtgaaaccatcaaaggcgtccgacctcgatgattacctgggatttcttccaacgtttggtccttgctacatcaatttgtacggcagccctcgtgaattcaccggctttccagatccttacactgaacttaacacgggaaagggagaaggagtggcctaccgcgggcgactgctgctgtcgctggaaactaagctggtcgaacattcagagcagaaggtggaggatctccctgctgacgatatccttagagtggagaagtacctcaggcgccgtaagtacagcttgtttgcagccttctatagcgccaccatgctccaggatgtggacgacgccatccagtttgaggtgtcgattggtaactacggaaataagtttgacatgacctgccttccactcgcatcgactacccagtattcccgcgccgtgtttgatggatgtcattactactatctcccgtgggggaacgtgaagccagtggtcgtcctcagttcatactgggaagatatttcccatagaatagaaacccagaatcaacttctcggaatcgcagaccggctggaggcaggtctggaacaagttcatcttgcactcaaggcacagtgctcgacggaagatgtggattcactcgtggcacagcttaccgacgagctgatcgcaggatgtagccagcctctgggagacattcacgaaacgccctcagccacccatcttgaccagtacctctaccaactgaggacccatcacctttcgcaaattaccgaagcagcacttgctctcaaactcggccactccgaactgccagcagcactggagcaggcagaggattggcttttgcggcttagagccctcgccgaagaaccccaaaactcgctccccgacattgtcatttggatgctgcaaggggacaaacgggtcgcataccagcgggtgcccgcccatcaagtgttgttttcacggcggggagccaactactgtggtaaaaactgcggaaagctgcagacgattttcctgaagtaccctatggaaaaagtgcctggggcccgcatgccagtgcaaattcgagtgaaactttggtttggactttccgtcgatgaaaaggagtttaaccagtttgccgaaggaaagctctcagtgtttgcagaaacctacgaaaatgaaacgaagttggcactggtgggtaattggggcacgaccggtcttacgtatccaaagttttcagacgtgactggtaagattaagctcccgaaagatagctttaggccgagtgcaggatggacgtgggcaggggactggtttgtgtgtcctgaaaaaaccctccttcatgatatggacgcaggccacttgagttttgtggaagaagtgttcgagaaccaaactagacttccaggcggacagtggatttacatgtcggataactacaccgatgtcaacggcgaaaaagtgctccccaaggatgacattgagtgccctctgggatggaagtgggaggacgaggagtggtccaccgatctcaatagggcagtcgacgaacaggggtgggaatactcgattacgattccgccagaacgaaagcctaagcactgggtgccagccgaaaagatgtactatactcatcgtaggagaaggtgggtgagactcagacgacgggatcttagccagatggaagcgctgaaacgccatagacaagcagaggctgagggagagggatgggaatacgcgtcacttttcggatggaagtttcatctggaataccgcaagaccgatgcattcagacgcaggcgctggagacgccggatggaaccacttgaaaagactggtccggccgcggtattcgccctggaaggcgcgctggggggcgtgatggacgataagagtgaggattccatgtccgtctctacccttagctttggggtgaaccgtcctactatcagctgcatatttgactacggaaatcgataccatctgcgctgttacatgtaccaagcacgcgacctcgctgccatggataaggactcattctcggacccgtacgcgattgtgtcgtttttgcatcaatcacagaaaaccgttgtggttaagaataccttgaacccgacttgggatcaaactcttatcttctacgagatagagatcttcggagagccagcaactgtggctgaacaacctcctagcattgtggtggaattgtacgatcacgacacttacggggcagatgagttcatgggtcgctgtatctgccaacctagcctggaacggatgcctcgactggcatggttcccgctcacccgcgggagccaaccttcaggagagcttctggcgtcctttgaactgattcaacgtgagaagcccgcaattcatcatatccccgggtttgaggtccaagagactagtcggatcttggatgagtcggaggacaccgatcttccataccccccaccccagagggaggcaaacatttacatggtcccacaaaacattaagcctgcgctccaaagaactgccatagagatccttgcgtgggggctgaggaatatgaaatcgtaccagcttgccaatatctcttccccttccctggtcgtggagtgcggcggacagaccgtccagtcctgtgtgattagaaacctgcggaagaaccctaactttgatatctgtactctgtttatggaggtgatgctgcctagggaagagctttactgtcctccaattaccgtgaaggtgattgacaacagacaatttggtaggcgccccgtggtcggacaatgtactatccgatcgctcgagtcgttcctctgcgatccctacagcgcagaatcgccgtccccgcaaggaggccccgacgacgtgtcgcttctgtcgcctggtgaggatgttcttattgacatagatgataaagaacccctgatcccgattcaagaagaggaattcatcgattggtggtcgaagttctttgcttccattggggaacgagaaaaatgtggttcatacctcgaaaaggatttcgatactctgaaagtctacgatactcaactggaaaatgtggaggcctttgaaggcctgtccgatttttgcaacacgtttaaactgtaccgcggcaagactcaggaagagactgaggacccttcggtgatcggagagtttaagggtctgttcaagatctacccccttccagaagatccagccattccgatgccacctagacagttccatcaattggcggcacaagggcctcaggaatgtctggtaagaatctacatcgtccgcgcgttcggactgcagcctaaagacccgaatgggaagtgcgatccatacatcaaaatctccattggaaagaaatccgtgtccgaccaggataactacatcccttgtacccttgagccggtgtttggaaaaatgtttgagctcacttgtaccctcccactggagaaggatctgaagattaccctttatgattacgatttgctctccaaggacgaaaagattggagaaactgtcgtggatctcgaaaatagactgctgtccaagtttggggcaagatgtggccttccccagacttactgtgtgtcaggtcccaatcaatggcgcgatcaactgcggccatctcagctgctgcacctgttttgccagcaacaccgtgtgaaggcgcctgtgtacaggactgaccgcgtgatgtttcaagataaggaatactccatcgaagagatcgaagcaggacgcatcccaaaccctcatctgggtcccgtcgaagaaagactggcactgcacgtgctccagcaacaaggactggtgcccgaacatgtggaatccagacccctctacagccccctgcagccagacatcgaacaaggcaaactgcagatgtgggtcgacctctttcctaaggcacttggtcgcccgggccctccatttaacattacccccagacgtgcgcgccgctttttcctccgttgcatcatatggaacacccgggatgtgatattggatgatctgtcccttacgggggagaaaatgtcggatatctacgtgaaggggtggatgattggatttgaggaacacaagcaaaaaactgatgtgcactacagatctcttggaggggaaggaaactttaactggagattcatttttccttttgattatctgcctgccgaacaagtgtgtactattgcgaagaaggatgccttttggagactcgacaaaactgagtcgaagattcccgcgagggtcgtgttccagatctgggataacgataagttcagctttgacgatttcctgggatcgctgcagcttgaccttaatcgaatgcccaaaccagcaaagaccgctaagaagtgtagcctcgatcaactggatgatgcttttcaccccgagtggtttgtgtccctttttgagcaaaaaaccgtgaagggttggtggccatgtgtggcagaggagggcgagaagaagattctggcgggaaagctggaaatgaccctcgagatcgtggcagagtcggaacatgaggaaaggcccgccggtcagggaagagatgagccaaacatgaaccccaaactggaagatcccaggcgcccagatacctcgtttttgtggtttacgtcaccttacaagacgatgaagtttattctttggaggagatttcgctgggcgatcatcctctttatcatcctgtttattcttctcctttttctggcgatcttcatctatgcatttcctaattacgcagccatgaagctggtgaagcccttttca

SEQ ID NO: 10650 - DNA, 6243 bp, synthetic construct
  misc_feature 1..6243: note = source = /note="Description of Artificial Sequence: Synthetic coding sequence"
  source 1..6243: mol_type = other DNA
atgctttgttgtctgcttgtgcgtgcaagcaacctcccatcagcaaagaaagatcgaagatcagatcccgtcgcatcactgaccttcagaggggttaagaagcgcactaaggtgatcaaaaacagcgtgaatcctgtgtggaatgaagggttcgagtgggatttgaagggcattccgcttgaccaaggatccgaactgcatgtggtggtgaaggatcatgaaaccatggggcgcaaccggttccttggtgaggcaaaggtcccgttgagggaagtgctcgccaccccttccctctcggcgagctttaacgcccctcttcttgacactaagaagcagcctaccggtgcatcactggtgctgcaggtcagttacaccccccttcctggcgcggtcccactgttcccaccacctacccctcttgaaccgtcgccgacgctccccgatctcgacgtcgtcgcggataccggcggtgaagaggacaccgaggatcagggattgaccggagacgaagctgaacctttcctggatcaaagcggaggaccaggtgcacctaccaccccaagaaagttgccttcgaggccacctccacattaccctggcattaagaggaagcgttcggcgccaacgtcccggaagctgctgtctgataagccacaagatttccaaattagagtgcaagtgattgaggggaggcagctgccaggcgtgaacatcaaacccgtcgtgaaggtcaccgcagcaggacagactaagaggactcggattcataagggcaactctcctcttttcaacgaaaccctgttcttcaacctctttgactcccctggcgaactgttcgacgaaccaatctttatcactgtggtggattcaaggtcgctccgcaccgatgctctgctgggtgaatttcgaatggatgttggaacgatttaccgcgaaccgaggcatgcatacctccgaaagtggttgcttttgagcgatcctgatgacttttctgcaggtgctaggggttaccttaagacttcactctgcgtgctgggccctggagatgaagcaccactggagcgtaaggatccatcggaagataaggaagatattgaatcgaacctgctcagaccgaccggagtggcactgcggggggcacatttttgtttgaaagtctttcgggccgaggacctgccgcagatggatgatgccgtgatggacaacgtgaagcagattttcggttttgagtctaataagaagaacctggtggacccatttgtcgaggtgtcgtttgcgggtaagatgctgtgttcgaaaattctggaaaaaaccgccaacccacaatggaaccagaacattactctcccggcaatgttcccttcgatgtgcgaaaagatgcgaatccgcataatcgattgggatcggctgactcataatgacatcgtcgcaactacgtacctgtcgatgtcgaagatttccgcaccagggggagaaattgaagaagagccagccggcgccgtgaagccatcaaaagcctcagacctggacgattaccttggattcctgcctacctttggcccttgttacattaatctttacggatcccccagagaatttaccggatttccggatccttacaccgaactgaataccggaaagggagaaggagttgcgtacaggggtaggcttcttctgtcactggaaaccaagctcgtggaacatagcgaacaaaaggtggaagatctgccggccgatgatattctgcgagtcgagaagtaccttagacgccggaaatactcactcttcgcagcattttacagcgcaactatgctgcaagatgtggatgatgcaatccagtttgaggtgtccatcggaaactacggcaacaagttcgacatgacctgtctgcctctggcaagcaccacgcagtacagcagggcggtgtttgacggatgtcattactactacctgccatggggcaatgtgaagccagtcgtggtgctcagctcctactgggaagatatttcacatcggattgagacgcaaaaccagctgctcgggattgcagatagactggaagctggactggaacaagtgcacctcgcactgaaggctcaatgctcgaccgaggatgtcgatagcttggtggcacagcttactgacgagctgattgcaggatgttcccagccactgggtgatattcacgaaaccccttccgcaacgcatctggaccaatatctttaccaactccggactcatcacttgtcgcaaatcacggaagccgcactggcactgaagttgggtcattcggagcttcccgcagctctggaacaagccgaggactggcttcttcgcctgcgcgcacttgccgaagagccccaaaactcgctgcctgatattgtgatttggatgcttcagggagataaacgcgtggcgtaccagagggtgcctgcacatcaagtgcttttctcccgacgaggtgcaaactactgtggtaagaattgtggcaaacttcagaccatctttctgaagtacccaatggagaaagtgccaggcgcacgcatgcccgtgcagattagagtgaagctctggtttgggctgtccgtggatgaaaaggagttcaatcagtttgcagagggaaagctgagcgtgtttgccgaaacctacgagaacgagacgaaactggcccttgtggggaactggggtactactggactgacttaccctaagttttcggacgtgactggtaagataaagttgcctaaggattcatttcggcccagcgcagggtggacttgggcaggtgactggtttgtgtgtcccgaaaaaaccttgctccacgacatggatgccgggcaccttagctttgtggaggaagtctttgaaaaccagaccagactgcctgggggacagtggatttacatgagcgacaactataccgacgtgaatggcgaaaaggtgctgccaaaggatgatatcgaatgtccactgggttggaagtgggaggacgaagagtggagcaccgacctgaatagagccgtcgacgagcaaggatgggagtactcgataactattccgccagaacgaaagcctaaacactgggtgccagcagaaaagatgtactacacccatcgtcgccgtagatgggtccgcctgcgccggagagatctgtcccaaatggaagcactcaagcgccataggcaagcagaagcagaaggcgaaggctgggaatacgccagccttttcggttggaagtttcacctcgaatacaggaaaaccgatgcgtttagaagaaggcgttggaggagacgtatggaacctttggagaaaactggacctgctgcagtgttcgcactcgaaggtgcgctgggcggggtcatggatgataagtcggaggatagcatgtcagtctccaccctgtcgtttggtgtgaatagacccaccatttcatgtatattcgactacggaaaccgttatcatctgcggtgctacatgtaccaggccagagatcttgcggccatggataaagactcgttctccgacccctacgcaattgtgtcgtttctgcatcagtcccaaaagaccgtggtggtcaagaacacccttaatccaacctgggaccagactctgatcttttacgaaatcgagatttttggtgaacccgccactgtggccgaacaacctcctagcatcgtcgtcgaactttacgatcatgatacttacggggcagacgagtttatggggagatgtatttgccaaccaagcctcgaacgaatgcctagacttgcctggtttcctctcacccggggatcacaaccttccggcgagttgctcgcgtcctttgaactcatccaaagagaaaagccagctatccaccatattccagggtttgaggtccaagagacgtctcgaattttggatgagagtgaagatactgatctgccatatcctcctccccaaagagaggccaacatttacatggtcccacagaacattaagccagcactgcagagaaccgccatcgagattctggcttggggccttcgtaacatgaagtcatatcaactggccaacattagctcgcctagcctggtcgtggagtgtggaggacaaactgtccagtcctgtgtcattcgcaacctccggaaaaatccaaacttcgatatctgtacccttttcatggaggtgatgcttccacgagaggagctctactgtcctcctattactgtaaaggtgattgataaccggcagttcggacggcgtccagtggttggacagtgtactattagatcgctggaatccttcttgtgcgacccctactcagcggagagcccctctcctcaaggtgggcctgatgatgtcagcctgctgtcgcctggtgaggacgttcttattgacatcgatgacaaggagcccctgatccctatccaggaggaagaattcattgattggtggtcaaaattcttcgcctccatcggcgaacgggaaaagtgcggttcgtaccttgaaaaagactttgataccttgaaggtgtacgatactcaacttgaaaatgtcgaagcatttgaaggactcagcgatttctgcaacacttttaagttgtatcgtggaaagacgcaagaagaaaccgaagatccgtcggtgataggcgagttcaaaggtctgtttaagatttaccctctgccggaggatcctgcaattcctatgccgcctcgacaatttcatcagctcgcagcacagggaccccaagaatgcttggtgcggatatacatagtgcgtgcctttggacttcaaccgaaagatccaaatggaaaatgtgatccatacatcaagatctcgataggaaagaagtcggtgagcgaccaggacaattacattccctgtacgttggaaccagtgtttggaaaaatgttcgaactgacctgtactctgcctctcgagaaagatcttaagattactctttacgattacgatcttctcagcaaggacgaaaagatcggtgaaaccgtggtggatcttgaaaatcgcctcctcagcaagttcggtgcacgctgcggcctgcctcagacctactgtgtgtccggaccaaaccaatggcgtgatcagctccgcccttcccaacttcttcaccttttctgccaacaacaccgcgtcaaagctccagtgtacagaaccgaccgagtcatgttccaagacaaggaatactccattgaagagattgaagcaggtcgtatcccgaaccctcatcttgggcctgtggaggagaggcttgccctgcatgtgcttcaacaacaaggacttgtgcctgagcacgtggaaagccggccgctgtactccccgctccagccagatattgagcaaggtaaacttcaaatgtgggtcgatctttttccaaaagccctggggcggcctggacctccgtttaacataactcctcgccgagctagaagattctttctgcgctgcattatctggaacacccgagatgttatacttgatgacttgtcgttgacgggcgaaaagatgtccgacatttatgtcaaaggttggatgattggttttgaggaacataagcagaaaaccgacgtgcactacaggagcctgggaggtgaaggaaacttcaactggcgattcatttttccgttcgactaccttccggcggagcaagtgtgtaccatagccaaaaaggacgcattttggagactggacaaaaccgagtccaaaatacctgcaagggtggtgtttcaaatttgggataatgataagttttcgtttgacgattttctgggaagcctgcaacttgatctcaacagaatgccgaagccggcaaagactgcgaagaaatgtagcctggatcaactggatgacgcctttcatcccgaatggtttgtgtcacttttcgaacaaaagactgtcaagggctggtggccgtgcgtggcagaagaaggagaaaagaagattctcgccggaaaacttgaaatgaccctggaaattgtcgcagagtcggaacatgaagagcgtcctgcaggtcagggacgagatgaaccgaatatgaaccctaaactggaagatcctcggaggccagacacctcatttctgtggtttacctcgccatacaaaaccatgaagtttatcctgtggagaagatttcggtgggcgatcatccttttcattatactctttattctgctgcttttccttgctatattcatttatgcattcccaaactatgcagccatgaagctggtgaagcctttttcg

SEQ ID NO: 10651 - DNA, 6243 bp, synthetic construct
  misc_feature 1..6243: note = source = /note="Description of Artificial Sequence: Synthetic coding sequence"
  source 1..6243: mol_type = other DNA
atgttgtgttgccttctggtgagagcgtccaatctcccctcggctaagaaagaccgccgctcagatccggtggcctctctgactttccgcggagtgaagaagcggaccaaagtcatcaagaattcagtgaatccggtctggaacgaggggttcgaatgggatctcaagggtatcccgctggaccaaggaagcgaactgcatgtggtggtgaaagaccatgaaaccatgggtcggaacaggttcctcggggaagcaaaagtgccacttagggaggtgctggcgaccccctcgctgagcgcctccttcaacgcaccgttgttggacaccaaaaagcagccgactggcgccagcctcgtcttgcaagtctcctacactccactcccgggagcggtgcctctgtttccacccccgactccactcgaaccttcgcctaccctgccagatttggatgtcgtggcggacaccggaggagaagaggacaccgaagatcagggtcttaccggcgacgaggccgaaccattcctggaccagagcggggggccgggagcccctaccactccgcgaaagctgccctcccggccgcctccacactacccgggaatcaagagaaagagatcggccccgacctccagaaagctgctgtctgacaagccacaggacttccagatcagggtgcaagtcatcgagggacgtcaactgccgggtgttaacatcaagccagtggtgaaggtcactgccgccggacaaaccaagcgcacccgtatccataagggaaacagcccgcttttcaacgaaactctgttcttcaacttgttcgattcgccgggagagctgttcgacgagccgatcttcatcacggtggttgactcccggtcgttgcgcaccgatgccttgctgggggaattcaggatggatgtgggaaccatctaccgcgaaccacggcacgcctacctgaggaaatggctgctgctttccgatccggatgacttctccgcaggggctcgaggatatcttaagaccagcctttgtgtgttgggacctggagacgaagcccctctggagcgcaaggacccttcggaggataaagaggacatagagtccaacctgctcaggccgacgggagtcgccctgaggggcgcgcatttctgcctgaaagttttccgcgcagaggacctgccccaaatggatgacgcagtgatggataatgtgaagcagatctttggattcgagtccaacaaaaagaacctggtcgacccgttcgtggaagtctccttcgccggaaagatgctctgctcgaagattctggagaaaactgcgaacccacagtggaaccagaacatcactcttcctgctatgtttccttcgatgtgcgagaaaatgcgcatccggatcatcgactgggacaggctcactcacaacgacattgtggccaccacttacctcagcatgagcaagatcagcgccccaggaggagagattgaagaagagccggcaggagccgtgaagccgtccaaggcgtccgatctcgacgactaccttggattcctccccactttcggcccctgctacatcaacctctatggaagcccgagagagttcactggattcccagacccgtacactgaactcaatactggaaagggcgagggagtggcataccgcggccggctgctgctctccctcgaaaccaagctggtggaacattcagaacaaaaagtcgaagatctgcctgccgacgacatcctccgcgtggaaaagtacctgcgccgccggaagtacagcttgtttgccgccttctattcagcaacgatgcttcaggacgtggatgacgccatccagtttgaagtgtcgataggaaactacggtaataagtttgatatgacctgcctgcccttggctagcaccactcagtacagcagagcagtctttgatggttgccactactactacctgccgtggggcaatgtgaaacctgtggtggtgctgagctcctactgggaagatatctcgcaccggatcgaaacccagaatcaattgctgggcatcgctgatcgccttgaggccgggctggaacaagtacacctcgccttgaaggcccagtgtagcactgaggacgtcgacagcctcgtggcccagctgactgacgagctgattgcgggctgctcgcagcctttgggagatatccatgaaactccgtctgcgacccatctcgaccagtatctgtaccagctgcgcacccatcacctgtctcagatcactgaagcggcacttgcccttaagctgggacactcggagcttcctgcagctctcgagcaggccgaggattggctcctgcggttgagagcgctggccgaggaaccacagaactccctgccggacatcgtgatctggatgctgcagggcgacaaaagggtcgcctaccagagagtcccggctcatcaagtcctcttctcaaggcgcggcgcgaattactgcggaaaaaactgtggaaaacttcagacgatttttctgaagtatccgatggaaaaggtgccgggggcccgcatgccggtgcagatccgcgtcaaactttggttcgggttgtcggtggacgaaaaggaattcaatcagttcgctgagggaaagctgtccgtgttcgctgaaacctacgaaaacgagactaagctggctctggtggggaactggggaaccaccggcctgacttacccgaaattctcggacgtgaccgggaagatcaagctgccaaaagactcgtttcgcccatctgccggctggacctgggctggtgactggttcgtgtgtcctgaaaagactctgctgcacgatatggatgccggccatttgtcttttgtcgaggaagtgtttgaaaaccagaccagactgccgggcggtcagtggatctacatgtcggacaactacacggatgtgaatggagagaaggtcttgccgaaggacgatatcgaatgcccactggggtggaagtgggaagatgaggagtggtcaaccgatctgaaccgggccgtcgacgaacaaggatgggaatattcgatcaccatccctccagagcgaaagcctaagcattgggtcccggcggagaaaatgtattacacccatcgccggagacggtgggtgcgccttcggagacgggacttgagccagatggaggcactgaagcgacaccgtcaggccgaggccgaaggcgaaggctgggaatacgcgtcactctttggatggaagtttcaccttgagtacagaaagactgatgcattccgacggcggagatggagacgccgcatggagcctctggaaaaaacggggccggcggcggtgtttgccctggagggagccttgggtggggtgatggatgacaagtccgaggactcaatgtccgtctccaccctgtctttcggcgtgaaccgcccgacgatttcctgtatcttcgactatggcaacagataccacctccggtgctacatgtaccaagctcgcgatctggctgcgatggacaaagatagcttcagcgacccgtacgcaatcgtgtcgttcctgcaccagtcccaaaagaccgtggtggtgaagaatactctcaacccaacttgggaccagactcttatcttctacgagatcgagatcttcggagagcccgctaccgtagctgagcaaccgccgtcgattgtggtggaactgtacgatcacgacacctacggagccgatgagttcatggggaggtgcatctgtcaaccttcgttggaaagaatgcccaggctggcatggttcccgctgactcggggatcacagccgtccggagagctgttggcctccttcgaactgatccagcgcgagaagccagccatccaccatatcccaggcttcgaagtgcaagaaacttcgcggatcctggacgaatcagaggacacggacctgccctacccaccgccacagcgcgaagctaacatctacatggtgccgcaaaacatcaaaccagcattgcaacggaccgccatcgaaatcctggcgtggggcctgcggaacatgaagagctaccagctggccaatatctcatcaccaagcctggtggtggaatgcggcggacagactgtgcagtcgtgcgtcatccggaacctgcgcaagaacccaaactttgatatctgcaccctgtttatggaagtgatgcttccacgggaagaactgtactgtccgcctattaccgtgaaggtgattgataaccgccagttcggaaggcggccggttgtgggacagtgtacgatccgctcgctggagagcttcctctgcgacccttactcggcggagtcgccttccccgcagggaggcccggacgatgtctcgctgctgtcgcctggagaagatgtcctgatagacatagacgataaggagccgctgataccgatccaggaagaggagttcatcgactggtggagcaaattctttgcatcaatcggagaacgggaaaaatgcggaagctacctcgaaaaggattttgacacgctgaaggtgtacgacacccagctcgaaaacgtggaggcatttgaaggcctgtccgatttctgcaataccttcaagctctaccgtggtaagactcaggaggaaactgaagatccatcggtgataggagagttcaagggtctgttcaagatttatccgttgcccgaggacccagcaattccgatgccaccgcggcagttccatcaactcgctgcacagggtccccaggagtgcctggtcagaatctacatcgtgagagcgtttggccttcagccgaaggaccccaacggcaagtgtgatccgtatatcaaaatctctatcgggaaaaagtccgtgtccgatcaagataactacatcccgtgcacgctcgagcctgttttcgggaagatgtttgagctgacctgcaccctgccgctcgaaaaagacctgaagattactctctacgactacgacctgctgagtaaagacgagaaaatcggcgagactgttgtcgacctcgagaatcggctcctcagcaagttcggcgcacgttgcgggctcccacagacttactgcgtgtccggacctaaccagtggcgcgaccagctgcgcccgtctcaactgttgcacctcttctgccagcagcaccgcgtcaaggcccctgtgtatcggactgaccgcgtgatgtttcaggataaagagtactcgattgaagagatcgaagcaggcagaatccctaatcctcacctgggaccagtggaggaacgccttgcccttcacgtcttgcaacaacaaggcctggtgcctgagcacgtggaatcacggccgctctatagcccgctgcagccagacatcgagcagggaaagctgcaaatgtgggtggatctgtttccgaaagcgctgggacgcccgggacctcctttcaacatcacgccgcgccgcgcccggcggtttttcctgcgctgcatcatctggaatacccgggacgtgattctcgacgatctctcgttgaccggcgaaaagatgtccgacatctacgtgaaaggatggatgattggctttgaggagcacaagcaaaagaccgacgtgcactaccgctcgcttggcggagaaggaaatttcaactggcggttcatcttcccgttcgactacctcccggcagagcaagtctgtaccattgcaaaaaaggatgctttctggagactcgacaagaccgaaagcaagatcccggcgcgcgtggtgtttcagatctgggataatgacaagttctcattcgacgactttttgggctcacttcagctcgacctgaaccggatgccgaaaccagctaaaacggcgaagaaatgctcactggatcaattggacgacgctttccaccctgagtggtttgtttccctcttcgaacagaaaactgtgaagggatggtggccatgcgtggcggaggagggcgagaagaagatcctcgcaggtaagctggaaatgaccctcgagatcgtcgctgaatcagaacatgaagaacgacccgcaggccaaggacgagacgaacctaacatgaatccgaaactggaagatccccggcggccggatacgagtttcctttggttcactagcccgtacaaaaccatgaagtttattctgtggcggcgctttcgctgggcgatcatcttgtttatcatcttgttcatcctgctcctcttcttggcaatattcatctacgccttcccgaattacgcggccatgaagctggtgaaaccgttcagc

SEQ ID NO: 10652 - DNA, 6243 bp, synthetic construct
  misc_feature 1..6243: note = source = /note="Description of Artificial Sequence: Synthetic coding sequence"
  source 1..6243: mol_type = other DNA
atgctatgctgcctgctcgtgagggcatcaaatcttccttccgctaaaaaggacagacgctcggatcccgtcgcctccctgacatttagaggggttaagaaacggacaaaagttatcaagaattcagtgaaccctgtctggaacgaagggtttgagtgggaccttaagggtattcccctcgatcagggaagcgagctacatgtggttgtaaaggatcatgagacgatgggaaggaatcgtttcttgggcgaggccaaggtgcctctgcgcgaagtgctggcgacgccctctcttagtgcatcattcaacgccccactcctggacactaagaaacagccaacaggagcctctttagtgctgcaagtgtcctatacccctctgcccggagcagtaccactatttccacctccgacgcccctcgagccttcacccacgctccccgatctggacgtcgtcgccgataccggcggagaagaggataccgaggatcaggggctgaccggtgacgaggcggagccattcctcgatcagagtggagggcccggggctcccactacacctagaaagctgccaagcagaccgccacctcactaccccggcattaagaggaagagatccgcgcctacaagccggaagctgctgagcgataaacctcaggattttcagataagagtgcaggtcatagaggggcgccaactgcccggagttaacatcaaacctgtggttaaagtgaccgccgcaggtcagactaagagaactagaatccacaaaggtaactccccattattcaacgaaactctgtttttcaacctgttcgattctccgggggagttgtttgacgagcctatctttatcactgtcgtggatagcagaagtctcagaacagacgctctgttgggggagtttcgcatggatgtgggtactatctaccgagagcctcggcacgcgtacctccgcaagtggttgttgttgagcgaccctgacgattttagtgcaggcgccagaggatatcttaaaacctcattgtgcgtgctgggtcccggagatgaggcacctctggaaagaaaggacccctccgaggacaaagaggacatcgaatctaatttgcttcggccgaccggcgttgcattgcgtggggcccacttttgtctcaaggtctttagagcggaggatttaccgcagatggatgacgccgtgatggacaacgtcaagcaaatcttcggttttgagtctaataagaagaatttggtggacccctttgtagaagtaagtttcgcagggaagatgctttgcagtaagatccttgaaaagacagctaatcctcagtggaaccagaacattactctgccagccatgtttccgagtatgtgtgagaaaatgagaatcaggataattgactgggatcggctgacgcataacgacattgtggccactacatacctgagtatgagcaaaatcagtgctccgggtggtgagatcgaagaggaaccagctggcgcagtaaagccctcaaaagccagcgatctcgacgattacctcggttttctgccgacttttgggccttgttacatcaacttgtacgggtccccgagggaatttaccggtttcccagacccctacacagagctgaacactggtaagggcgagggggtggcttaccgcgggagattactgttgtccctcgaaaccaaattggtcgaacatagcgaacagaaggtcgaagacctcccagcggatgatatactgagggtggagaaatatcttcggaggcggaaatactccctctttgctgctttttactcagcgaccatgctgcaggatgttgacgacgcgatccagttcgaggtcagcattggaaactacggaaacaaattcgacatgacatgcttacccctcgccagtactacgcagtattctcgcgctgtgtttgatggatgccattattattatctcccatggggtaacgtaaaacccgtagtcgtcttgtcatcctattgggaagatataagtcaccgcatcgagactcagaaccagctgctggggattgccgatcggctcgaagcgggtttagagcaagtgcatttagcattgaaggcccagtgtagtactgaagatgttgatagtctggtggcgcaactgactgacgaactgatagccggttgcagccaacccctgggcgacattcacgaaacaccatcagctacacatctcgaccagtatctgtatcagttacgtacacaccacctgagccagattactgaggccgcccttgcgctgaagctgggccactccgagctccccgccgcactggagcaggctgaagattggctattgagactcagggctctcgccgaggagccgcagaacagtcttcctgacatcgtgatctggatgttgcagggagataagcgggtggcgtaccaaagggtgccagctcaccaggtcctgttctctcgtagaggagcgaactactgcggcaagaactgcggaaagctccagaccatattcttgaaatatcctatggagaaggtgcccggagccagaatgcctgtgcagattagagtgaagctttggttcggactgagcgtcgacgaaaaggagtttaatcagttcgcggagggcaaactcagcgtgttcgcggagacttatgaaaacgaaacaaaactcgcactcgtcggtaactggggcacgacgggcctcacctacccgaagttttccgacgtgaccggcaaaataaaactgccaaaggacagcttcagaccatccgctgggtggacttgggccggggattggtttgtgtgccctgaaaagactttactccacgatatggatgccggacacctctcatttgtagaggaggttttcgagaaccagacgaggttgcctggaggacaatggatctacatgagcgacaattacaccgacgtgaacggagaaaaggtattgccgaaagacgacatcgagtgccccttgggttggaagtgggaggatgaggaatggtctacggatctcaatagggctgtagatgaacagggctgggagtattcaattaccataccacctgaaagaaagcccaagcattgggtgcctgcggagaagatgtactatactcataggcgccgaagatgggttaggttgcggagaagggatctgagccaaatggaagccttaaaacggcataggcaagccgaggctgagggggagggctgggaatatgcgagcctgttcggatggaaattccacctggagtatcgaaagacggacgcatttagacggaggagatggcgcaggaggatggagccgcttgaaaaaactggcccagctgctgtgtttgctctagaaggggcgcttggcggagtgatggacgataaatctgaagattctatgtccgtttcaaccctgtctttcggcgtaaataggccaactatctcctgtatatttgattacggaaaccgctaccacctgagatgctatatgtatcaggcaagggaccttgccgctatggacaaagattcatttagcgacccgtacgctattgtaagcttcttacatcagagccagaagactgtagtggtcaagaacacactcaaccccacatgggaccagactcttatcttttacgagattgaaatattcggggagcctgccactgtggctgaacagccgccctccattgtggtcgaactgtatgatcacgacacctacggcgcagacgagttcatgggtaggtgcatttgccagccctccctggaacgtatgccccgactggcctggtttccactcaccagaggaagtcagccaagtggtgagctgctggcatccttcgagctgatccagcgggagaaaccagctatccaccatataccggggttcgaggtccaggaaacatcccgcatcttagacgagtcagaggacacagacttgccctacccaccacctcagagagaagctaacatttatatggtgccccagaacatcaagcccgctctgcagcgaacagctatcgaaattctagcctggggcctgagaaacatgaagagttaccagctcgctaatatttcgtctccctctctggtggttgaatgcggtggacagaccgttcaaagctgcgtgatacgaaatctgaggaagaatccgaacttcgatatttgtaccctgttcatggaggtgatgctaccacgagaggagctgtactgcccgcccatcacagttaaggtgatcgacaacaggcagttcggcagaagacctgtggtgggtcagtgtaccattcggagtctagagtcattcctttgcgatccctactctgctgaatcgcctagcccccagggtggcccagatgatgtaagtctgcttagcccaggggaagacgtgcttatcgacattgatgacaaagagcccctgattccaatccaggaagaggagtttattgattggtggtccaagttttttgcatcgatcggtgagcgggagaaatgcggcagttatctggaaaaggatttcgacaccctgaaagtttatgacacgcaactggagaacgtagaagcgttcgagggccttagcgacttctgtaacactttcaagttgtaccgcggtaagactcaggaagagaccgaggatcctagcgtaattggcgaatttaagggtctgttcaaaatttaccctcttcctgaggacccggccattccaatgcccccgcgtcaatttcatcaattggctgctcagggaccacaggaatgcttggtaagaatctatattgtacgcgccttcggtctgcaacctaaagatcctaatggcaaatgcgatccatacatcaaaatttcaataggtaagaagtccgtgagtgatcaggacaattacatcccctgtaccctcgagcccgtgttcggaaagatgtttgagctgacgtgtaccctgcccttggaaaaggacctaaagataaccttgtacgattatgacctgctgtctaaggatgagaaaataggtgagacggtcgttgatctcgaaaacagactgctctccaagtttggcgcccgctgcggactaccacagacctattgtgtcagcggaccgaatcaatggcgtgatcaattgcggccatcacagctcctgcacctgttttgccagcagcacagggtgaaagcccccgtgtaccgcaccgaccgggttatgttccaggacaaagaatattcaatcgaagaaatcgaagcaggacgcatacctaatccgcacctggggcccgtggaggagaggctggcccttcacgtgttgcagcaacaaggcctcgtgcccgaacacgtggagagcaggcccctctattcaccgctgcaacctgacattgaacaaggcaagctccaaatgtgggttgacttgtttcccaaagcactcgggcgccccggacctccatttaacattactccacggagagccaggcgcttctttctgcgctgtatcatttggaatactcgggacgtgattctggatgatttaagccttactggggagaaaatgagtgatatttacgtgaaaggttggatgattggctttgaggagcacaaacagaagaccgacgtgcactacagatcccttgggggagaggggaacttcaattggcggtttatctttccctttgattatctgcccgccgaacaggtttgcactatagcgaaaaaggacgcgttctggagactcgataagacagagagtaagatccctgcacgagtagtgttccagatctgggacaacgacaagttcagctttgacgattttctcggctcactccagttggatttgaatagaatgcccaagccagccaagaccgcaaagaagtgtagcttggatcagctggatgatgccttccaccccgagtggtttgtgtcacttttcgagcaaaaaactgtcaaaggatggtggccctgcgtcgcggaggagggcgaaaaaaagattttggctggcaaactggaaatgacactggaaattgtggcggaatctgaacatgaggagaggccagctggacagggccgggacgagccaaacatgaaccctaagctggaggacccaaggagaccggacaccagtttcctgtggttcacctcgccttataagaccatgaaattcattctctggcggaggtttcggtgggcaattatcctttttatcatactattcatcttgctcttgttccttgctatattcatctatgcgttccccaactacgccgctatgaagctggtcaaacccttctca

SEQ ID NO: 10653 - DNA, 6243 bp, synthetic construct
  misc_feature 1..6243: note = source = /note="Description of Artificial Sequence: Synthetic coding sequence"
  source 1..6243: mol_type = other DNA
atgctctgttgcctgctcgtgagagcctcaaaccttccttccgccaagaaagatagacggtccgatccagtggcatccctcacttttagaggagtgaagaagcggaccaaggtgatcaagaacagcgtgaaccctgtgtggaatgagggatttgaatgggacctcaagggaattcctctcgatcagggcagcgaacttcatgtggtggtgaaggaccatgagactatgggacgcaatcgctttctgggagaggccaaggtccctctgagagaagtcttggcaactccctccctttcggcctcctttaacgcgccacttctggatactaagaagcagcccaccggggcatccctcgtgctgcaagtgtcttacaccccactgccaggcgcggtccctctctttccaccaccaacccctctcgagccctcccctactcttcctgatctggatgtggtggcagacaccggcggtgaagaggacaccgaagatcaggggctgactggagatgaagcggaaccgtttctggatcagtcgggcggaccgggagcacctactactccccgcaaacttccatcacgccctccaccccattaccctggaatcaaaaggaaacggtcggctcctaccagccgaaaactgctgtcagacaagcctcaggattttcaaatcagagtccaagtcatcgaaggcagacaacttccaggggtgaacattaagcccgtcgtgaaggtgaccgcagcgggacagaccaagagaacccggatccataagggtaacagccctctgtttaatgagactctcttctttaacttgtttgatagcccgggcgagctgtttgatgaaccaatctttatcactgtggttgactcccgttcgcttcggaccgatgcgcttctcggtgaatttcgaatggacgtgggcactatatacagagaaccccggcatgcctaccttaggaagtggctgctcctgtctgatccagatgacttcagcgcaggggcgcgaggataccttaagacctcgctgtgtgttctcggtcccggtgacgaagcaccacttgagcgaaaggatccttcggaggataaggaggacatagaatcgaacttgcttcggcctacgggcgtggccctcagaggagcacacttctgcctgaaggtctttcgagcagaggatctcccgcagatggacgacgcagtcatggataacgtgaagcagatctttgggtttgagtccaacaagaagaacctggtcgatccttttgtggaagtgtcttttgccggtaagatgttgtgttccaagattctggaaaagactgccaacccgcaatggaaccagaacattacgctgcccgcgatgtttccttcaatgtgcgaaaagatgagaatcaggattattgactgggacagacttacccacaatgatattgtggcaaccacttacctctcgatgtcaaagatttcggcaccaggcggggaaatcgaggaagaaccggcgggtgcagtgaaaccctccaaggcgtccgatttggacgattaccttggattcctgcctacttttggaccctgttacatcaatctgtacggatccccgcgggaatttaccggttttcctgacccttacactgaactgaatactggaaaaggcgaaggtgtcgcatatagggggcgactgctgctgagcctcgaaaccaagctggttgaacactcagagcaaaaggtagaagatctgcctgccgacgatattctcagggtggagaagtacctccgtcgcaggaagtactcgctgttcgctgcattttactccgccaccatgttgcaagacgtggatgatgcaatccaattcgaagtgtccattggtaactacgggaataagttcgatatgacctgccttcccctcgcctcgactactcaatactcacgggccgtgtttgatggatgccattactactaccttccctggggaaatgtgaagccagtggtcgtcctttcgtcgtactgggaagatatttcgcatcggattgagactcagaaccagctccttggaatcgccgatagacttgaagccggactggaacaggtgcatctggccctgaaagcacaatgttccaccgaagatgtcgacagccttgtcgcccaactgaccgacgaactcattgcaggctgttcacaaccacttggagatatacatgaaaccccttcggcaactcacctcgaccagtatctttatcaattgaggacccatcacctctcacagataaccgaagcagctctcgcactgaaattgggacactcggaactgcccgctgcactggaacaggcagaggattggctgttgcgcctgcgcgctcttgcggaggaacctcaaaactcgctccctgacattgttatttggatgcttcagggtgacaagagagtggcttaccagcgggtgcctgctcaccaggtgctgttctcacgtagaggagcaaattactgtggaaaaaactgtggcaagctccagaccatttttctgaagtaccctatggaaaaagttcccggtgcaagaatgcccgtccaaattagggtcaaactgtggttcggcctgtccgtggatgaaaaagaattcaaccaattcgcagaaggaaagctgagcgtctttgcagaaacctatgaaaatgagactaaactggcactggtgggcaactggggaaccaccggtcttacctatcctaagttctcagatgtgacgggtaagattaaactgccaaaggatagcttcagaccctcggcgggatggacctgggcaggggattggttcgtgtgtcctgaaaagacccttctgcacgatatggatgcaggccacctgagctttgtggaagaagtctttgaaaaccaaaccagattgcctggtggtcaatggatctacatgtcggataactacacggatgtgaatggtgagaaagtgctgcctaaagacgacatagagtgtcccctcgggtggaagtgggaagatgaagagtggtcgactgatcttaacagggcagtggacgaacaagggtgggaatattcgattaccattccccctgagcgcaagccaaaacactgggtgccagcagagaagatgtactacacccaccgacgacggagatgggtcaggttgcgacggcgggacctgagccaaatggaggcgctgaagcgccaccggcaagcagaagcggaaggagagggatgggagtacgcatccctgtttggatggaagtttcatctcgagtacagaaagactgatgcgtttcgccggcgccgctggaggcgcaggatggaacctctcgaaaagacgggacctgccgcagtctttgcactcgaaggtgcactgggcggagtgatggacgataagagcgaggactcaatgagcgtctccactctttcgttcggcgtcaaccgcccgacgatttcgtgtatcttcgactacggtaataggtaccatcttagatgctacatgtaccaagcacgtgatctggccgccatggataaagatagcttctcggatccttacgcaattgtcagcttccttcatcagtcgcaaaagactgtggtggtcaagaacactcttaaccctacgtgggaccagactctcatattctacgaaattgagatctttggtgaacctgccactgtcgcagaacagcccccctccatcgtggtcgaactttacgatcacgatacctacggcgcagatgaattcatgggaaggtgcatttgtcagccttctctggaacggatgcctagacttgcgtggtttcctttgacccggggttcacagccatcgggggaacttcttgcatcgttcgagctcattcagagagagaagcccgccatccatcacattccaggttttgaggtccaagaaacctccaggatacttgacgagtcggaggacactgaccttccatatccgccgccacagcgcgaagcgaatatctacatggtgcctcaaaacatcaagcctgctcttcagcggactgccattgaaattcttgcgtggggacttcgtaatatgaagagctaccagcttgccaacatttcgtccccttcactggtggtggaatgtggagggcagactgtgcaaagctgcgttatcagaaatcttcgaaagaatcctaactttgatatctgcacgctgtttatggaagtgatgcttcctcgcgaagagttgtactgtcctcctattacggtgaaggtgatcgacaacaggcagtttggacgacggccagtggtcggacaatgtaccatcagatccctggagagctttctctgtgatccttactcggctgagtccccttcgcctcaaggtggtccagatgacgtgtccctgctgagccctggtgaggacgtcctgattgacatcgatgacaaagaacctttgatccctatccaagaggaagaattcattgactggtggtcgaagttttttgcaagcattggtgaaagggagaaatgcgggtcctaccttgagaaggattttgatactctgaaggtgtacgacactcagctggaaaacgtggaagcattcgaaggattgtccgatttttgtaatacctttaagctgtaccggggaaagactcaagaggaaaccgaagatccaagcgtgattggtgaattcaagggtctgtttaagatctaccctctccccgaagatcccgcgatccccatgcctcctagacaattccatcaactcgccgctcaaggaccgcaagagtgtctcgtgcgaatttacatagtccgcgcattcggacttcaaccaaaggatcctaatggtaaatgcgatccttacattaagatatccattggcaagaagagcgtcagcgaccaagataactacatcccctgtactctggagccggtgttcggaaagatgtttgaactgacctgtactctcccgctggaaaaagatctgaagataaccctgtacgactacgatctcctgtcgaaggatgagaagataggcgagactgtggtcgatctggaaaaccgcctgctcagcaagtttggcgcacgttgtggcctgccgcagacttactgcgtgtcgggccctaaccagtggcgagatcaactgcgccctagccagcttctccatctgttttgtcaacaacatagagttaaggcaccggtctaccggaccgacagagtgatgtttcaggataaggaatactcgatcgaggagatagaagcaggcagaattcccaaccctcaccttgggcccgtggaagaacgactggcacttcacgtccttcagcaacagggacttgtccccgagcatgtggaatcgcgacctctttatagcccattgcagccagatatagaacaaggaaagctccaaatgtgggtggacctgtttccaaaagcacttggtcgacccggtcctcctttcaacataacccctcggcgagcgcgccgcttctttttgcggtgcatcatttggaacacgagagatgttattctggacgacctgtcgctgaccggagagaaaatgtcagacatttacgtgaagggatggatgataggtttcgaagagcataagcaaaagaccgatgtgcattacaggagcctggggggagaaggtaacttcaattggcggtttatcttcccatttgattatctgccagcagaacaagtgtgtaccatagcgaagaaagatgcattttggcgtctggataaaaccgaaagcaagattcctgcaagagtggtgtttcaaatctgggataacgataagttttcgtttgatgactttttggggtcgcttcaacttgatttgaaccgcatgccaaagccggccaagactgccaagaaatgttccctggaccaacttgatgatgcgtttcatcctgaatggtttgtgtcactttttgaacaaaaaacggtgaaagggtggtggccgtgcgtggcagaggaaggagagaagaaaatcttggctggaaaacttgagatgacgctggagattgtggccgagtccgaacatgaagaaaggcctgcggggcaggggagagacgaaccaaacatgaatccaaagttggaagatccacgacggccggatacctccttcctttggttcacttccccctacaagacgatgaaattcattctttggagaaggtttagatgggcaataatcttgttcattattcttttcatcctcctgctttttcttgcaattttcatctacgcatttcctaattacgcagcgatgaaacttgtgaagccattcagc

SEQ ID NO: 10654 - DNA, 6243 bp, synthetic construct
  misc_feature 1..6243: note = source = /note="Description of Artificial Sequence: Synthetic coding sequence"
  source 1..6243: mol_type = other DNA
atgctgtgttgcctcctcgtgagagcttccaacttacctagtgctaagaaggatcgccggtctgatcccgttgctagtcttacgttcaggggagtcaagaagcggaccaaggtgatcaaaaattctgtaaaccctgtctggaatgagggcttcgaatgggatttgaagggcatccccctggaccaaggcagcgagctgcatgtggtggtcaaggaccacgagaccatgggacgtaatcgcttcctgggtgaggcaaaggtccccctacgagaggtcctcgctaccccctctctgagcgcttccttcaatgcgccacttctggacactaagaaacagcccacgggcgctagcctcgtcctccaggtgtcttacacccctctgcctggtgctgtgccactgttcccccctcctacaccgctggagcccagtcctacacttccagaccttgacgtagtggctgacaccggtggtgaagaggacaccgaagaccagggactgaccggcgatgaggccgagcccttcctggaccagtccggcggccccggcgcccctacgacgccccgaaagctaccctcgcggccccccccacactacccaggaatcaagaggaagagaagtgctccaacttccagaaagcttctgtcagacaagcctcaggatttccaaatacgcgtgcaggtgattgaagggcgccaacttccgggggtgaatatcaagcccgtggtaaaggtgaccgcggctggccagacaaaacggacacgcatccacaaagggaattccccgctgttcaatgagactctgttttttaacctcttcgattctcctggcgagctcttcgatgagcccattttcatcaccgtcgttgattcacggagcctgaggacagacgccctgctgggcgagtttaggatggatgtaggaacaatataccgtgagccaagacacgcgtacctaaggaagtggcttctgttgtcagaccccgacgacttcagtgccggtgccaggggatatttgaagacctctctctgcgtactcggtccgggcgatgaagcgcccctcgaacgcaaagacccgagcgaggacaaggaagatatcgagagtaaccttttgcgcccaacaggggtcgctctccgaggagcgcacttctgcctcaaagtcttcagggccgaagacttaccacagatggacgatgccgtgatggacaacgtaaagcagattttcggttttgaaagcaataagaagaacctggtggaccccttcgtggaagtgtccttcgcagggaagatgctctgcagcaagatcctggagaaaacagccaacccgcaatggaatcagaacatcacattgccggctatgtttcccagcatgtgtgaaaagatgagaatccgaatcatcgactgggacagactgacccataatgacatcgtcgccactacttatctttcaatgagtaaaatctcagcacctgggggagagatcgaggaggagcccgctggggccgtgaaaccatctaaggcttctgacctggatgactacctgggtttcctgcccaccttcggtccatgttacattaacctctacggaagtcccagggagtttaccggattccctgacccctataccgagctaaacacgggtaaaggcgaaggcgtcgcctacagggggagacttctgctgagcctggaaactaaactagtagagcatagtgagcaaaaggtggaggacctccctgcggatgatatcttgcgcgtagaaaaatacctgcgtcgtagaaagtatagcctctttgccgccttctattcagcgacaatgctgcaggacgttgacgatgccatccagtttgaggtctcaattgggaactacggcaacaagttcgatatgacgtgcctcccgctggcgtccacaactcagtatagcagagcggtctttgacggctgccactattattatttaccatggggtaacgtgaagcctgtggtagtcctctcttcctattgggaggatatctcccacagaatcgaaacccagaaccagctgctcggcatcgctgacaggctcgaggctggactcgagcaggtacacctggccctgaaggcgcaatgttctactgaggacgtggacagcttggtggcacagctcaccgacgagctcattgccggctgttcacagcctctgggtgacatccatgagaccccatctgctacacacttagaccagtacctttaccagctgcgaacgcaccacctttcacagatcacagaggcggcccttgccctcaagctgggtcattcagagttaccagcggcccttgaacaggccgaggattggttgttacggctgcgtgccctcgctgaagagccgcagaacagtcttcccgacatagtcatctggatgctgcagggcgacaagcgggtggcctaccagagggttccagcacaccaggttctcttctcccgtcgcggagcgaactactgtggtaagaattgtggcaaacttcaaactatctttcttaaatacccgatggagaaggtcccgggcgctagaatgcccgtgcaaatccgcgtgaaactgtggtttggtttaagcgtggacgagaaggagtttaatcagtttgctgaagggaagctgtcggtgtttgcggagacctacgaaaatgagaccaagttggcgctggtgggaaactggggaacaacgggcctcacctaccccaaattctccgacgtcacaggtaaaatcaagctaccaaaagacagtttccgtccctccgccggttggacgtgggcaggcgactggttcgtgtgcccagaaaaaaccttacttcatgacatggatgcggggcatctcagcttcgtggaggaagtcttcgagaaccagacccgtctgccaggtggacagtggatttacatgagtgataactacactgatgtgaatggggaaaaggtgctgccaaaagacgacattgagtgtccgttgggctggaaatgggaagacgaggaatggagtacggatcttaaccgggcagtcgatgaacagggatgggaatattccataacaatcccaccagaaagaaaacctaaacactgggtgcccgcagagaaaatgtactacacacacagacgaaggaggtgggtgagactcagacgaagggatctgtcacagatggaggccctgaagaggcaccgccaagccgaggccgaaggcgaagggtgggagtacgcatcactatttggctggaagtttcatctcgagtacagaaaaaccgacgcatttcgccggaggaggtggcgccgtcgtatggagcccctggaaaagacggggccggccgccgttttcgcactcgaaggagcccttggtggcgtgatggacgacaagtctgaagattccatgagcgtgtccactctgtctttcggcgtaaacaggcctacaatctcctgtatcttcgactacggaaacagataccaccttaggtgctatatgtatcaggcccgagatctggctgctatggacaaagactccttctcagatccctatgctatcgtgtcatttcttcaccagtcccagaaaactgtggtggtcaagaataccttaaaccccacttgggaccagacactcatcttttacgagatagagatcttcggcgagcccgccaccgtggctgagcaacccccatcaatcgtggtggaactgtacgaccatgatacttacggagcagacgagtttatgggcagatgcatttgccagcccagcctcgagagaatgcctcgactggcttggttccctctcactaggggatcccagccttccggtgagctgctggcctcattcgaactcattcagagagagaaacctgccatccaccatatccctggtttcgaggtccaggagacctcccgtatcctcgacgaaagcgaggacaccgatctgccataccctcctccccagcgcgaagccaacatctatatggtaccacaaaatatcaaacccgccttgcagcgcacggccatcgaaattctggcttggggactaagaaacatgaaatcttaccagctagccaacatctcaagtcctagcctggtcgtcgagtgtgggggtcagaccgtgcagtcttgtgtcatacgtaacctgaggaagaacccaaatttcgatatctgcaccctgtttatggaggtgatgttgccacgcgaggaactgtattgccctccaattaccgtgaaagtcatcgataatagacaatttgggagaaggcccgtggtgggacagtgtaccattcgaagtctagaaagtttcctttgcgacccgtactccgccgaatcgccatccccacagggcggtcctgacgatgtcagcctgttgagccctggtgaggacgtgttgatcgacatagacgacaaggagccacttattccgatccaggaggaggagttcatagattggtggtcaaagttcttcgctagcatcggcgagcgcgagaagtgcggcagctacctggagaaagacttcgacacactcaaagtttacgatacacagctggaaaacgtggaagccttcgagggactgtctgacttttgcaatacttttaaactctatcgaggtaaaacgcaggaggagaccgaggacccgagcgttataggcgaattcaaaggcctgtttaagatctacccgcttcccgaagaccccgccatccctatgccgcctaggcagttccaccagctcgccgcccaggggccccaggaatgcctggtgaggatctacattgttcgggcgttcgggctgcagccaaaagaccccaacggcaaatgcgacccctacattaaaatctccatcgggaagaaatcagtctccgaccaggacaattatattccttgcaccctggagcccgtattcggaaagatgtttgaactgacttgcaccctaccactggagaaggacttgaaaatcaccctgtatgattacgatctgcttagtaaggatgagaagatcggcgagaccgttgtggatcttgaaaacagactgctgagcaaattcggcgctcggtgtgggctcccccagacttactgtgtgagcgggcctaatcaatggagggatcagttgcggccgagccagctgctgcacttattctgccagcagcaccgggtcaaggcccctgtctatcggaccgacagagttatgttccaggataaagagtactcaatagaggaaattgaggctgggcggattcccaaccctcacctgggccctgtggaagaacggctggctctccacgttctgcagcagcagggtctggtgcctgagcacgtggagagtaggcccttgtacagccccctgcagccggacattgagcaagggaagttgcagatgtgggtcgacctgttccctaaagcattgggcaggccgggaccaccatttaatataacaccccgccgcgctcgcaggttttttctgcgttgtatcatctggaatacaagagacgtcatcctggatgacttaagcctgaccggggagaaaatgagtgatatctacgtgaaggggtggatgatcggcttcgaagagcataagcagaaaacagatgtgcactaccggagtttgggtggcgaggggaatttcaattggcgatttatcttcccgtttgactacctgcctgctgagcaggtgtgcactatagccaagaaggatgcgttctggagactggataagactgagtccaagattccagcccgagtcgttttccaaatctgggacaatgacaagttcagttttgacgattttctgggttccttgcaactggacttaaaccgcatgcccaagccagccaaaacagccaagaagtgcagcctggatcagcttgatgatgcgttccaccccgagtggttcgtgtcactcttcgagcagaagactgtaaagggctggtggccatgcgtggccgaagagggagagaaaaagatactggccggtaagctagagatgaccctcgagattgtcgccgagagcgagcatgaggaaaggcccgcaggacagggaagagatgagccaaacatgaaccccaaactggaggatccacgcagaccagacactagttttctgtggtttacatccccctacaaaaccatgaagtttatcttgtggcggagattccgctgggccatcatcctcttcatcatattgttcatacttctgcttttccttgctattttcatttatgctttccccaactatgcagctatgaaactcgtgaaacccttttcc

SEQ ID NO: 10655 - DNA, 6243 bp, synthetic construct
  misc_feature 1..6243: note = source = /note="Description of Artificial Sequence: Synthetic coding sequence"
  source 1..6243: mol_type = other DNA
atgttatgttgtttactagttcgtgcgtcgaatttaccgtcggcgaaaaaagatcgacgttcggatccggtagcgtcgttaacgtttcgaggtgttaaaaaacgaacgaaagttataaaaaattcggtaaatccggtttggaatgaaggttttgaatgggatttaaaaggtataccgctagatcaaggttcggaattacatgtagtagtaaaagatcatgaaacgatgggtcgaaatcgttttttaggtgaagcgaaagttccgttacgagaagtattagcgacgccgtcgttatcggcgtcgtttaatgcgccgttattagatacgaaaaaacaaccgacgggtgcgtcgttagtactacaagtatcgtatacgccgttaccgggtgcggtaccgctatttccgccgccgacgccgttagaaccgtcgccgacgctaccggatttagatgttgtagcggatacgggtggtgaagaagatacggaagatcaaggtttaacgggtgatgaagcggaaccgtttctagatcaatcgggtggtccgggtgcgccgacgacgccgcgtaaactaccgtcgcgaccgccgccgcattatccgggtataaaacgtaaacgttcggcgccgacgtcgcgtaaattactatcggataaaccgcaagattttcaaatacgtgtacaagtaatagaaggtcgacaattaccgggtgtaaatataaaaccggttgttaaagttacggcggcgggtcaaacgaaacgtacgcgtatacataaaggtaattcgccgttatttaatgaaacgctattttttaatctatttgattcgccgggtgaattatttgatgaaccgatatttataacggtagttgattcgcgatcgttacgaacggatgcgttactaggtgaatttcgaatggatgtaggtacgatatatcgtgaaccgcgtcatgcgtatctacgaaaatggttattactatcggatccggatgatttttcggcgggtgcgcgtggttatctaaaaacgtcgctatgtgtattaggtccgggtgatgaagcgccgttagaacgtaaagatccgtcggaagataaagaagatatagaatcgaatttactacgtccgacgggtgttgcgttacgaggtgcgcatttttgtttaaaagtttttcgtgcggaagatctaccgcaaatggatgatgcggtaatggataatgtaaaacaaatatttggttttgaatcgaataaaaaaaatttagtagatccgtttgtagaagtatcgtttgcgggtaaaatgttatgttcgaaaatattagaaaaaacggcgaatccgcaatggaatcaaaatataacgttaccggcgatgtttccgtcgatgtgtgaaaaaatgcgtatacgaataatagattgggatcgtctaacgcataatgatatagtagcgacgacgtatttatcgatgtcgaaaatatcggcgccgggtggtgaaatagaagaagaaccggcgggtgcggttaaaccgtcgaaagcgtcggatctagatgattatttaggttttttaccgacgtttggtccgtgttatataaatttatatggttcgccgcgagaatttacgggttttccggatccgtatacggaattaaatacgggtaaaggtgaaggtgtagcgtatcgtggtcgtttactattatcgttagaaacgaaattagttgaacattcggaacaaaaagttgaagatttaccggcggatgatatattacgtgtagaaaaatatctacgacgtcgtaaatattcgctatttgcggcgttttattcggcgacgatgttacaagatgttgatgatgcgatacaatttgaagtatcgataggtaattatggtaataaatttgatatgacgtgtttaccgctagcgtcgacgacgcaatattcgcgagcggtttttgatggttgtcattattattatttaccgtggggtaatgtaaaaccggttgtagttttatcgtcgtattgggaagatatatcgcatcgaatagaaacgcaaaatcaactactaggtatagcggatcgactagaagcgggtttagaacaagtacatttagcgttaaaagcgcaatgttcgacggaagatgttgattcgctagttgcgcaattaacggatgaactaatagcgggttgttcgcaaccgttaggtgatatacatgaaacgccgtcggcgacgcatctagatcaatatttatatcaactacgtacgcatcatctatcgcaaataacggaagcggcgctagcgctaaaattaggtcattcggaattaccggcggcgttagaacaagcggaagattggctattacgattacgtgcgttagcggaagaaccgcaaaattcgttaccggatatagttatatggatgttacaaggtgataaacgagttgcgtatcaacgagtaccggcgcatcaagtattattttcgcgtcgtggtgcgaattattgtggtaaaaattgtggtaaattacaaacgatatttctaaaatatccgatggaaaaagtaccgggtgcgcgaatgccggttcaaatacgtgtaaaactatggtttggtctatcggttgatgaaaaagaatttaatcaatttgcggaaggtaaactatcggtatttgcggaaacgtatgaaaatgaaacgaaactagcgttagttggtaattggggtacgacgggtttaacgtatccgaaattttcggatgtaacgggtaaaataaaactaccgaaagattcgtttcgtccgtcggcgggttggacgtgggcgggtgattggtttgtttgtccggaaaaaacgttactacatgatatggatgcgggtcatttatcgtttgttgaagaagtatttgaaaatcaaacgcgattaccgggtggtcaatggatatatatgtcggataattatacggatgtaaatggtgaaaaagtactaccgaaagatgatatagaatgtccgctaggttggaaatgggaagatgaagaatggtcgacggatttaaatcgtgcggtagatgaacaaggttgggaatattcgataacgataccgccggaacgtaaaccgaaacattgggttccggcggaaaaaatgtattatacgcatcgtcgtcgtcgttgggttcgattacgtcgtcgtgatttatcgcaaatggaagcgctaaaacgtcatcgacaagcggaagcggaaggtgaaggttgggaatatgcgtcgctatttggttggaaatttcatttagaatatcgtaaaacggatgcgtttcgacgacgtcgatggcgtcgtcgtatggaaccgctagaaaaaacgggtccggcggcggtatttgcgttagaaggtgcgttaggtggtgttatggatgataaatcggaagattcgatgtcggtatcgacgttatcgtttggtgttaatcgaccgacgatatcgtgtatatttgattatggtaatcgttatcatctacgttgttatatgtatcaagcgcgagatttagcggcgatggataaagattcgttttcggatccgtatgcgatagtatcgtttttacatcaatcgcaaaaaacggtagtagtaaaaaatacgctaaatccgacgtgggatcaaacgctaatattttatgaaatagaaatatttggtgaaccggcgacggtagcggaacaaccgccgtcgatagttgtagaattatatgatcatgatacgtatggtgcggatgaatttatgggtcgttgtatatgtcaaccgtcgttagaacgtatgccgcgtctagcgtggtttccgctaacgcgaggttcgcaaccgtcgggtgaactactagcgtcgtttgaattaatacaacgtgaaaaaccggcgatacatcatataccgggttttgaagtacaagaaacgtcgcgtatactagatgaatcggaagatacggatttaccgtatccgccgccgcaacgtgaagcgaatatatatatggttccgcaaaatataaaaccggcgttacaacgaacggcgatagaaatattagcgtggggtttacgtaatatgaaatcgtatcaattagcgaatatatcgtcgccgtcgttagtagttgaatgtggtggtcaaacggtacaatcgtgtgttatacgtaatctacgtaaaaatccgaattttgatatatgtacgctatttatggaagtaatgttaccgcgagaagaattatattgtccgccgataacggtaaaagttatagataatcgtcaatttggtcgtcgtccggttgtaggtcaatgtacgatacgttcgctagaatcgtttttatgtgatccgtattcggcggaatcgccgtcgccgcaaggtggtccggatgatgtttcgttattatcgccgggtgaagatgtattaatagatatagatgataaagaaccgttaataccgatacaagaagaagaatttatagattggtggtcgaaattttttgcgtcgataggtgaacgtgaaaaatgtggttcgtatctagaaaaagattttgatacgttaaaagtttatgatacgcaactagaaaatgtagaagcgtttgaaggtttatcggatttttgtaatacgtttaaattatatcgtggtaaaacgcaagaagaaacggaagatccgtcggtaataggtgaatttaaaggtctatttaaaatatatccgctaccggaagatccggcgataccgatgccgccgcgacaatttcatcaattagcggcgcaaggtccgcaagaatgtttagtacgaatatatatagtacgtgcgtttggtttacaaccgaaagatccgaatggtaaatgtgatccgtatataaaaatatcgataggtaaaaaatcggtatcggatcaagataattatataccgtgtacgttagaaccggtatttggtaaaatgtttgaactaacgtgtacgctaccgctagaaaaagatctaaaaataacgctatatgattatgatttactatcgaaagatgaaaaaataggtgaaacggttgtagatttagaaaatcgtttattatcgaaatttggtgcgcgttgtggtttaccgcaaacgtattgtgtttcgggtccgaatcaatggcgtgatcaattacgaccgtcgcaattactacatctattttgtcaacaacatcgagtaaaagcgccggtatatcgaacggatcgagtaatgtttcaagataaagaatattcgatagaagaaatagaagcgggtcgaataccgaatccgcatctaggtccggtagaagaacgattagcgctacatgtactacaacaacaaggtctagtaccggaacatgttgaatcgcgtccgctatattcgccgttacaaccggatatagaacaaggtaaattacaaatgtgggtagatttatttccgaaagcgttaggtcgtccgggtccgccgtttaatataacgccgcgtcgtgcgcgacgtttttttctacgttgtataatatggaatacgcgtgatgttatattagatgatttatcgttaacgggtgaaaaaatgtcggatatatatgttaaaggttggatgataggttttgaagaacataaacaaaaaacggatgtacattatcgttcgctaggtggtgaaggtaattttaattggcgttttatatttccgtttgattatttaccggcggaacaagtatgtacgatagcgaaaaaagatgcgttttggcgattagataaaacggaatcgaaaataccggcgcgagtagtatttcaaatatgggataatgataaattttcgtttgatgattttttaggttcgctacaactagatttaaatcgaatgccgaaaccggcgaaaacggcgaaaaaatgttcgttagatcaactagatgatgcgtttcatccggaatggtttgtatcgctatttgaacaaaaaacggttaaaggttggtggccgtgtgtagcggaagaaggtgaaaaaaaaatactagcgggtaaattagaaatgacgttagaaatagttgcggaatcggaacatgaagaacgtccggcgggtcaaggtcgtgatgaaccgaatatgaatccgaaattagaagatccgcgacgaccggatacgtcgtttctatggtttacgtcgccgtataaaacgatgaaatttatattatggcgtcgatttcgttgggcgataatattatttataatactatttatactactattatttctagcgatatttatatatgcgtttccgaattatgcggcgatgaaattagttaaaccgttttcg

SEQ ID NO: 10656 - DNA, 6243 bp, synthetic construct
  misc_feature 1..6243: note = source = /note="Description of Artificial Sequence: Synthetic coding sequence"
  source 1..6243: mol_type = other DNA
atgctttgctgtttgcttgtgagagcgtcgaatttgccctcggcaaaaaaggaccggcggtccgatcccgtcgcctcacttacgtttcgcggagtgaagaagcggactaaggtcatcaagaactcagtgaacccggtgtggaacgagggatttgagtgggacttgaaaggtataccactggaccagggttcagaactccatgtggtggtgaaagatcacgaaacgatgggaaggaacaggtttctgggagaagcaaaggtgccactgcgagaagtgctggccactccttcgcttagtgcatcattcaacgcacctcttctggataccaagaaacagccaaccggcgcatcgttggtcctgcaggtgtcgtacactcctcttcctggtgccgtgcccttgttccctcctccaactcctcttgaacctagcccgaccctcccagacctggatgtggtcgcggacaccggaggggaagaggacaccgaggatcaaggacttactggggatgaggcagaaccatttttggatcagtcgggtggtcccggagcacctactacgccgcgtaaacttccatcgcgaccccctccacattatccgggaatcaagagaaagcgctctgcacctacttcgcggaagctcctgtccgacaagccacaggattttcaaattagggtccaagttattgagggacgccaactgccgggcgtcaacattaagccagtcgtcaaggtcaccgcggctgggcagaccaagcggacgcgtatacataagggtaattctcctctctttaatgaaaccctgtttttcaatctcttcgacagccctggcgaactttttgacgaaccaattttcattaccgtggtggattctaggagccttcgcactgacgccctcctcggtgagttcagaatggacgtgggcaccatttaccgggaaccccgccatgcctacctgcgaaagtggctgctgctgtccgatcccgacgatttttccgcaggggcaagggggtaccttaagacttcgctgtgtgtgctggggccaggcgacgaagcacccctcgagcgcaaggacccaagcgaagataaggaagatatcgagtccaatctccttcgccctactggcgtcgcacttcgcggtgcccatttctgcctgaaggtgttccgcgcggaggatcttccacaaatggatgatgcagtcatggataatgtcaagcaaatcttcggttttgaaagcaataagaaaaatctggtggatccctttgtggaggtgtccttcgcgggcaaaatgctgtgttccaagattctggaaaagaccgcaaacccacaatggaaccaaaacattactctcccggcgatgtttccttcgatgtgcgaaaagatgaggatcaggattatcgattgggatagactgacccataatgatatcgtggccaccacttacctctcaatgtcaaaaatctcggcccctggcggcgaaattgaagaggaaccggctggtgcagtgaagccttccaaagccagcgacctggatgattaccttggatttctccctaccttcggaccctgctacatcaatctgtacggaagtcctcgagaatttaccggatttcctgatccatacaccgagttgaacactggaaagggtgagggtgtggcataccgtggtcgactgttgctctctctggaaacgaagctggtggaacactccgaacaaaaggtcgaggatcttcctgcagatgatatcctcagagtcgagaaatacctgagacgacgcaaatacagcctcttcgcagcgttttactcggcgactatgcttcaagatgtcgatgatgctatacagttcgaagtgtccatcggaaattacgggaacaaatttgatatgacctgtctgccacttgcctcaaccactcagtactcgcgcgcagtatttgacgggtgtcattactactacctcccttggggtaacgtgaagcctgtggtcgtgctgagctcctactgggaggacatctcacatagaattgaaacgcaaaaccagttgcttggtattgccgatcgtctggaggcaggacttgagcaagttcatctcgcactgaaggcacagtgttcgactgaggacgtggattcgctcgtggctcagctgaccgacgagttgatcgccggctgtagccaaccccttggtgatatccatgaaaccccttccgctacgcacctcgaccaatacttgtaccagcttagaacccaccatctgagccaaatcaccgaagccgcacttgcgctgaaattgggacactccgaactgccagcagccctcgaacaggcggaagattggctgcttcgacttcgcgcactggctgaagagcctcaaaactcgcttcctgacattgtaatctggatgcttcaaggtgataagcgggtggcatatcagcgggtgcctgctcaccaggtgctttttagccggcgcggagcaaactactgtggaaaaaactgcgggaaacttcagaccatttttctgaaatacccgatggaaaaggtgcctggtgctagaatgcccgttcagattcgtgtgaaactctggttcggccttagcgtggatgagaaggaattcaaccagtttgcagaaggtaaactttccgtatttgccgaaacttacgagaatgaaaccaagctggcacttgttggtaactggggaacgaccgggctgacctacccaaaattctcagatgtgacgggcaaaatcaaactccctaaggatagctttaggccgtccgccggatggacttgggcaggagattggtttgtgtgtccagagaaaacccttcttcacgacatggatgcaggtcatttgtcattcgtggaagaagtatttgagaaccaaactagactgcccggtggacagtggatttacatgagcgataactacaccgacgttaacggggaaaaggttcttccaaaggacgatatcgagtgtccccttggatggaaatgggaggacgaagagtggagcaccgatcttaacagagcagtcgatgaacagggatgggagtacagcataaccattcccccagagcgcaaacctaagcattgggtgccagcggaaaagatgtactacactcaccgcaggcggcgatgggtgcggctgcggagaagagacttgtcacaaatggaagcactcaaacgccatcgacaggcagaagcagagggcgaaggttgggagtacgcatccctgttcggttggaaatttcacctcgaatacagaaagactgacgcctttaggagacgtaggtggcggagaagaatggaaccccttgaaaaaactggacctgcggctgtgttcgcccttgagggagcactgggaggtgtgatggacgataagtcagaagatagcatgtcagtatccaccctgtcgtttggcgtcaacagacccactatctcctgtattttcgattatggtaatagataccacctgagatgttacatgtatcaggcacgggatctggccgcaatggacaaggattccttctcagatccatacgcgattgtttcattcctccatcaatcccaaaagaccgtcgtagtcaaaaacaccctcaacccaacgtgggaccagactctgatattctatgaaatagagatcttcggggaaccagccactgttgcggagcaaccaccaagcatcgtggtggagctttacgaccatgatacgtacggggcagatgagttcatgggacgctgtatttgccaaccatcgctggaaagaatgcctagactggcctggtttccactgactcggggctcgcagccttccggagaactgctggcgtcattcgaactcatccagagggaaaagcctgctattcaccatattcctgggtttgaagtgcaggagacttcccggattctggacgagtccgaagataccgatctgccatacccccctcctcagagggaagcgaacatctacatggtgcctcagaatatcaagcctgctcttcaaagaaccgcaatagagattcttgcatggggtcttaggaacatgaagtcgtaccaacttgcaaatatctcttcgccctcgctcgtggtcgaatgcggaggccagactgtccagagctgtgtgatacgcaaccttcggaagaaccctaactttgatatttgcactttgtttatggaagtgatgcttcctagagaagagctgtactgtcctcctattactgtgaaagtgattgacaatcggcaatttggccgccgtcctgtcgtgggccaatgcactatcaggtctttggaatcctttctttgtgatccatactctgctgagtccccctccccacaggggggacccgatgacgtgtcgcttctctcgcctggagaggacgtgctcattgatattgacgataaggaaccactcattcccattcaagaagaagagtttatcgattggtggtcgaagttttttgcatcaataggtgaacgggaaaagtgtggtagctatcttgagaaagattttgataccctgaaagtgtacgatactcaattggaaaacgtcgaggcctttgagggactctccgatttttgcaacacgtttaagctgtaccgcggaaagacccaagaagagactgaggatccgtcagtgataggcgagtttaagggattgtttaagatttacccactgccagaagatcccgcaatcccaatgcccccacgccaatttcaccagcttgctgcacagggtccccaggaatgcctcgtcaggatatacattgtgcgagcattcggactccagcctaaggaccccaacggaaagtgtgacccatacattaagattagcatcggcaagaaaagcgtgtcagaccaagacaactacatcccttgtactctggaacctgtctttggtaaaatgtttgagctgacctgtactctgccactggaaaaggaccttaagatcactctctacgactacgatctgttgtccaaggatgagaagatcggggaaaccgtcgtcgatctggaaaatagacttctgtcgaaatttggtgcaagatgtggactgccccaaacgtattgtgtgtccggtccaaaccaatggagagatcaacttaggccttcccagttgctgcaccttttttgccaacaacatcgcgtgaaggcacctgtctacaggactgaccgagtgatgtttcaagacaaggaatactcgattgaagaaattgaagccggacggattccgaaccctcatctcgggccagtggaagaaagactggcccttcatgtcctccagcaacagggactggtgccggagcatgtggaaagccggcctctgtattcacctcttcaaccggatattgaacagggaaagctgcaaatgtgggtcgatctgttcccaaaggccttgggccgccccggacccccttttaacattacccctagacgcgcacggaggttctttctccgctgcatcatatggaataccagagatgtgatccttgacgatctttctctgaccggagaaaagatgtcggacatttatgtgaagggctggatgatcgggtttgaagaacataagcaaaagaccgacgtgcactaccgtagcctgggaggagagggaaactttaactggagattcatctttccattcgattacctgccggccgaacaggtatgtacgattgcaaagaaagatgcattttggcgcctcgataagactgaatctaagattcccgcgcgagtggtgtttcaaatttgggataatgacaagttctcatttgacgatttcctcggttcgcttcaattggatcttaataggatgccaaaaccggcgaaaaccgcaaagaagtgttccctggatcaactcgatgatgcatttcatccagaatggttcgtgtcactgtttgaacaaaagactgtgaagggatggtggccttgcgtggccgaggaaggagaaaagaagattctcgcaggtaaattggaaatgaccttggaaatagtcgcagaaagcgagcacgaagaacgtcctgcagggcaaggaagagacgaaccaaatatgaatccaaagctggaggaccccagacgaccagacacctcctttctctggtttacctcgccctacaagaccatgaagtttattctgtggagaagattcagatgggcaatcatactgttcattatcctgttcattctcctcctttttctcgccattttcatttacgctttcccgaattacgcagccatgaagttggtcaaacctttctcg

SEQ ID NO: 10657 - DNA, 6243 bp, synthetic construct
  misc_feature 1..6243: note = source = /note="Description of Artificial Sequence: Synthetic coding sequence"
  source 1..6243: mol_type = other DNA
atgctgtgctgcttgctcgtgagggcttccaatcttccatcagctaagaaggatcgtcgctccgacccagtcgctagcctgacgtttcgcggcgtaaagaaaaggactaaagtgatcaagaacagcgtcaatccagtctggaatgaaggatttgagtgggatctgaagggcattcctctggaccagggatccgaactgcatgtcgtggtgaaggaccacgaaaccatgggacgaaaccgcttcctcggagaggctaaagttccactgcgcgaagtgctcgctactccaagcctgtccgcaagctttaatgctcctcttttggatactaaaaagcagccaacgggcgccagtctggtccttcaggtcagctacactcctcttccaggggcagtgcccctgtttcctccccctacacccctggaacccagccccacactgccagacttggatgtcgttgcagacactggcggtgaagaagacaccgaggaccagggactgacaggcgatgaagctgagccattcctcgaccagagcggaggaccaggggcccctacgaccccgaggaagcttccttcacggccccctccccattaccccgggatcaagaggaagagatctgcgcctacaagtaggaaactactcagcgacaaaccccaagacttccagatcagagtccaagtcatcgaggggagacagctgccaggcgtaaacattaaacccgtcgtcaaggtgacagcagcagggcagaccaagaggaccaggatacacaagggcaatagccctctgtttaatgagaccctcttttttaacctctttgattctccaggagagctttttgatgagcccatctttatcacagtggtggactcccgctctctgagaaccgatgcacttctcggagaatttaggatggacgttggaaccatctacagagaacctcgccacgcgtacctcagaaaatggttgcttttaagtgaccccgacgattttagtgccggagcaaggggctatttaaagacatcactgtgtgttttaggacccggcgatgaggctccattggaaaggaaagacccctccgaggataaagaagatatcgaaagcaacctgctccgcccaacaggggtggcacttaggggggctcacttctgtctgaaagtctttagagccgaggatctcccccagatggacgatgccgttatggataacgtcaagcagatattcggatttgaaagtaacaagaaaaatctggttgatccctttgtggaagtttctttcgccggaaaaatgttgtgttcaaagatcttagaaaagactgctaatcctcagtggaaccagaacatcaccctgcctgccatgtttccttccatgtgtgagaaaatgcgcatcaggatcatagactgggataggctaacccacaacgatattgttgctaccacatacctgtcgatgagcaagatctccgcacccggaggggagatcgaagaagaaccagctggtgctgtgaagccaagcaaggcaagcgacctggatgactacctagggtttttaccaacgttcggaccatgttatatcaacctttatgggagtcctagggagttcactggcttccctgacccctatactgagctcaacaccggcaagggcgagggggtggcctaccgcggcagattgttgcttagcctggagactaaactggtggagcattctgagcagaaagttgaagatctgccagccgacgacattctgcgcgtggaaaaatacctgcggcggagaaaatactcactgtttgctgcattctactcagcaacaatgctacaggatgtcgacgacgccatacagtttgaagtatccatcggtaactatggaaacaaattcgacatgacctgcctcccccttgcgtcaaccacccaatactcacgggccgtgttcgacggatgtcactattactacctgccctggggcaacgtgaaacctgtggttgtcctgagcagctactgggaggatatcagccacaggatcgagacccaaaatcaactgttgggcatcgccgacagactggaggctggtctggaacaggtacatctcgccctgaaagctcagtgtagcaccgaagatgtcgacagcctggtggctcagctcaccgatgagcttatcgcaggttgcagccagcctttgggcgacatccacgaaactccatctgctactcacctagatcagtatctgtatcagttgagaactcatcacttgtcgcagataactgaagccgctctggcgctgaaactgggacattcagaattgcctgcggcactggagcaagcggaagactggttgctccggctgcgcgcattggctgaagaaccccaaaacagcttgccagatatcgtgatttggatgctgcagggagataagcgcgtcgcatatcaaagagtgcctgctcatcaggtgctcttcagcaggcgtggagcaaactactgcggaaaaaactgcggaaagctacaaacaatttttctcaaatacccaatggaaaaggtgcccggagcaagaatgcccgttcagatcagggtgaaactgtggtttggcctgtcagtagacgagaaagaatttaatcagtttgccgagggaaaactctccgtctttgctgaaacttacgaaaatgaaaccaagctcgcactggtgggaaactgggggacaaccggcctcacatatcccaagtttagcgatgtaaccggaaaaatcaaactccccaaggacagcttccgcccttccgcagggtggacctgggccggcgactggttcgtctgccctgaaaaaactcttcttcacgacatggacgctggccatctcagttttgtggaagaggtctttgaaaatcagacccggcttcctggaggacaatggatatacatgagcgataactacaccgacgttaatggcgagaaggtcctccccaaagatgatatcgagtgcccactgggctggaagtgggaagatgaagagtggtccacagatctgaatagggccgttgacgaacagggatgggagtacagcataacaattccgcccgaaaggaagcccaaacattgggtgcccgccgagaaaatgtattacacgcacagacggaggaggtgggtaagactgaggagaagggatctgtctcagatggaagccttgaagaggcaccgtcaggcagaagctgaaggcgaagggtgggagtatgctagtctcttcggatggaaattccatctggagtatagaaaaacagacgcattccgccgcaggaggtggagaagaaggatggagccactggagaagactggccccgccgctgtcttcgctctcgaaggagccttgggtggcgtcatggacgacaaatctgaagactctatgtctgtcagcacacttagtttcggagtcaaccgccctaccatcagttgcatttttgactatggaaacaggtaccacctgaggtgttacatgtatcaagcaagggatttggccgcgatggacaaagactctttcagcgacccttacgctattgtgagctttctgcatcaatcacaaaagacagttgttgttaagaacaccctcaacccaacctgggatcagactctgatcttctacgagatcgagatcttcggtgaacccgctactgtcgcagagcagcctcctagcattgtggttgaactttacgatcacgacacttatggcgccgatgagtttatgggtagatgcatctgccagcccagcctggaacgcatgcctagactggcctggttcccactcacgaggggaagtcagccaagcggcgaattgctggcgagtttcgaattgatccaaagagagaaaccagcaatccaccacatcccaggattcgaggtccaggaaacaagccgaatccttgatgagagcgaggacaccgatctgccatacccaccaccacagcgagaagctaacatctacatggtgccacagaatatcaagcccgctctgcaaaggaccgcaatagagattctggcatgggggctgaggaacatgaaaagttaccaactggcaaatatcagtagcccaagcctggtcgtggaatgcggcggccagaccgttcaaagctgtgtcatacgcaacctgcggaagaaccccaacttcgacatatgcactctgttcatggaggtcatgttgcctcgtgaggaactgtattgcccccctatcacagttaaagtgattgataatcgacagtttggcaggcgcccagtcgtaggccaatgcaccatccgtagcttagagtcttttctttgcgacccatacagcgccgagtccccaagcccacagggcggacctgatgatgtgtctctcctttcacctggagaggatgtgctcatcgatatcgacgataaggagcctctcataccaattcaggaggaagagtttattgattggtggagtaagttcttcgcttctatcggagagagggagaagtgtggttcctacctggaaaaggattttgacaccctgaaagtttacgacactcaactggaaaacgttgaagcttttgaaggtctttctgacttttgtaacacttttaagctgtacagaggcaaaacacaggaagaaactgaggatccgtccgtgatcggagaattcaaggggttatttaagatctatcctctcccagaggatcccgctatcccgatgccacccagacagtttcaccaactggccgcacaaggcccccaagaatgcttggtcaggatctacatcgtgcgtgcattcggcctccaacccaaggatccaaacggtaagtgtgacccatatattaaaatctctatcggcaaaaagagcgtgtcggatcaggataactacataccttgcaccctggaaccagtctttggaaagatgttcgagctgacatgcactctgccgcttgaaaaggacctgaaaataaccctatacgattacgacctcctgtctaaggatgagaaaatcggcgagaccgttgtggatctcgaaaacagactcctgtctaagtttggcgcaaggtgtggtctaccgcaaacctactgtgttagcgggcccaaccaatggcgcgaccagctgaggcccagccagcttttacaccttttttgtcagcagcaccgcgtgaaagctccagtgtacagaacagacagagttatgtttcaggataaagagtacagtattgaggaaatcgaagcaggcaggatccccaatccacatctgggccctgttgaagagagactggccctgcacgtgctccagcagcagggtctggtccctgagcacgtggaatccagacccctgtacagccctctgcagccagatatcgagcagggaaaattacagatgtgggtcgacctttttccaaaagccctcggtagacctgggcctcccttcaatatcacaccaaggcgcgctcgtcgttttttccttcgctgcattatctggaacactagggacgtgatcctggatgatctcagcctcaccggggagaagatgagcgatatctacgtgaagggatggatgatcgggttcgaggaacacaagcaaaagaccgatgtacattaccgcagcctgggaggcgaaggtaattttaactggcgttttatctttcctttcgattatctgcccgcagaacaggtatgcaccatcgctaaaaaggatgctttctggcgtttggataaaactgaatccaagatccctgccagggtagtcttccagatctgggacaatgataaatttagcttcgacgacttcctgggatctttgcagctggacctgaatcgcatgcccaaaccagcgaagaccgcaaagaaatgctccctcgaccaactggacgatgctttccatccagaatggttcgtgagcctgttcgagcagaaaacagtcaagggttggtggccatgcgtggctgaagaaggcgagaagaaaatactggctgggaagctagagatgacactcgagatcgtagccgaaagcgaacatgaggaacgtcccgccggacaaggaagggatgagccgaacatgaaccccaagctggaggacccaagacggccagatacatcttttctatggtttacgagtccgtacaagaccatgaaatttatcctgtggaggcggttccggtgggctatcatcctctttatcatcttgttcatcctgctcctgtttttggcaatcttcatctacgccttcccgaattacgccgctatgaaactggtgaagcctttttca

SEQ ID NO: 10658 - DNA, 6243 bp, synthetic construct
  misc_feature 1..6243: note = source = /note="Description of Artificial Sequence: Synthetic coding sequence"
  source 1..6243: mol_type = other DNA
atgttgtgttgtttgctcgttcgagctagtaatttacctagtgctaaaaaagaccgccgatccgacccagttgcttcattgacctttaggggcgttaaaaagcggactaaagtaatcaaaaatagcgtaaatcctgtctggaacgaaggtttcgagtgggatctaaagggaattcctcttgatcaaggaagcgagctccacgttgttgttaaggatcacgaaacgatgggtcggaaccggttccttggagaagctaaggtacctttgagggaggtcttggccactcctagtctatcggcttcgtttaatgccccattgcttgacactaaaaagcaacctaccggggcttccctggttcttcaagtatcctacacacccctaccaggagcagtccctttgtttccgcctccgactccacttgaaccatcgcccacattacctgatcttgatgttgttgccgacacaggtggtgaagaagatactgaagatcagggactcacaggagatgaagctgaacccttcttagatcaatctggaggacctggagcccccaccactccccgtaagctcccttcacggccaccccctcactatcctggaattaaacgaaagagatcagctcccacttctagaaaattgttgtcagataagcctcaagacttccaaatcagggtgcaggttatcgagggtcgtcaacttccaggggtgaacattaaacctgtcgtgaaggtcacagctgcaggccagacaaagagaacccgcattcataaaggtaattcccctcttttcaatgagacacttttctttaacctattcgattctccaggcgaattattcgacgagccgatatttatcacggtggttgattcgcgctctcttagaaccgatgctctccttggggaattccgtatggatgttggtacaatataccgagaacctagacacgcctatttgagaaagtggctattactttcagatcctgacgatttttcggccggagctcggggttacctaaagactagcttgtgtgttctaggtccaggtgacgaggccccattagagcgcaaagatcccagtgaagataaagaagatatcgagagtaatttattgagaccaacgggtgttgcattaaggggcgctcatttctgccttaaagtttttcgcgcagaagatcttccacaaatggatgatgctgtcatggacaacgttaagcaaatcttcggattcgaatccaataaaaagaacctcgttgatccgtttgttgaggtctccttcgcaggaaaaatgttgtgttccaagattctggagaaaactgctaaccctcagtggaatcagaatattactttacctgccatgtttccttccatgtgtgaaaaaatgaggattcgcatcattgactgggaccgacttacccacaatgacatcgtggccaccacatatctatccatgagcaaaattagcgcacctggtggtgagattgaggaagagcctgcaggtgccgttaaaccatctaaagcttctgatttggatgactacctaggtttcctcccaacattcggtccttgctatataaatctgtatgggtcaccgcgtgagtttacagggttccctgacccttatactgaactgaatacaggtaaaggggagggggtggcctataggggtcgtttactcttatcccttgagactaagctcgtcgaacactcggaacagaaagttgaagatctcccggctgacgacattctgcgtgtagaaaagtatctgcgcagaaggaagtactctcttttcgcagctttctatagcgctacaatgctccaagatgtggatgatgccattcaatttgaagtttcaataggtaattacggaaataaattcgacatgacgtgtcttcccttggcctcgacaacccagtattcaagagccgtttttgatgggtgccattattattatcttccatgggggaatgttaaacccgttgtggtcctgagttcttattgggaggatatttcacaccgtattgagacacagaatcagttgctggggattgccgacagattagaagctgggcttgaacaggtccatttggcgcttaaagctcaatgctctacagaagatgtggacagcttggttgctcaacttactgacgaattgatagcaggctgctctcagcctctaggagatatacatgaaaccccatctgcaacccacttagatcaatacctgtatcaattgcgtacgcaccatctctctcaaatcaccgaagctgccttggctcttaaattaggtcattcagaacttcccgcagcactcgagcaggctgaggactggctcctcaggctaagagcacttgccgaggagcctcaaaatagtttaccagatatcgtcatttggatgctacaaggagataaaagggtggcttatcagagggtgcccgcgcatcaggtccttttttcgagaaggggagcaaattactgcggaaaaaattgcggtaagttacaaacaatcttccttaaatatcctatggaaaaggttccgggtgcaaggatgcccgtccagattcgcgtcaagctttggttcggtctttcggttgacgaaaaagagtttaaccagttcgctgagggtaaattgtcagtatttgctgagacctacgaaaatgagaccaagctggctctagtgggaaattggggaactaccgggcttacttatcctaaattctcagatgtgactggtaagattaaattacctaaggattctttccgacccagcgccggttggacttgggcgggagattggttcgtgtgtcctgaaaagacattacttcacgatatggatgccgggcatttgtcattcgtggaagaagtttttgagaatcagacccgtcttccaggtggccaatggatctacatgagtgacaactacactgatgtgaacggagaaaaagtgctcccaaaggatgatattgaatgtcctcttggatggaaatgggaggatgaagaatggtctaccgacctgaatcgagctgtggacgaacagggttgggaatactccattactatacctcctgagcgaaagccgaaacattgggtgccagcagagaaaatgtactatacgcatcgtcgtagacgctgggtcaggcttagaagacgagatttgagtcagatggaagcccttaaacggcacaggcaagctgaggctgaaggggagggatgggaatacgcgagtctcttcgggtggaagtttcatttggagtataggaagactgatgcttttagaaggaggcggtggagaaggcggatggagccattggaaaaaacaggacctgccgctgtgtttgctctggaaggtgccctgggaggtgtgatggatgacaaatcggaggattcaatgagcgtttccacactttctttcggggtgaaccgaccaactatatcatgcatcttcgattatggaaataggtatcatttgcgatgttacatgtaccaagcaagagatcttgcggctatggacaaggatagctttagcgacccttatgctatcgtttcctttctccatcagagccagaagaccgtcgtcgtaaaaaacactctgaacccaacttgggatcagacattgatattttatgaaatcgaaatcttcggagagccagctacagtggctgagcagcctcccagcatcgttgtcgagctttacgatcatgacacgtacggtgctgacgagttcatgggtcgttgcatttgtcaaccttctttagagagaatgccaagacttgcttggttccctctgacccgagggagccaaccatcaggtgaactactggccagcttcgagttaatccagcgtgaaaagcctgcaatccatcacattcctggctttgaagtacaagaaacctcccggattctagacgaatccgaggataccgatctgccatacccaccacctcagcgggaggctaacatctacatggtgccgcaaaacattaagcctgcgctgcaaaggacagctatcgagattctcgcttggggtttgcgaaacatgaaatcttatcaacttgcgaatatatcgtcccctagtcttgttgtggaatgtggtggtcagactgtacaatcctgcgtaatcagaaatctccgtaaaaatcctaatttcgatatatgcactctgttcatggaggtgatgctgccaagagaagagctgtattgccctccgattaccgtcaaagttattgataatcggcagtttggaagacgaccagtggtaggccagtgtaccatcaggagccttgagagcttcttgtgcgatccttattccgcagagtctcctagccctcagggtgggcccgacgatgtgtcattgctttccccaggagaagacgtgctgatcgatattgatgataaagagcctctaatacctattcaggaagaggagttcatagattggtggtcgaagttttttgctagcataggtgagcgtgaaaagtgtggatcttaccttgagaaagatttcgatacacttaaggtgtatgatacccagttggaaaatgttgaagcattcgaaggattatctgatttttgtaacaccttcaagctgtataggggcaagactcaagaggagaccgaagacccatctgtgataggagagtttaaaggactttttaaaatttatcccctgcctgaggatccagccattccgatgcccccaaggcagttccatcaattagccgcacagggtccacaggaatgcttggtaagaatctacatagtcagggctttcggtttgcagccgaaggatcccaacggcaagtgcgatccctatataaagataagtataggaaagaaatcagtgtccgatcaagataattatattccctgtaccctggaacctgtgtttggaaagatgttcgaactcacatgtactctccctctggaaaaggatctaaagatcacactatatgactatgacttattgtccaaggacgagaagataggcgaaactgttgtcgatcttgaaaacaggttgttgtcaaagttcggcgcgaggtgtgggctccctcaaacctattgcgttagcggccctaaccagtggagagatcagcttcgaccgtcacagctattgcatcttttttgtcagcagcatagagtcaaggcgcctgtttatcggacggaccgagtaatgttccaggataaggaatactccatagaggaaatagaagctggtcgaatacctaatcctcatctaggccctgtggaagaaagattagctctgcacgtgctacaacagcaaggattggtccccgagcacgtcgagagtcgcccactgtacagtccgttgcaaccggacatcgagcagggtaaactacaaatgtgggtagatcttttcccgaaggcgcttgggagaccaggtccaccattcaatatcacccctcggagagctagacgattttttcttaggtgcataatctggaacacgcgggatgttattctcgatgacctttcgctaacaggagaaaagatgagcgacatctatgtaaaaggttggatgatagggtttgaagagcacaaacagaaaacagacgtccattatcggtcactgggtggcgagggtaacttcaactggagattcattttccctttcgattatctgcctgctgagcaggtttgtacaatcgcgaagaaggatgccttctggcgtctcgataaaacagagtccaaaataccagctagagttgttttccagatctgggataacgataaattttcgttcgatgactttcttggatctttgcagctagacttaaatagaatgccaaaaccagccaaaactgctaaaaaatgttctcttgatcaactcgatgacgcatttcatcctgagtggtttgtctctctattcgagcaaaagaccgttaagggatggtggccttgcgttgctgaggaaggggaaaaaaagatcttggctgggaagctcgaaatgactttggagatagtggctgaatctgaacatgaagaaaggcccgctgggcaaggcagagacgagcctaacatgaatccaaaattagaggatccacggcggccggatactagcttcctctggtttaccagcccatacaagactatgaagttcatattgtggcgccggtttcgctgggcgatcatcttgttcataattctttttattctgctacttttcctagcaatatttatatacgctttcccgaattatgcagcgatgaagttggttaaaccattcagt

SEQ ID NO: 10659 - DNA, 6243 bp, synthetic construct
  misc_feature 1..6243: note = source = /note="Description of Artificial Sequence: Synthetic coding sequence"
  source 1..6243: mol_type = other DNA
atgctgtgttgcctgctcgtgcgggcgtcgaacctgccttcggccaagaaggatcgcagatcggacccagtcgcatccctcacctttagaggcgtgaaaaagaggaccaaggtgatcaagaactcggtgaaccctgtgtggaacgaaggattcgagtgggacctgaagggaatccctctggaccagggatcggaattgcacgtggtggtgaaggatcacgaaaccatgggtcggaatcgcttcctgggcgaagccaaagtgccgttgcgcgaggtgctggcgactccctccctgagcgccagctttaacgcgccgttgctggacaccaaaaagcaacctaccggcgcgtcgttggtgctgcaggtgtcatacactcccctcccaggcgcagtgccgctgttcccgccgccaacccccctcgaaccgtccccaaccctgccggacctggatgttgtggccgatacgggcggagaagaggacactgaagatcagggattgaccggagatgaggccgaaccattcctcgaccaatccggaggtccgggagccccgaccacgccacgcaagctcccttcgcggccaccgccgcactacccaggcatcaagagaaagcggtccgcaccgacctcacggaaacttctgtccgacaaaccccaggactttcaaattagagtgcaagtgatcgaaggacggcagctccctggcgtcaatatcaagccggtcgtgaaagtgactgcggcaggacagaccaaaagaacccggatccataagggcaactctcctctgttcaacgaaactctgttcttcaacctttttgattcaccaggagagcttttcgacgaacccatctttatcaccgtggtcgactcgagatcactcagaaccgacgccctcttgggtgagttccggatggatgtgggaacgatctaccgcgagcctcgccacgcctacctgcgcaaatggttgctgctgtcggatcccgatgatttcagcgcgggagccagaggataccttaagacttccctgtgcgtcttgggccctggagacgaagccccgctggaacgcaaggacccaagcgaggacaaggaggacattgaatccaacctcttgcggccaacgggggtggccctgcggggagcccacttctgtctgaaagtgttcagggctgaggacctcccgcagatggacgatgcggtcatggacaacgtgaagcaaatcttcggatttgagagtaataagaaaaacctcgtcgacccattcgttgaggtgtcattcgcaggcaagatgttgtgttcaaagatcctggagaaaaccgcaaacccgcagtggaatcagaatatcaccctgccagctatgttcccctcaatgtgcgagaagatgcgcatccgcatcatcgactgggatagactcactcacaacgacatcgtggctaccacctacctgtccatgtcaaaaatctccgctccgggaggcgaaatagaggaggagccggccggtgcggtgaagccatccaaagcatctgatcttgacgactacctgggattcttgccaaccttcggaccttgctacatcaacctgtacgggtcgccgcgggaattcaccggtttcccagacccgtacaccgagcttaacacgggaaagggcgaaggcgtggcatacagaggacggcttctgctgagcctcgaaactaagctggtggagcactccgagcagaaggtggaagatctccctgcggatgatatcctgagggtcgaaaagtacctgcgccgccgcaaatactccctgttcgctgccttctactctgctactatgctccaagacgtcgacgatgcgatccagttcgaggtgtcgatcggaaactacgggaacaagtttgatatgacctgtctccctctggcttcgacgacccagtacagccgggcagtgttcgacggatgccattactactatctcccttggggcaacgttaaaccagtggtggtgctgagctcctactgggaagatatatcgcacagaatcgaaactcagaatcaactcctgggaattgcagatcgactcgaggcgggactcgaacaggtgcatctggcactcaaggcgcaatgttccactgaggacgtcgacagccttgttgctcagttgacggacgaactcatcgccggttgttcccagccgctcggagatatccacgaaactccgagcgccacccacctggaccagtacctgtaccagctgagaacccatcatctctcgcaaatcaccgaggccgctctggccttgaaattgggacattcggaactgccggcggctttggagcaagcggaggattggttgctccgactgcgcgccttggccgaggaaccgcagaacagcctgccggatatcgtcatttggatgctgcagggcgacaaacgggtggcgtatcagcgggtgccggcccaccaggtgttgtttagccgcaggggagccaactactgcggcaagaattgcggaaaactgcagacgatcttcctgaagtaccccatggagaaggtgccgggagctcgcatgcccgtgcagatccgagtcaagctctggtttggactgtccgtcgatgagaaggagttcaatcaattcgcagaaggaaaactgtccgtgttcgcggagacttacgaaaatgaaaccaaactcgctctcgtgggcaactgggggacgaccgggctgacttacccgaagttctcggacgtgactggaaagattaaactgcccaaggactcgttccggccgagcgccggctggacctgggcaggggattggtttgtgtgccctgagaaaacgttgctgcacgacatggatgccgggcacctgtcgttcgtggaggaagtctttgagaatcaaactcggttgcctggcggacaatggatttacatgtcggataactataccgacgtcaacggagaaaaggtgcttccaaaggacgacatcgaatgcccactcggatggaagtgggaagatgaggagtggagcacggatctgaatcgcgcggttgatgaacaggggtgggaatacagcattactatccctccagaacgtaagccaaagcactgggtgcccgccgagaaaatgtactacactcatcgacggcgcaggtgggtccggctccgcagacgcgacctgtcacagatggaagctctgaaacggcaccggcaagccgaagccgagggtgaaggttgggaatacgcgtcgttgttcggatggaaattccacctggagtatagaaagactgatgcgttcaggcgccgccgctggcgtaggcggatggaaccgctggaaaaaactggaccggctgcggtgttcgctctggaaggcgcattgggaggagttatggacgacaagtccgaggactccatgtccgtgtcgaccctcagcttcggcgtgaatcggcccactatcagctgcatctttgactacggaaatagataccacctgcgctgctacatgtatcaggcccgggacctggcggccatggacaaggactctttctccgatccgtacgccatcgtgtcattcctccaccagagccaaaagactgtggtggtcaagaacactctcaacccaacttgggaccaaacgcttatcttctacgagatcgaaatctttggagagccggcaaccgttgcggagcaacccccctcaatcgtggtggagctctacgaccacgacacctacggcgctgatgaattcatgggacgctgtatctgtcagccgagcttggaacggatgcctcggctggcttggtttccccttacccgaggatcccagccatccggcgagctcttggcgtcgttcgaactcattcagcgggagaagccagcaattcaccacatccccgggttcgaagtgcaggagacttcccggattttggacgagagcgaggatactgatctgccgtaccccccgccgcagagagaagcgaatatctacatggtgccacagaacattaagcctgccctgcagcgcaccgcgatcgagatcctggcgtgggggttgagaaacatgaagtcgtaccaactggccaacatctcatccccgtcacttgtcgttgaatgcggtggacagactgtccagtcatgcgtcatcaggaacctgcgaaaaaaccccaacttcgatatctgcaccttgtttatggaggtgatgctccctagagaagaactctattgccctcccattactgtgaaggtgatcgacaacagacaattcggacggcgcccggtcgtcggccagtgtactatccgctccctggagtcgttcctgtgcgacccgtattcagcggaatcgccttcccctcagggtggacctgatgacgtctcgctgttgtccccaggcgaggacgtgctgatcgacattgacgataaggagccactcatccccatccaagaagaggagttcatcgactggtggtccaagttcttcgccagcatcggcgagcgcgaaaaatgcggaagctacctggagaaggattttgatacgcttaaggtgtacgacacccaactggagaatgtggaagcctttgaaggtctgtcggacttctgcaacacctttaaactgtacagaggtaagacccaagaggagactgaggacccgtccgtgattggggagtttaagggactgttcaagatctacccattgccggaggacccggcgatccccatgcccccgagacagttccatcaactggccgcccaaggcccgcaagaatgcctcgttcgcatttacattgtccgagccttcggcctgcagccaaaagaccctaacggcaaatgcgacccttacatcaaaatcagcatcggaaagaagtccgtctccgaccaggacaactacattccgtgcaccctggagccagtgtttggaaaaatgttcgagctgacgtgtactttgccactggaaaaggacctgaagattaccctctacgactacgatctgttgagcaaagatgaaaagatcggcgagacggtggtggacctggagaatcggctgctgtcaaagtttggagcgcggtgcggtctgccgcaaacctactgcgtgtctggtccgaatcagtggagagatcaactcagaccgtcccaattgctgcacctgttttgccaacaacatcgggttaaggcacctgtgtacagaaccgaccgggtcatgtttcaggacaaagagtacagcatcgaggagatcgaggctgggcgcattccaaatccgcatctcggcccggtggaggagcggctcgccctccatgtcctccagcagcagggactggtcccagagcacgtcgagagcaggccgctgtactccccgctgcaaccggatattgagcaaggtaaactccagatgtgggtcgatctgttccctaaggccctggggcggcctggtcccccgttcaacatcaccccacgccgcgccagaaggttcttcctgcggtgtatcatctggaatacccgggatgtgatcctcgatgacctgagcctcacgggcgaaaagatgtccgatatctacgtgaaggggtggatgatcggcttcgaggagcataagcaaaaaaccgatgtccattaccgctccctcggaggagagggaaacttcaattggcgcttcattttcccgtttgactacctgccggccgaacaggtctgcactatcgcgaagaaggacgcgttctggcgattggacaagaccgaatcaaaaatcccagcccgcgtggtttttcagatttgggataacgacaagttctcgtttgatgacttcctgggtagtctgcagctggacctgaatcgcatgcccaagcctgcaaaaaccgccaagaagtgttcgctggatcagttggatgacgccttccacccggagtggttcgtgtccctgtttgagcagaaaactgtgaagggctggtggccttgcgtggccgaagaaggggagaaaaagatcctggccggcaagctggaaatgactctggaaatcgtggcagaatccgaacatgaagaacgcccggccggacagggtcgcgacgaaccaaacatgaatccaaagctggaggacccgcggcgcccggatacttcctttctgtggtttacttcaccgtacaagactatgaaattcatcctgtggagaaggttcagatgggccatcattcttttcattatcctctttatcctgctcctcttcctggccattttcatctacgcctttccgaattacgccgcgatgaaactggtcaaaccattctca

SEQ ID NO: 10660 - DNA, 6243 bp, synthetic construct
  misc_feature 1..6243: note = source = /note="Description of Artificial Sequence: Synthetic coding sequence"
  source 1..6243: mol_type = other DNA
atgctgtgttgtctcttggtgcgggcttcaaacctccctagcgccaagaaggacaggcggtccgatccggttgcgtcactgactttccgcggagtcaagaagcggactaaagtcatcaaaaactccgtcaaccctgtgtggaatgagggatttgagtgggatctgaaagggattccactcgatcagggctcggagcttcatgtcgtggtgaaagaccacgagacgatggggcggaaccggtttctgggcgaagcgaaggtccccctgagagaagtgctcgcaaccccaagcctgtccgcgtccttcaacgctccactgctggacactaaaaagcaacctaccggtgcgtcgcttgtgcttcaagtgagctacacccctctgccgggggcggtgccgctcttcccgccgccgactccattggagccttcaccgaccctgccggatctcgacgtagtggcggataccggaggagaggaagataccgaggatcagggcctcaccggcgacgaggcggagccatttctggaccagtcgggtgggcctggagcccccaccactccacggaagctcccatcgcgcccgccaccccactatccgggtatcaaacgtaagcgatccgcccctacgtcacgcaagctcctgtccgacaagccacaggatttccaaatcagagttcaagtgatcgaaggacggcaattgcctggggtcaacatcaagcccgtggtgaaagtcactgccgccggacagactaagcgcacgcgcatccacaagggtaactccccgctcttcaatgagacgctgttctttaacttgttcgacagccctggtgagctgtttgacgagccgatctttatcactgtcgtggatagcagatcactgcgcaccgacgccctgcttggcgaattcagaatggatgtgggcactatctacagggaaccgaggcacgcatacctgcgcaagtggctcctgctgtccgacccggacgacttctcggcgggtgctcgcggatacctcaagacctccttgtgcgtgctgggacctggagacgaagcgcccctggagcgcaaagacccatcggaggacaaagaggatatcgagtccaacctgttgcggccaaccggcgtggcgctccgcggcgctcatttctgtctcaaggtctttcgcgccgaggacctgccacaaatggacgacgccgtaatggacaatgtcaagcaaatctttggctttgagtcgaacaagaagaatttggtggatcctttcgtcgaagtgagcttcgcaggcaagatgctctgctccaagattctcgagaaaacggctaacccgcagtggaaccagaatatcaccctgccagcaatgttcccgtcgatgtgcgagaagatgcggatcaggatcattgactgggatcggctgacccacaacgacatcgtcgccactacttacctctcaatgtcgaagatttctgcgcctggaggcgaaatcgaggaagaacccgcaggagcggtgaagccgtctaaggcatcagacctggatgattacctgggattcctgccaaccttcgggccttgctacattaacctgtacggctccccccgcgaattcacgggcttcccagatccttacaccgaattgaacactggaaaaggcgaaggagtggcgtaccggggacggttgctgctgtcgctcgaaactaagctggtcgaacactcggagcagaaagtggaagatttgcccgctgacgacatccttagggtggaaaagtacctgcgcagacgcaaatacagtctgttcgctgcattctactccgcgaccatgctccaagacgtcgacgacgccatccagttcgaagtgagcatcggaaattacggaaacaagttcgatatgacctgcctcccgctggcttccactactcaatactcgcgggctgtgttcgatggctgccattactactacctcccttggggaaatgtgaagccagtggtggttttgtcaagctactgggaggacatcagccatcggatcgaaactcagaatcagctgttggggatcgcagatcggcttgaagctggccttgagcaagtgcatctcgcgctgaaagcccagtgctcaactgaggacgtcgattccctggttgcccagttgactgacgaactcatcgcggggtgcagccaaccacttggtgacatccacgaaaccccatcggccacccacctggatcagtatctgtaccagctgcgcacgcaccacctgagccaaatcactgaagcagccttggctttgaagctggggcattcagagctgcctgccgcgctggaacaagccgaggactggcttctgcgcctccgggccctcgcagaagagcctcaaaattcattgcctgatatcgtcatctggatgctgcagggagataagcgcgtggcctaccagcgcgtgccggcacatcaggtgctgttcagccgcagaggggcgaactactgcggtaagaactgcggcaaactgcagaccatctttctgaagtacccgatggaaaaggtcccaggggcgcggatgccggtgcaaatacgcgtgaagctgtggttcggactttcggtcgatgagaaggaattcaaccagtttgccgagggaaaactgtcagtgttcgcggagacgtacgaaaacgaaactaagttggcgctggtggggaactgggggacgacgggcttgacgtaccctaaattctccgacgtgaccggcaagatcaagctgcccaaggactcctttagaccttcggcgggctggacttgggcaggagattggttcgtctgccctgagaaaacccttcttcatgatatggacgcgggccatctgtcgtttgtcgaagaagtgtttgaaaaccaaactaggctccctggtggacagtggatctacatgagcgataactacaccgacgtgaacggggagaaggtcctgcctaaggatgatatcgagtgtccgctcggctggaagtgggaggacgaagaatggtcgaccgaccttaaccgcgccgtcgatgaacagggatgggaatacagcatcactatcccgccggagagaaagccgaagcactgggtcccggcggagaaaatgtactacactcatagaaggcggagatgggtccggctgagacgacgcgatctctcacaaatggaagcattgaagagacacagacaagctgaagccgagggagagggttgggaatacgcctccctgtttgggtggaagttccatctggagtaccgcaaaaccgacgcgtttcggcgccggagatggcgacgccgtatggagccgcttgaaaagacgggaccggccgccgtgttcgcgctcgagggtgccctcggcggtgtgatggatgacaagagtgaagattcaatgtcggtgtcaacgctgagcttcggcgtgaaccgccctaccatctcgtgcattttcgactacggcaaccggtaccacctgaggtgctacatgtaccaggcccgtgacctggcagcaatggacaaagattcattttccgatccttacgcaatcgtgagtttcctccaccaaagccaaaagacggtcgtggtgaagaataccctcaaccccacttgggaccagaccctgatcttctacgagattgagatcttcggcgaaccagctaccgtggctgagcagccgccgtcaatcgtggtggagctttacgaccatgatacttatggagcggacgaattcatgggaaggtgcatttgccagccgtccctggaacgcatgccccggcttgcttggttcccgctcactagggggtcccagccgtccggagaactcctggcatcgttcgaacttatccagagggagaagcctgccattcaccacatccctggcttcgaagtccaggagacgtcaagaatcctggacgaaagcgaagataccgatctgccatatccaccaccccagcgcgaggccaacatctacatggtgccgcagaatatcaagcccgcgctccaacggaccgctatcgaaatccttgcttggggactccgaaatatgaagtcataccagctggccaacatctcgtcgccatcgttggtggtggaatgtggaggacagaccgtgcaatcgtgtgtgattagaaacctgcgcaagaacccgaatttcgacatctgtactctcttcatggaggtgatgctcccgagggaagagttgtactgtccccccatcaccgtgaaggtgatcgacaaccggcagtttggtcggcggccggtggtgggtcaatgcactatccgctcactggaatcattcctgtgcgacccgtatagcgccgaatctccgtctccacagggtggcccagatgatgtcagcctgctctcgccgggagaggacgtcctgatcgatattgatgacaaagaacctctgattccaatccaggaggaagagttcatcgactggtggtcgaagttcttcgcttccatcggagaaagggaaaagtgcggatcatacctcgaaaaggactttgataccctcaaagtgtacgatacccagttggaaaacgtggaggctttcgaaggactttctgacttctgtaatacgttcaagctgtacagaggtaaaacccaagaagagacggaggatccctcagtcatcggagagttcaagggactgttcaagatctacccactgccagaggaccctgccatcccgatgccacctaggcagtttcatcagcttgcagcccagggaccgcaggagtgtctggtcagaatatacatcgtccgcgcctttggcttgcagccgaaggaccctaacgggaagtgcgacccatacatcaagattagcatcggcaagaagtctgtgtcggatcaagacaattacattccgtgcactctcgaaccagtctttggaaagatgtttgaactgacttgtaccctcccactggagaaggacctcaagattactctgtacgattacgacctcttgtcaaaagatgagaaaatcggtgaaaccgtggtggacctcgaaaacaggctgctgtcaaaattcggagcgcgctgtggtttgccccagacgtactgcgtgtccgggccaaaccaatggagggatcagctgcggccaagccagctgctgcatctcttttgccagcaacacagagttaaagctcctgtctacagaactgatcgcgtcatgttccaagataaggaatactcaatcgaagagatcgaggcaggacggatccctaaccctcacctcggaccggtggaagaaaggctggcgctccacgtgctccagcagcagggcctcgtgccggaacacgtggagtcccgcccgctgtactcgccccttcaaccggacatagaacagggaaagttgcaaatgtgggtggacctgttcccgaaggcgctgggcagaccgggaccaccattcaacatcactcctagaagagcacgccgcttcttcctccggtgtatcatctggaatacgcgcgatgtcatcctggatgacttgtccttgacgggcgagaagatgagcgatatctacgtgaaaggatggatgatcgggtttgaggagcacaaacaaaagactgacgtgcactaccggtcactcggaggtgagggtaacttcaattggcgcttcatcttcccatttgattatctcccggccgagcaggtgtgcactattgctaagaaggatgcgttctggcgcctcgacaagaccgagtcaaagatcccggcacgcgtggtgttccagatctgggacaatgacaagttctcgtttgatgacttcctcgggtcgctccagctcgatctgaacagaatgccgaaaccggccaaaaccgccaagaagtgcagcctggaccagctcgacgatgcgttccaccctgagtggttcgtgtcgctgtttgaacaaaagacggttaaggggtggtggccgtgcgtggccgaagaaggtgagaagaagattctggccggaaagctggagatgaccctcgaaatcgtggcagaatccgaacacgaagaacggcctgcgggacaaggacgggacgaacccaatatgaatcctaagctcgaggatccgagacggcccgacacttccttcttgtggtttacctcaccttacaagaccatgaagtttatcttgtggaggcgcttccgctgggccatcatcctgttcatcatcctctttatcctgctcctgttcttggccatcttcatctatgccttccccaactacgctgccatgaagctggtgaagcctttttct

SEQ ID NO: 10661 - DNA, 6243 bp, synthetic construct
  misc_feature 1..6243: note = source = /note="Description of Artificial Sequence: Synthetic coding sequence"
  source 1..6243: mol_type = other DNA
atgctgtgctgcctgctggtgcgcgcctccaacctgccgtccgcaaagaaggaccggcgatcggacccggtggcgtcactgactttccgcggcgtgaaaaagaggaccaaggtgatcaagaattccgtgaacccggtgtggaacgaggggttcgaatgggacctcaaaggtatcccgctggaccaggggtcggagttgcatgtggtggtgaaggatcacgaaacgatgggtcgcaaccggtttctgggagaggccaaggtcccgttgagggaagtcctcgccaccccgtccctgagtgcatccttcaacgcccctcttctggatactaagaagcagcctactggggcaagcctggtgctccaggtgagctacacgccccttccaggagctgttcccctcttcccaccgcctacgccactggaaccatcccctactctgccggatctcgacgtggtggccgataccggaggtgaagaagataccgaggaccagggcttgactggggatgaagcggaaccctttctggaccagtccgggggaccgggagccccaaccaccccaagaaaactgccgtcccggcctccgccacactaccccggaattaagaggaagcgcagcgcgccgacctcaagaaagctcctctccgacaagccgcaagactttcaaattcgggtacaagtgatcgagggacgacagctgccgggagtcaacatcaagcccgtggtcaaggtcaccgccgctggccagactaagcggacgaggatccataagggaaattccccactcttcaacgagactcttttcttcaatcttttcgattctccgggcgaactgtttgatgaaccgatctttatcaccgtggtggactcccgcagcctccgcacggatgccctgctgggggaattccgcatggatgttggtaccatctacagggagccgagacacgcctacctccggaaatggctgctcctctcggaccctgatgacttcagcgctggagcgagaggctacctcaagacctcgctgtgcgtgctcggcccaggagatgaggccccgttggaacggaaagacccgtccgaggacaaggaagatattgagtcaaacctgctcagaccgaccggagtcgccctgagaggtgcacatttctgcctcaaggtgtttcgggcagaagatctgccccagatggatgacgccgtgatggacaacgtgaaacagatattcggcttcgaatcaaacaagaagaacctggtggatccctttgtggaagtgagcttcgccgggaagatgttgtgcagcaaaatcctcgaaaaaactgcaaatccgcaatggaaccagaatatcacccttccagctatgttcccatcaatgtgcgagaaaatgcggataaggattattgactgggaccgcctcactcacaacgacatcgtggctaccacctacctgagcatgtccaagatctcagcgccgggaggagagattgaggaagaaccagcgggagccgtgaaaccatccaaggcgagcgacctggacgactacctgggttttctgccgaccttcggaccgtgctacatcaacctgtacggttctccgcgggagtttaccggattcccggatccgtatactgagctgaatactggaaagggagaaggagtcgcctaccgcgggagactgctcctgtcgttggaaactaagctcgtggaacattcagaacagaaagtcgaggacctgcctgccgatgacatcctgcgcgtggaaaagtacttgcgccgcagaaaatattcgcttttcgctgcgttctactcggcaactatgctgcaggatgtggacgacgcaatccagttcgaggtttccatcggaaattacggaaacaagttcgatatgacttgcctccctctggcttcgaccacccagtacagccgcgccgtgttcgacggatgccactactactacctgccttggggaaacgtcaagccggtcgttgtccttagttcgtactgggaggacatctcccaccgcatcgaaacccagaatcagctgctcggcatcgcggaccggctcgaggcagggctggagcaggtacacctggccctcaaagcgcagtgctcgactgaagatgtggactctttggtggcgcaactgaccgatgaactgatcgccggatgttcgcaacctctcggggatatccacgaaactccgtccgccacccacctcgatcagtatctctaccaactccggactcaccacctctcacagattactgaggctgccctcgcactgaagctgggacacagcgaacttccagcagcattggaacaggccgaggattggctcttgagactgcgcgcgctcgctgaggaacctcaaaattcacttccggacattgtgatttggatgctccagggtgacaagagggtggcttaccagcgggttccggcccaccaggtgttgttttcacgcagaggagccaactactgcggaaagaattgcggaaaattgcagacgatctttctgaaatacccgatggagaaagtcccgggggcccggatgccagtccagattcgcgtgaagttgtggttcggactgagcgtcgacgagaaggaatttaatcagtttgccgaaggaaagctgtcggtctttgccgaaacgtatgaaaatgaaaccaagctggccctggtcggcaactggggtactactggactcacttaccctaagttctccgacgtgacgggaaagatcaagctcccaaaggacagcttcagaccgagcgcggggtggacttgggcaggcgactggttcgtttgcccagaaaagaccctgctgcatgatatggacgccgggcacctctcgtttgtggaggaggtgttcgagaaccagacccggctgcccggagggcaatggatttacatgtcggacaactacaccgacgtgaatggcgaaaaggtgcttccgaaggacgatatcgaatgcccattgggctggaagtgggaagatgaggagtggtccacggacctgaacagggctgtcgacgaacaaggctgggaatactcgattacgatccccccggaacgcaagcctaaacactgggtgccggccgagaagatgtactacacccatagaagaagaaggtgggtgagactccgtcgacgcgatctctcgcaaatggaggctctgaaacggcataggcaagcagaggccgaaggagaggggtgggaatatgcctctcttttcggatggaagttccacctggaatacaggaaaacggacgcattcagacggagacgctggcggcgacgcatggagccactcgaaaagactggccctgctgctgtgttcgcacttgagggtgcgctgggcggagtcatggacgacaaatcggaggactcgatgtcggtgagcaccctgtcgttcggcgtgaatcggccgaccatcagctgcatctttgactacgggaatcgctaccatctgcggtgctacatgtaccaggctcgggatttggccgcgatggataaagactcattctcagacccgtacgcgatcgtcagcttccttcatcaatcgcaaaaaaccgtggtcgtgaaaaataccttgaacccaacttgggaccagactctcatcttctacgaaatcgaaatcttcggcgaaccggccactgtcgcagagcaaccgccatcgatcgtggtcgagctgtacgatcacgacacttacggagctgacgagtttatgggacgctgtatctgtcagccgagtttggagagaatgccccggctggcgtggttcccgctgacccgcggatcccagccatctggcgaactgctcgcctccttcgaactgatccaaagggaaaagccggccatccatcatatcccgggcttcgaggttcaagagacttcccggattcttgacgagtccgaggatactgacctgccatacccaccaccgcaacgcgaggcgaatatctacatggtgccacagaacataaagcctgcacttcaacgcaccgctatcgagatcctcgcctggggactccgcaacatgaagagctaccagctggcgaacatttcctcacctagcctggtcgtcgaatgtgggggccaaactgtccagtcgtgtgtgatccgcaatctgcggaagaatcctaacttcgacatctgtactcttttcatggaggtgatgctgccccgcgaggagctgtactgcccgcctattactgtgaaggtgatcgacaacagacaattcggacggcggccagtcgtggggcagtgcactatccgctcgctggaatcatttctttgtgacccttactccgcagaaagcccctcaccgcaaggaggccctgatgatgtgtcactgctttcgccgggcgaggacgtgctcatcgacatcgacgacaaggaaccgctcattccaatccaggaggaagagtttatcgattggtggtccaagttcttcgcatccatcggggaaagagagaaatgcggttcgtacctggaaaaggacttcgacactctgaaagtgtacgacacccagctggagaacgtggaggcgttcgagggtctgtctgacttctgcaataccttcaaactttaccgcggcaagacccaggaagaaactgaagatccttccgtgatcggagaattcaaaggactgtttaaaatctacccactgcccgaagatccagcaatcccgatgcctcctagacaattccaccagttggccgcccagggaccccaagagtgcctcgtgaggatctacattgtccgggcattcggacttcagccgaaggacccgaacggtaagtgcgacccgtacatcaagatcagcatcggaaagaagtccgtctcggaccaggataactacatcccatgcaccttggagccagtgttcggcaagatgttcgagctgacctgcactctgccgttggaaaaagatctgaaaatcacgctctacgactacgacctgctgagcaaagacgaaaaaattggtgaaaccgtcgtcgatctggaaaaccgcttgctttccaagttcggcgcgcggtgtggactgcctcaaacctactgcgtgtcaggacctaaccagtggcgcgaccagctccgaccgtcgcagctgctccatctgttttgccagcaacatcgggtgaaggcgcccgtgtaccggaccgaccgcgtgatgttccaggataaggaatattcgatcgaggagatcgaagcgggacgcatcccaaatcctcacctgggccccgtggaagagcgcctcgccctgcacgtgctccagcaacagggactggttccagaacacgtggaatcacggcccctgtacagccccctgcagccggatatcgagcaaggcaagttgcaaatgtgggtggatctgtttccaaaagcgctgggtagaccgggaccacctttcaacattaccccgagacgcgcccgacgcttcttcctgagatgtatcatctggaacacccgcgacgtcatcctggatgatctgtcgctgaccggcgaaaaaatgagcgatatctacgtaaaaggatggatgatcggattcgaagaacacaagcaaaagactgacgttcactaccgctcgctcggtggagaaggaaacttcaactggcggttcatctttcccttcgattatcttccagccgaacaggtgtgtactattgccaaaaaggatgctttctggcgtctggacaagaccgaatcaaagatcccggcgcgggtggtctttcaaatctgggacaacgataagttctcatttgatgatttcctgggatcgctccaactggatttgaataggatgcctaagcccgccaagaccgccaagaaatgctcgctcgaccagctggatgatgcgttccatccggaatggtttgtgagcctcttcgaacagaaaaccgtcaagggctggtggccttgtgtcgcggaggagggcgagaagaagatcctggctggcaagctggagatgaccctggaaatcgtcgctgagagcgaacatgaggaacgcccagccggacagggacgtgacgaaccaaacatgaatcctaagctcgaggaccccagacggccggacacttccttcctgtggtttacctcaccgtataagactatgaagttcatcctctggagacggttcaggtgggcaatcatcctctttatcatcctgttcatcctgctgctcttccttgctatcttcatctacgcctttccgaactacgccgcgatgaagctcgtgaagccgttctca

SEQ ID NO: 10662 - DNA, 6243 bp, synthetic construct
  misc_feature 1..6243: note = source = /note="Description of Artificial Sequence: Synthetic coding sequence"
  source 1..6243: mol_type = other DNA
atgctgtgctgcctgctggtgagggcgtctaacctgccaagcgcaaaaaaggatcgacggtctgacccggtggcgagccttacctttcgcggagtgaaaaagcggactaaggtcatcaagaacagcgtcaacccggtgtggaatgaggggtttgaatgggacctgaagggaatccctctcgaccaaggttccgaacttcatgtggtggtgaaggatcatgaaaccatgggacgcaatagattcttgggagaggccaaggtgccgttgagagaagtgctggcaactccatcactgagcgcgtcgtttaacgccccgctgttggatactaagaagcagcctactggagcctcgctcgtgcttcaggtgtcgtacacgccgctgccgggcgctgtcccactgtttcctcccccgaccccattggaaccttcgcctaccctgcctgacctggacgtcgtcgcggacaccggtggagaggaggacaccgaagatcagggactgactggtgatgaagcagaacccttcctggatcagagcgggggcccgggagctccaactacccctagaaagttgccctctcgtccaccgcctcactaccctggaatcaaacggaaacgctccgctccgacttcacgcaagctgctctccgacaagccccaggacttccagatcagggtccaagtgatcgagggcagacagctgcctggagtcaacatcaagcccgtcgtgaaagtcactgccgctggacagaccaagcggacgagaatccacaaaggaaactcaccactgtttaatgaaactcttttcttcaacctgttcgactcccctggagaactgttcgatgagcccatcttcatcacggtggtggactcgcggtccctgagaaccgacgccctgctgggtgaattccgcatggatgtgggcactatctacagagagccgagacacgcctacctgagaaaatggttgctgctcagcgaccctgatgatttctcagcgggcgctcggggatacctgaaaacttccctgtgcgtgctgggaccgggagatgaggctccgttggaacgcaaggatccatcggaagataaagaggacattgagtcaaacctgttgaggccgactggagtcgccctgcgcggcgctcatttctgccttaaggtgtttagggcggaggaccttccgcagatggatgacgctgtcatggataatgtcaagcaaatctttgggttcgaatcaaacaaaaagaacctcgtggaccctttcgtagaggtatcgttcgccgggaagatgctgtgcagcaagatcctggaaaaaaccgcgaacccccagtggaatcagaacatcaccctgccggcgatgtttccctcaatgtgcgaaaagatgcgaatccggatcatcgactgggaccgcctgactcacaacgacatcgttgccactacctacctgtccatgtcgaagatctccgctcctggaggcgagatcgaggaggaaccggccggcgccgtcaagccgtcaaaagctagtgacctggacgactacttggggttcctcccgacctttggcccgtgttacattaatctgtacggctcaccgagagaattcacgggcttccctgacccttacaccgagctgaacaccgggaagggcgaaggagttgcataccgaggacggctgcttttgtcgctcgaaaccaaactggtggaacacagcgagcagaaagtcgaagatcttccggctgacgatatcctcagggtggagaaatacttgcggcggaggaaatactctcttttcgccgcgttctacagcgcgaccatgctgcaggatgtggacgacgcgatacaattcgaggttagcatcggcaattacggaaacaaattcgacatgacctgtctcccactcgctagcactacccagtactcccgcgcggtgtttgatggctgccactactactacctgccatggggcaatgtcaagccggtggtggttctctccagctactgggaagatatttcgcataggatcgaaacccaaaaccaactcctcgggatcgcagatcggcttgaagccggactcgaacaggtacacctcgcgctcaaggcccaatgctctaccgaagatgtggactcgctggtggcacaattgactgatgagctgatcgccggatgctcccagccgctgggggacattcacgagactccgtccgccacccatctcgaccaatacctctaccagctgaggactcatcatctgtcccagatcacggaggccgccctggcgctgaaactgggccactccgagctgccagcggcactcgagcaggcggaagattggctgctccggcttcgcgccctggcggaggaaccacagaattcgctgcctgacatcgtcatatggatgctgcagggcgacaagagagtcgcttaccaacgcgtgccagcccaccaggtgctgttctccagacgcggggcaaactactgtgggaagaattgcggcaaacttcagacgatcttcctcaagtacccaatggaaaaggtgcctggggcgcggatgccagtccagatccgcgtgaagttgtggttcgggctttcagtggacgaaaaggagtttaaccagtttgccgaagggaaactgtcagtttttgcggagacttacgaaaacgaaaccaagctggccctggtggggaattgggggacgaccggtctgacctacccaaaattctcagacgtcactggaaagatcaaactcccgaaggattccttcaggccgtcagccggttggacctgggccggagactggttcgtgtgcccggagaaaactcttctgcacgacatggacgcggggcatctgtcgttcgtcgaggaagtgttcgaaaaccagactcggcttccaggaggacagtggatctatatgtccgacaattacaccgatgtcaatggcgagaaggtgctgccgaaagacgacatcgaatgcccgctcggatggaagtgggaggacgaagaatggtccaccgacctgaaccgcgcggtggatgaacaaggctgggaatattcgatcaccatcccgcctgaacggaagccaaagcattgggtgccagccgagaaaatgtactacacccatcgccgcagacgctgggtgcggctgcgccggcgcgacctttcccagatggaggcgctgaagcggcaccggcaggccgaggctgagggagagggatgggaatacgcatccctgttcgggtggaaattccatctggaataccgcaagaccgatgccttccggcgccgcagatggcggcgacggatggagccgctggaaaagactggtccagcggccgtgtttgccctggagggcgccttgggaggagtcatggatgacaaatcggaagattcaatgtcggtgtcaacgctctcgttcggcgtcaaccgcccaaccatctcgtgcatcttcgactacggaaatcggtaccatctccgatgctacatgtaccaggcccgcgacctggcggcaatggataaagactctttctccgacccttatgcaatcgtttcgtttctccatcagtcccaaaagactgtcgtcgtgaagaataccctgaacccgacctgggaccagactctcatcttctacgagatcgaaatcttcggagagccggcaacggtggccgaacaaccgccttccattgtcgtcgagctgtacgatcacgacacttacggggccgatgaattcatgggccgctgtatctgccaacctagcctggaaagaatgccgcggctcgcctggtttccactgacccgcggctctcagccatcaggagaactccttgcatcgtttgagctgattcaacgcgaaaaaccagcgatccaccatatccccggattcgaagtgcaggagacttcgcggatcttggatgaaagcgaggacactgacctgccgtaccccccaccgcagcgggaagcgaatatctacatggtcccacagaacatcaaacccgcgctccaaaggactgctattgaaatactggcatggggtctgcggaatatgaagtcgtaccaacttgcaaacatctcgtccccgtccctggtggtcgagtgcggaggacaaactgtgcagtcatgtgtcatcagaaacctgcgcaaaaacccgaacttcgacatttgcaccctgttcatggaagtgatgctgccgcgcgaggagctgtactgtccaccgatcaccgtcaaggtcattgataaccgccaattcgggcggcgcccagtggtgggacagtgcaccatccggagcctcgagagcttcttgtgcgacccatactccgccgagtcacccagcccacagggaggaccggatgacgtcagcctcctgtcccccggggaggatgttctgatagatatcgacgacaaggagcccctcatccccatccaggaagaagagtttattgattggtggtcaaaattcttcgcaagcatcggcgagcgggaaaagtgcggttcctacctggagaaggatttcgataccctgaaggtgtacgatactcagctggaaaatgtggaggcatttgaaggactgtcagacttctgcaataccttcaagctctaccgcggaaagacgcaggaagaaaccgaggatccatcagtcatcggagagttcaaggggctgttcaagatctacccactccctgaagatccggccatcccaatgccgccgaggcagtttcaccaactggcagcccagggaccccaggaatgtctcgttcggatctacatcgtgcgggcctttggattgcagcctaaggatccgaacgggaaatgcgacccgtacatcaagatctcaattggaaaaaagtcggtgtcggaccaggacaactacattccgtgtaccctggaaccggtgtttggaaagatgtttgaacttacttgtaccctcccgctcgaaaaggacctgaaaatcactctctacgattacgacctgttgagcaaagatgaaaagatcggcgaaactgtggtggatctcgagaacagactgctgagcaagttcggagccaggtgcggcctgccccaaacctactgtgtgagcggacccaaccagtggcgggaccagctgaggccatcccagctgttgcacctcttctgccaacagcaccgcgtcaaagccccggtgtacagaaccgaccgcgtcatgttccaagataaagaatactcgatcgaagagatcgaagcaggacggatccctaaccctcacctgggcccggtggaggaaagactggccctgcacgtcctccagcaacaaggactggtgccggaacatgtcgaatcacggccgctctactctcctctgcagccggatatagagcagggaaaactccagatgtgggtggacttgtttccgaaggctctgggacggccaggtccgccgttcaatatcaccccgcgccgcgccagacgcttctttttgaggtgcatcatctggaacacgcgggatgtgattcttgacgacctgtcgctgactggagaaaagatgtccgatatctacgtgaaaggatggatgatcggtttcgaagagcataagcaaaaaactgatgttcattaccggtcactgggaggagaaggaaacttcaattggcgctttatctttccattcgactacctgccggccgaacaagtgtgcactatcgccaagaaggacgcgttctggcgcctcgacaaaactgaatctaagattcccgcccgcgttgtgttccagatttgggacaacgacaagttctcgtttgacgacttcctggggagcctccagctcgatctgaaccggatgccgaaacctgccaagactgctaagaagtgctcgctggatcaactggatgacgcttttcaccccgagtggttcgtgtcacttttcgaacagaaaacggtcaagggctggtggccttgtgtggcagaggagggcgagaagaaaatcctggctgggaaactggaaatgacgctcgagatcgtggccgaatcggaacatgaggaacggcctgccgggcagggacgcgacgaacctaatatgaatcctaagctggaggacccgcggcgaccggacacgtcattcttgtggttcacttcgccgtataagactatgaagttcatcctgtggagacggttcaggtgggcaatcatcctcttcattatcttgtttatcctccttctgttcctggctatcttcatctacgccttcccaaattacgccgctatgaagctcgtgaagccgttctcg

SEQ ID NO: 10663 - DNA, 6243 bp, synthetic construct
  misc_feature 1..6243: note = source = /note="Description of Artificial Sequence: Synthetic coding sequence"
  source 1..6243: mol_type = other DNA
atgttatgctgcctgctcgttagagccagtaatctcccctcagccaaaaaagatcggagatcagatcctgtggcctctctgacatttcggggagtgaagaagagaaccaaggtaatcaaaaacagtgtcaatccagtatggaacgaagggtttgagtgggacctaaaagggatcccacttgaccagggcagcgaactccacgtcgtggttaaggaccacgaaacaatgggcagaaaccgctttctgggagaagccaaggtgccgctgcgggaagttctggccaccccaagcttgtccgctagcttcaacgcaccactgcttgatacaaagaagcagcccaccggcgcctccttggtgctgcaggtcagctacacacccctccctggagccgtccccttgttccctcccccaacccctctcgagccgtctcccacgcttccagatctcgacgttgtggccgacaccggaggcgaagaagataccgaggaccagggcttgacaggcgacgaggccgagccttttctcgatcagagtggcgggccgggcgcgcccaccacaccacgcaaacttccatcgcgtcctcccccacactaccctggaataaaacgcaagcgcagcgcacctaccagcagaaagttactcagcgacaagccacaggactttcagatcagagtacaagtcattgaaggacgacagttacctggagtcaacatcaaaccggtggtcaaggtgaccgccgcaggacagacaaagagaacaaggattcataaaggaaattcccccctatttaacgagactctttttttcaacctgtttgattctcccggggagctatttgatgaacccatctttatcacggtggtggatagcagaagcctccgtaccgacgcactgctgggagagtttaggatggacgtgggaaccatatatcgggagcccaggcatgcatatttgagaaagtggctgctcctgtccgatcctgacgatttctctgctggagcacgtgggtatttgaagaccagcctctgtgtgctggggcctggcgacgaagcccctctcgagcggaaggatcccagcgaggacaaggaggatatcgaatccaatctgttacggccgacaggtgtggcccttcgtggggcacatttttgtctaaaggtcttcagagcagaggacttgcctcagatggatgatgcagtgatggataacgtgaaacagatctttgggttcgaatctaataagaaaaacttagtggatcccttcgtcgaggtgtccttcgcaggaaagatgctgtgcagcaagatcctcgaaaagaccgccaatccacagtggaaccagaacattacgttgccagccatgtttcctagtatgtgcgagaagatgcggatcagaattatcgattgggacaggctgactcacaacgatattgtggccaccacgtatttgtctatgtctaagatctctgcacccgggggtgaaattgaagaggaaccagctggggctgtgaaaccttctaaggcgtctgatctcgacgattatctgggctttcttcctacatttggtccctgctatataaatttgtacggtagcccacgagaatttacaggctttcccgacccctataccgagctcaatacagggaagggcgaaggagtggcttaccgggggcgactcctgctgagcctggaaactaagctggtggaacatagcgagcagaaggtcgaggatttgcctgccgatgacattttgcgagtggaaaaataccttcgtcggagaaagtactcactttttgctgctttttactccgccacgatgctgcaggacgtggacgacgccatccaatttgaggtctccatcggtaactatggaaataagttcgatatgacatgcttgcctctcgcatcgactacacagtattctcgcgctgttttcgatggatgccactactactatttaccatggggtaatgttaagccggtggtcgtgctcagtagctattgggaagatatctcccatcgtatcgaaacacaaaatcaactactggggatcgccgaccgccttgaggccgggctcgagcaggtacaccttgccctgaaggcgcagtgcagcactgaggacgtagactccctggtggcacagttgaccgacgagcttatagctggctgttcgcagcctctgggtgacattcacgagacaccgtctgccacacacctcgatcagtacctttatcagctcaggacccaccatttgtcacaaatcactgaggcagcattggccctgaaactgggtcattctgagctacctgctgctctagaacaagcagaagactggctcctcaggctgcgcgctttggccgaggaacctcaaaatagcctccctgacattgtgatttggatgctgcagggggataagagagtggcttaccagagagtgcccgctcatcaagtccttttcagtagaagaggtgcaaattactgcggaaaaaactgcggcaaacttcagactatatttcttaagtacccaatggaaaaagtgcccggtgccaggatgcccgtgcagattagagtcaaactatggttcgggctgagcgtagacgagaaggagttcaatcagtttgccgaggggaagctttcagtctttgctgagacctacgagaacgagacaaagctagccctggtgggtaattgggggacgacaggccttacatatcccaaattctcagacgtcaccgggaagattaagttgcccaaggacagctttcgccccagtgctggatggacttgggccggggactggttcgtctgccccgagaaaaccttgcttcatgacatggacgcaggccacctgagtttcgtggaggaggtgtttgaaaaccagacaaggctgccaggaggccagtggatctacatgtccgataactacacagacgtgaacggcgagaaggtcctgcccaaggacgacatcgagtgtcccttgggatggaagtgggaggatgaggagtggagcacggaccttaatcgggcagtagacgagcagggatgggagtattcaatcacgattccccctgaacggaaacctaaacactgggtccccgcggagaagatgtattatacacatcgccgccggaggtgggtgcgattgcggcgtcgcgatctatctcagatggaagctctgaagagacaccggcaggcagaggccgaaggagagggttgggagtatgctagcctcttcggttggaagtttcacctggagtatcgcaaaaccgatgcctttcgtcgccggaggtggcgcagaaggatggagcctttggagaaaaccggcccagctgctgttttcgcactcgagggggccctgggaggagttatggatgacaaatccgaggattccatgtccgttagcacactctcattcggcgtaaaccggcctacgatctcctgcatcttcgattacggcaaccggtaccacctgcggtgctacatgtatcaggctcgagacctggccgcaatggacaaggacagctttagtgatccctacgcaattgtatcttttctgcatcagtcccagaagaccgtagtagtgaagaacaccctcaacccgacatgggaccagaccttgattttctacgagattgagattttcggggaaccagcaactgtggccgagcagcccccctctatcgtggtagagctgtacgaccacgatacatatggagcggacgagttcatgggacgctgtatctgccagccttctcttgagcgcatgcctaggctcgcctggttccctttgacacgcggctcacagccatccggagagctgctggcaagttttgaactaatccagcgcgaaaaacctgccatccaccatattccggggttcgaggtgcaagagacctctcgcatactggacgagagtgaggacacagatctgccctatccccctcctcagcgcgaagccaatatctacatggtgcctcaaaatatcaaacctgctctgcagcgcactgctattgaaattttagcatggggtctccggaatatgaagtcctatcagctggcgaatatctcgagcccgagtctcgtggtggagtgtggaggccagacagtccagtcatgtgtcatccgcaacctgcgcaagaaccctaacttcgatatctgcacactcttcatggaggtaatgctcccaagagaagaattgtactgcccacctatcacagtgaaagttattgataaccggcagtttggtcgaagaccggtggtgggccagtgtaccatcagatccctggagagctttctgtgtgacccttactccgccgagtccccatctccgcagggcggtcctgatgacgtgagcttactgtcacccggggaggacgttctcattgatatcgacgacaaggaaccactgatccctattcaggaagaggagttcatagactggtggtcaaaatttttcgcatctatcggcgagcgggagaagtgtggatcctaccttgagaaggacttcgataccctgaaagtgtacgatacacaattagagaatgtcgaagcattcgagggtctgagcgatttctgtaatactttcaagttgtacagaggtaagacccaagaagaaaccgaagacccaagcgtaattggggaatttaagggcctcttcaaaatctaccctctccctgaggaccccgcaatcccgatgcctcccagacagttccatcagcttgccgcccaggggccgcaggagtgtctggtcaggatatatatcgtgagggcctttggtctccagcctaaggaccctaacggcaaatgtgacccttacatcaagataagtatcgggaagaagtccgtgtctgatcaggataactacatcccgtgtaccctggagccagtcttcggcaaaatgttcgagcttacttgtaccctgcccttggagaaagatctcaaaatcacactctacgattacgacctgctttcaaaggacgaaaaaatcggggagacagtcgtggatctggagaaccgcctcctgtcaaaattcggcgcccggtgcggacttccccagacctattgtgtgagcggtcctaatcaatggagagaccagctacgtccatctcaactgttgcatctgttctgccagcagcatcgtgtgaaggcccccgtgtatcgaacagacagagtaatgttccaagataaagaatactctatcgaggaaatcgaagctggccgcatccccaatccccacctagggcctgtagaggagcgcttggcattgcatgtgcttcagcagcagggacttgtcccagagcatgtcgagagtaggcctctttactccccgcttcaacctgatatcgagcaaggaaagctacagatgtgggtcgacctgttccctaaggctttggggagacccggacccccattcaacataaccccgcggcgcgccaggcggttctttcttaggtgcattatatggaacaccagagatgtaatcctggatgacttatcactgactggcgagaagatgtccgatatctatgttaagggatggatgatcggctttgaagaacacaagcagaagacagacgtgcattatcgctctctcggaggcgaagggaattttaattggcggttcatctttccgttcgattacttgcccgctgagcaggtttgtactatagccaagaaggatgccttttggaggcttgataagacggaaagcaagatccccgctcgggttgtgttccaaatttgggataacgataaattctcctttgatgactttttgggaagcttgcagttagacctgaaccgtatgccaaagcctgcgaagacggctaaaaagtgttcgcttgatcaactggatgatgcgttccaccctgagtggttcgtttccttgtttgagcaaaaaactgtgaagggttggtggccttgcgtggccgaggagggggagaaaaaaatccttgcgggcaaactggagatgacactcgagatcgtcgctgagtcagagcacgaggaacgacccgccggccaaggccgcgacgaaccgaacatgaatcctaaattagaagatccccgccgacctgatacttcctttctctggtttacctcaccgtataaaaccatgaaatttatactttggcgcagatttcgctgggctataatcctgttcatcatcctgtttatcttgttgctgttcctggcaatttttatttacgcctttcccaactacgcagccatgaagctggtgaaacccttcagc

SEQ ID NO: 10664 - DNA, 6243 bp, synthetic construct
  misc_feature 1..6243: note = source = /note="Description of Artificial Sequence: Synthetic coding sequence"
  source 1..6243: mol_type = other DNA
atgctctgttgtttgttagtccgagctagtaacctgccgtctgcaaagaaggaccgacgaagtgaccccgtcgccagccttaccttcagaggagttaaaaagcgtaccaaggttatcaagaactcagtcaatcccgtgtggaatgaaggtttcgagtgggacctgaaaggtattcctctggaccagggctctgagctacatgtagtagtcaaggatcatgaaacaatgggccgtaatagatttcttggggaggccaaggtgccccttagagaggtcctcgcgacaccttcgctgtccgcctcctttaatgctccactcctggacaccaagaaacaacccacaggagccagcctggtactgcaggtgtcctatactcctctgccaggtgctgtgcccttgtttcctcctccgactcccttggaaccgtcaccgactttaccggacttggacgtagtggccgatacagggggggaggaagacaccgaggatcagggtctaacgggggatgaggctgaaccatttttggaccagtcaggggggcccggtgccccgaccacaccaagaaagcttccatccaggccccccccccattaccccggtatcaagcgaaaacgatccgctcctacgtcacgcaaactcttatctgacaagccacaggatttccagatccgtgtgcaggtcatagaggggaggcagcttcccggagtaaatatcaagcccgtggtgaaagtcactgctgccggacagacgaagaggaccagaatccacaagggcaacagtccattgtttaatgaaactctattcttcaatctgtttgacagccctggtgagcttttcgatgagccgatcttcattaccgtggtggattccagaagcctccgaaccgacgcactgctaggtgagttccggatggatgtagggactatttacagagaacctcggcacgcttaccttagaaagtggttgctgctaagtgacccggacgatttttctgctggggctaggggatatctcaaaacttcactctgcgtgcttgggcccggggacgaagctccgttggaaaggaaagatccaagtgaagacaaggaagatatagagtccaacctactgcgccctactggcgtggcactacgaggcgcccacttctgtctgaaggtgtttagggccgaggaccttccacaaatggacgatgccgtgatggacaacgtgaagcagattttcggatttgagtctaacaagaagaacctggtcgaccctttcgtggaagtaagtttcgctgggaagatgctttgctcgaaaatacttgaaaaaaccgctaatcctcagtggaaccaaaacatcactctccccgccatgttcccttccatgtgtgaaaagatgagaattagaataatcgactgggataggctgactcacaatgacatagtggctaccacttatctcagcatgagtaagatttccgccccaggaggagagatcgaagaggagcctgcgggggccgtgaaaccttccaaggcctcggacctcgacgattatctcggatttctgcccacttttggcccgtgttacatcaatttgtatgggagcccaagggagttcaccggctttccggacccatacacggagctgaacacagggaaaggcgaaggcgtcgcctatagaggaaggcttttgttgtccctggagaccaaactggtagaacacagtgagcaaaaagtggaagatcttcccgccgatgatattctgcgagtggaaaaatatctgcgaaggcgaaagtacagtctgttcgcagccttctacagtgcaaccatgctccaggacgtcgacgacgctattcaattcgaagtctctatcggaaattacggcaataagtttgacatgacatgcttgcccctggcgagtacaacccagtactctcgtgctgtgttcgatggctgtcactactattatttaccttggggcaacgtgaagccagtcgtggttttgtcaagctactgggaggatatctcccacaggatcgagacacagaatcaacttctagggatcgccgatcgactagaagctgggctcgagcaggtgcatcttgctctgaaggctcagtgctctactgaggacgttgatagccttgtagcccagctcactgatgaacttatcgctggatgtagtcagcccctcggggacatccatgagaccccgtctgctactcatctggaccagtatctgtatcaacttcgtactcatcacctctctcaaattaccgaggcagcactggctcttaaattgggccacagcgaactgccagcagcactggagcaggcggaagactggctactgaggctgagagccctggccgaggaacctcagaactcactgccagacattgttatttggatgctgcagggcgataagagagtggcctaccagagggtgcctgctcatcaagtgctgttctcgagacgcggtgccaattactgtggcaaaaactgcgggaagctgcagactatctttctaaagtatcccatggagaaggttcctggagcgaggatgccagtgcaaatcagagtgaagttgtggttcggtctgagcgtggacgaaaaggaatttaaccagtttgctgaaggaaagctttctgttttcgctgaaacgtacgaaaacgagacgaaactggcccttgtgggaaactggggtacaaccggcttaacctatccgaagttctctgacgtgacagggaaaatcaagcttcccaaggacagttttagaccttcagcgggctggacttgggcaggcgactggtttgtgtgcccagagaaaactctactgcatgacatggatgcaggccatttgtcgtttgtcgaggaagtgttcgagaaccagacaagacttcccggagggcaatggatatatatgtccgataactatacagatgttaatggggaaaaggtgcttcccaaagatgatattgagtgtccacttggctggaagtgggaggacgaggaatggtccacggatctgaatcgggcagtggacgaacaaggatgggaatacagtattactatcccacccgagaggaaaccaaaacattgggtgcccgccgagaaaatgtactacactcaccggaggagaagatgggtgcgacttaggcgaagggacttgtctcagatggaagcactcaagcggcatcgtcaggcggaggccgaaggcgaaggatgggagtacgcttctctcttcggttggaagtttcatctggagtatcgaaagacagacgctttccgaaggcgacggtggaggaggcgaatggaacccctggagaagacaggtccagctgctgtgttcgccctggagggtgctctcggcggggtaatggatgacaagagcgaggacagcatgtctgttagcaccctgtcattcggtgtcaaccgcccaaccatatcttgtattttcgattatggcaaccgataccacttgcggtgttacatgtaccaggcacgcgatctggcggccatggataaggattccttcagtgatccttacgcaatcgttagcttcctgcaccaatctcaaaagaccgtggtggttaaaaataccctgaatcccacttgggatcagaccctcatcttttatgaaattgagatcttcggtgaaccagctaccgtcgctgaacaacctccctctatagtggtagagttgtacgatcacgacacttatggagccgatgaattcatggggcgatgtatatgccagccatctttggagagaatgcccaggctggcctggtttccattaacccgaggtagccagccctctggtgaattgttagctagttttgaactgattcaacgagagaagcctgctatacatcatatccccgggttcgaggtacaggagacaagtcgaattttggacgaaagcgaagatacagaccttccttatccgccccctcagcgcgaggctaacatatatatggtcccgcagaacattaagccagcactgcagcgaacagccatcgaaattttagcctggggcctacgtaatatgaagtcctatcagcttgctaacataagctctccatctctcgtggtggagtgcggcggacagaccgtccagagctgtgtaattaggaacctccggaagaaccctaacttcgatatttgcacgctgtttatggaagtgatgctccctagagaggaactttattgtccccccataaccgtgaaggtgatcgacaacagacagttcgggagacgacctgtcgtcggtcagtgcaccattaggtcactggaatcctttttgtgcgatccctactccgccgagagcccatcccctcaaggcggcccagatgatgtgtccctcctgagccctggagaggatgtgctgatcgatattgacgacaaggaacctctgattcctattcaggaggaagagtttatcgactggtggagcaagttcttcgccagcatcggggaaagagaaaagtgcgggagttatctggagaaggactttgatactctgaaagtgtacgacactcagctcgaaaacgttgaagctttcgagggtctctcggacttctgcaacacatttaagctttatagaggaaaaacccaggaggagacagaagatccatcagttattggcgagttcaagggcttatttaagatttatcctctgcctgaggacccagccattcctatgcccccaaggcagtttcaccagctggccgctcagggacctcaggaatgtttagtgcgaatctatatcgtgcgggcattcggcctgcagcccaaagatccaaacggcaagtgtgacccctatatcaaaatatctattgggaagaaatctgtgtcggaccaagataactacattccatgtaccctcgaaccggtcttcgggaagatgttcgagctgacttgtacattaccgcttgagaaggatcttaagattactttgtacgattacgatttgctcagtaaagacgaaaagatcggcgagacggtggtcgatttggaaaaccgactgctcagcaagttcggagcccgatgcggcctgccccagacctactgtgtaagtggtccaaaccagtggagggaccagctaagaccctcccaactgctgcatctgttctgtcaacagcatcgagtaaaggcccccgtgtaccgaacagaccgggtgatgtttcaggacaaagagtactctattgaggagattgaagctggtaggatacccaacccacacttggggccagtggaggagcgactggcccttcacgtgctgcagcagcaaggcttggtccccgaacacgtcgaaagccgaccactgtatagtccacttcaacccgacattgagcagggaaagctgcagatgtgggttgatcttttccccaaggcccttggcaggccgggaccgcctttcaatataaccccaagacgtgcacggcggtttttccttcgttgtataatttggaacacaagggacgtaatcctggatgatctatcactgacaggagagaagatgtcggacatctacgtgaaggggtggatgatcggctttgaagaacacaagcagaagactgacgttcactatcgtagtctcggcggtgaggggaatttcaactggcgcttcattttcccattcgactacttgcctgcagaacaggtttgcacaattgctaaaaaagatgctttctggcggctcgataaaactgaatccaagataccagccagagtggtgttccagatatgggacaatgataagttctctttcgacgatttcttgggttcactgcagttggacctgaacagaatgcctaaacctgctaaaacagccaagaagtgtagtctggaccagctggacgacgcttttcaccccgagtggtttgtgagtctatttgaacagaagactgtgaaaggatggtggccgtgcgttgctgaagaaggagaaaagaagatcttggccggtaaacttgagatgacgctggagattgttgctgagtctgaacatgaggagcgaccagcaggccaaggtcgggatgagcctaatatgaatcccaagctagaagatcccaggaggcccgacacctcattcctgtggttcacctcaccctacaagacgatgaaattcatcttgtggcgaaggtttagatgggctataattctgttcatcatccttttcattctgctcctgttcctggctatttttatctacgccttcccaaactatgcggccatgaaacttgtgaagccattctcc

SEQ ID NO: 10665 - DNA, 6243 bp, synthetic construct
  misc_feature 1..6243: note = source = /note="Description of Artificial Sequence: Synthetic coding sequence"
  source 1..6243: mol_type = other DNA
atgctgtgctgcctcttggtgcgggccagcaatctgccttcggctaagaaggaccggcgatccgatccggtcgctagcctcacctttagaggagtgaaaaagcggaccaaggtgatcaagaattctgtgaaccccgtgtggaatgaaggatttgagtgggatctgaagggaattccactcgaccaggggtcggagctgcacgtcgtcgtgaaggaccatgagactatgggccgcaatagattcctgggcgaagccaaggtgccgctgcgcgaagtgctggctacgccttccctgtcggcctcgttcaacgcgccactgctcgacactaagaaacagccgacgggagccagcctcgtcctgcaagtgtcctacaccccgctgcccggagccgtgccgctgttcccgcctccaacccccctggaaccgagccctaccctcccggacctggacgtggtggcggatactggaggtgaagaggacactgaagatcaggggctgactggggacgaagccgagccctttctggaccaaagcggtggtccgggcgcccctaccacccctaggaaactgccttcccgcccgccacctcactaccctggtatcaaaaggaaacggagcgctccaaccagtaggaaacttctctccgataaaccacaagacttccagatcagagtgcaggtcatcgaaggacggcaactccctggagtgaacatcaagccagtcgtcaaggtgactgccgcgggacagacgaagcgcactcgcatccacaaaggaaactcgccactctttaatgaaactctcttcttcaatttgtttgatagcccgggtgaactgtttgacgagccgatcttcatcactgtggtcgactccagatccctgcggaccgatgcgttgctgggagaattccggatggacgtcggaaccatctacagagaacctagacacgcctatctgcgcaaatggctgctcctctccgacccggacgatttctcagcaggagcccgcgggtacttgaaaaccagcctttgtgtcttgggcccaggagacgaggcacctcttgagagaaaggatccgagcgaggacaaggaggatatcgagtcaaacctcctcaggccgactggggtcgcattgaggggagcgcacttttgccttaaagtctttagggcagaggacttgccgcaaatggatgacgcggtgatggataacgtgaaacagatcttcggattcgagtccaacaagaaaaacctcgtcgaccctttcgtcgaagtgagctttgcgggtaagatgctgtgctctaagatcctggagaaaaccgccaacccgcagtggaaccagaacattaccctgcctgctatgttcccctccatgtgtgaaaagatgcggattagaatcattgactgggaccggctgactcacaacgatatcgtggccactacttatctctccatgtccaaaatctctgccccgggaggggaaatcgaagaggaacctgcaggggcggttaagccttcaaaggcttccgacctcgatgactacctcggtttcctcccaactttcggcccttgctacatcaacctttacggaagccccagagaattcacgggtttccctgacccatacaccgaattgaatactgggaagggggagggagtcgcctaccggggacgcctcctgctgtccctcgaaaccaagctggtggagcactccgaacaaaaggtggaggatctgccggcggacgatattctccgcgttgagaaatacctgaggagacgcaagtacagcctcttcgccgcgttctacagcgccaccatgctccaggacgtcgacgacgcgatccaattcgaagtctcgatcggaaactacggaaacaagttcgacatgacttgcctgcctctggcaagtactactcagtacagcagggccgtgttcgatggatgtcactactactacctgccgtggggtaatgtgaaacccgtggtcgtgctgtcaagctactgggaggacatctcccaccggatcgaaacccagaatcagctgctgggcatcgccgaccgcctcgaagctggcctggaacaggtccatctggcccttaaggcccagtgttcaactgaagatgtggattcgctcgtcgcgcagctgactgacgaactcattgccggatgctctcagcccctgggggacatccatgagactccgtcggccacgcatttggaccagtacctgtaccagctccgcactcatcatctttcccagattactgaagccgcccttgctctgaaactgggtcactcagaactccccgccgccctcgaacaggccgaagattggctgctccggctgcgggccctcgccgaagagccacaaaactcactgccggatattgtgatctggatgctgcaaggagacaagcgcgtggcgtaccaacgggtgccggcacaccaggtgctcttttcccggcgaggagccaactactgcggcaagaactgcggaaagctccagactattttcctgaaatacccaatggaaaaagtgcctggcgcgcggatgcccgtccaaattcgcgtgaagctgtggttcggactctcagtcgacgagaaggagtttaaccagtttgccgaaggcaaactttcggtgttcgccgagacgtacgagaacgaaactaagctggctctggtgggcaactggggcaccaccggactgacctacccaaagttcagcgacgtgaccggcaaaatcaagctgccgaaagacagcttcagacctagcgcaggctggacctgggccggagactggttcgtgtgccctgagaaaaccctcctgcatgacatggacgccggacatctgtcgtttgtcgaagaggtctttgagaaccagactcgcctgccaggtggccagtggatctacatgtccgacaattacactgacgttaacggagagaaagtgctgcctaaagacgacatcgaatgtcccctcggatggaagtgggaggatgaagaatggtcaaccgacttgaaccgtgctgtggatgaacaagggtgggaatactcaatcaccatcccacctgagcggaagcccaaacactgggtgccggccgagaagatgtactacacccaccgcagacgccgctgggtgcgcctccggcgccgcgacctgtcgcagatggaggcgctcaagcggcatcgccaagcagaagccgaaggtgagggatgggagtatgcatcgttgttcggatggaaatttcatctcgaatacagaaagactgatgcattccggaggcggcggtggcgccggcggatggagccgctggaaaagactggaccggccgctgtgttcgcacttgagggtgcattgggcggagtgatggacgacaagtccgaggactcgatgtccgtctccactctgagctttggagtgaatcgccccacgatttcttgcatcttcgactatggcaaccgctaccacctccgttgctacatgtaccaagcacgggatctggccgccatggacaaagattccttctcggatccgtacgcaatcgtttcgttcctgcaccagtcccaaaaaactgtcgtggtcaagaatactttgaacccaacctgggaccaaaccctgatcttttacgaaatcgaaatcttcggcgagccggctactgtggcagaacaacctccatcgatcgtcgtggaactgtacgaccacgatacctatggcgccgacgaattcatgggtagatgtatctgtcagccatccctggaaaggatgcctcggctcgcttggtttccattgacccgcggatcgcaaccctcgggagagctccttgcgagctttgagctcatccaacgagagaagcctgccattcatcacatcccgggtttcgaagtgcaggagacttcgcgtatccttgacgagtctgaggacacggatctgccgtacccgccgccacagcgcgaggcaaacatctacatggtgccgcagaatatcaaacccgctctccagcggactgctatcgagatcctggcttgggggctccggaatatgaaatcctaccagctcgccaatatctcaagcccgtcgctggtggtcgaatgcggtggtcaaaccgtccaatcctgtgtcatcagaaacttgcggaagaatccaaacttcgacatctgcactcttttcatggaggtcatgctgccacgcgaagagctctattgcccgcctatcaccgtgaaggtcatcgacaatcggcagttcggacgacgcccggtcgtcggacaatgcactatccgctcccttgaatcgttcctgtgcgacccatactccgctgaatccccaagccctcaaggaggacccgatgacgtgtcactcctgtcacctggggaagatgtgcttatcgacatcgacgacaaggaacctctgatcccgattcaggaagaggaattcattgattggtggagcaagttctttgcttccatcggagaacgcgaaaagtgtggatcgtacctcgagaaggacttcgacacccttaaggtgtatgatactcagctcgagaacgtcgaagcgtttgaaggccttagcgacttttgtaacaccttcaagctctacaggggtaagacccaagaggaaactgaggatccgtcggtgatcggcgagttcaaagggctgtttaagatttaccccctgccggaggaccctgccatcccgatgcccccgcggcaattccaccaactggccgcccagggaccgcaagaatgtctcgtccgcatttacattgtgcgcgcgttcggtttgcagccgaaagacccaaatggtaaatgtgacccgtacattaagattagcatcggtaagaagagcgtcagcgaccaagataactacatcccttgcaccctcgaaccagtttttggcaagatgttcgagctgacctgtactctcccgctggagaaagatctgaaaatcaccctgtacgactacgacctcctgtcgaaggatgaaaagataggcgaaacggttgtggatctggaaaatagactcctttccaagttcggagcccgctgtgggctgccgcagacctactgcgtgtccggcccaaaccagtggcgcgatcagctccggccgtcgcagctcctccatctcttctgccagcaacacagagtcaaggctccggtgtaccggactgatagagttatgtttcaagataaagagtattccattgaggaaatcgaggccggacggatccctaacccccacctgggtccggtcgaagagaggctcgcgctgcacgtcctgcagcagcaaggactggtgccagagcatgtcgagtccaggcctctgtacagcccgctgcagccggatatcgaacagggaaagctgcaaatgtgggtcgatctcttcccaaaggccctggggcgcccggggccgccgttcaacatcaccccgcggcgcgcacgccggttctttctccggtgcatcatctggaatactcgcgacgtgatcctggacgacctgtcgctgaccggcgagaaaatgtcggacatctacgtgaagggatggatgatcggatttgaagagcataaacaaaaaactgatgtgcactaccggtcgctcggcggggagggaaacttcaactggagattcatcttccctttcgactacctgcccgccgaacaggtgtgcaccatcgccaaaaaggacgcgttttggagactggacaaaaccgagtcgaagattccggcaagagtggtgttccagatttgggacaacgacaagttcagcttcgacgatttcctgggtagcctgcagctggatctcaaccgcatgccaaaacccgcaaagactgccaaaaagtgctctcttgatcaactggacgacgccttccacccggagtggtttgtgtcgctcttcgaacaaaagaccgtgaagggctggtggccttgcgtggcggaagaaggggagaagaagatcctggccggcaagctggaaatgaccctggaaatcgtcgcggaatccgagcatgaagagcgcccagccgggcagggccgcgacgaacctaacatgaacccgaaactggaggacccgagacgcccagatactagctttctgtggttcacttcgccgtacaaaactatgaagttcatcttgtggaggcgcttccggtgggcaatcatcctgttcataatccttttcattctgctgctgttcctggccatcttcatctatgcctttccaaactacgccgccatgaaactcgtgaagccattcagc

SEQ ID NO: 10666 - DNA, 6243 bp, synthetic construct
  misc_feature 1..6243: note = source = /note="Description of Artificial Sequence: Synthetic coding sequence"
  source 1..6243: mol_type = other DNA
atgttatgttgcctcctggtgcgcgcaagcaatctgccttctgccaagaaggaccgtcgcagtgaccctgtcgctagcctaacttttcgcggggtaaaaaagcgcacaaaggtcatcaaaaacagtgtaaatcccgtgtggaatgaagggttcgagtgggatctgaaagggatccccctggatcaagggtctgagctacacgttgtggtgaaggaccatgagacgatgggtagaaatcgcttcctgggggaggcaaaagtgccactgcgcgaagtcctcgcaacaccgtcactgtcagcttctttcaatgctcctttgcttgatacaaagaagcaacctacgggcgccagcttagtcctccaggtgtcatatactcctttgcctggcgccgtgccactcttcccaccaccaacccctcttgagccttctcctacccttcccgatctcgacgtggtggccgataccggaggagaggaagacacggaggatcagggtctgactggagatgaagcagagccctttctggaccagtcgggcgggcccggagctcctaccacaccccggaagcttcccagcaggccccccccccattacccggggattaaacggaaaaggtcagcccccacaagtaggaagctgctgagcgacaagccgcaggactttcagatccgcgttcaggtcatcgaaggtcggcagctgcccggcgtgaatatcaaacctgtggtaaaggttaccgccgcaggccagactaagagaacacggattcacaaaggaaattcacccttgttcaatgagacccttttttttaacctttttgacagccctggggagctcttcgatgaacccatcttcatcaccgttgttgactccaggtcattacgaacagacgccttattaggcgagtttagaatggacgtgggaacgatttaccgcgaacctcgccacgcataccttcgtaagtggttgctgctcagtgacccagacgacttctcagccggagctagaggctacctgaagacttctttgtgcgtcctaggtcctggcgacgaggcccccttggaacgcaaagacccaagtgaggataaggaagatattgagagcaacctactaagacctaccggtgtagctctccgaggggcccacttctgccttaaagtgttccgagcagaagacttgcctcagatggacgacgctgttatggacaacgtcaagcaaatctttggctttgagtctaacaagaagaatctcgtcgacccttttgtagaggtgtcctttgcaggaaaaatgctgtgcagcaagatcctggagaagaccgcaaacccccagtggaaccagaatatcacccttcccgccatgtttccttcaatgtgcgagaagatgcggattcggataatcgactgggaccgtctgacccataatgacattgtagctacgacgtacctgtcaatgagcaaaattagcgcgccaggcggcgagatagaggaagaaccggccggcgctgtgaagcctagcaaagccagcgatctggacgactatcttggcttccttcccactttcggtccatgttatatcaacctgtatgggtcccctcgggaattcacaggattcccagatccgtataccgaactaaacacagggaagggggaaggcgtggcgtaccgtggccggctgctgctatcactcgagaccaagttggttgaacatagcgagcagaaggtggaagacctccctgcagacgatattctgcgagttgagaaatatctcaggcggagaaaatattccctgttcgcagctttctattcagccactatgctgcaagatgttgacgacgcaatccagttcgaagtgtccatcggcaactatgggaataagttcgacatgacctgcttgccactggcttcgaccacccagtactctcgggcggtgttcgacgggtgccattattactatctgccctgggggaacgttaagcccgtggtcgtgctgtccagttattgggaggatatcagccacaggatagaaacccagaaccaattgctcgggatcgcggacaggctggaagctggtctcgagcaagttcacttagctctcaaagcccagtgcagtaccgaggacgtcgacagcctagtggctcagctcacagacgagctcattgccgggtgttcccagcctctgggcgacatccacgagaccccttccgctacccatctggatcagtacctatatcagttgaggactcaccacctgagtcagatcaccgaggcggcgctggctctaaagctgggacactcagagctccctgccgctctggaacaggccgaagactggctgttgcgcctaagagctttggccgaagagccacagaattccctgcctgacattgtgatctggatgctgcagggtgataagagggtagcttatcagcgggtacccgcacatcaggtcctgttttccaggcgtggggcaaattactgtggcaagaactgcggcaaactgcagaccattttcctgaaataccccatggaaaaagttcccggggcccgcatgcccgtgcagattcgtgtgaagctgtggtttgggttgtctgtggacgagaaagagtttaaccagttcgctgagggcaaactgtccgtgttcgcagagacttacgaaaacgaaacaaagctggcgctcgtgggtaactgggggaccacggggttgacatacccgaagtttagcgacgtcaccggaaaaattaagttacctaaagactcattcagaccatccgcaggctggacctgggcaggagactggttcgtctgtccagagaaaactctgctccatgatatggacgccgggcatctttcattcgttgaggaagtgttcgagaaccaaacacgccttccaggggggcagtggatctacatgtcagacaattatacggatgtcaacggagagaaggtgctgcctaaagacgacatcgagtgcccactaggatggaaatgggaggacgaggagtggtcaacggatttaaatcgagccgtcgatgaacagggctgggagtattcaataactataccccccgaaaggaaaccaaaacactgggtgccggccgaaaaaatgtactatacccacagaaggcgtagatgggtaaggctgcggcggcgagacctgtcccaaatggaggctctcaagaggcacaggcaggcggaagccgagggcgaaggctgggagtacgcttcactgttcggatggaagttccacctggaatatcgtaagacagacgctttcaggcggcgccggtggaggagacgcatggagccgttagagaagacagggcctgcggccgtgtttgcacttgaaggcgcacttgggggggtcatggatgacaagagtgaggattccatgagtgtgtcaaccctgtcttttggagtgaatcggcccaccatatcctgtatctttgactacggaaatcgctaccacttgagatgctatatgtatcaggcacgggacctggctgctatggacaaggatagcttctcagatccttacgctatcgtctctttcctgcatcagtctcaaaagacagtcgtagtcaagaacactttgaacccaacttgggaccaaaccctgattttctatgagatcgagatcttcggtgagccagccacggttgcagagcagcctccttccattgtagtggagctgtacgaccatgatacttacggcgcggacgagtttatgggccgttgtatttgccaaccctcattggagcggatgcccaggttggcctggtttcccctcacccgtggatcccagccgtctggggagttactggcaagttttgagcttatccagagagaaaagcctgccattcaccatatccctggttttgaagtgcaggaaacctctagaatcctggacgagagtgaggacactgaccttccttacccgcccccacaaagggaagccaatatctatatggtgccacagaacatcaaacccgctcttcagcgaaccgcaatagagatccttgcatggggattgcgtaacatgaagtcgtatcagctggcaaatatctcttctccaagcttggtggtagagtgcggaggccagactgtgcagtcctgcgtgattaggaacctacgcaaaaaccccaatttcgatatttgcaccctgtttatggaggtgatgcttccacgagaggaactgtactgtccccctattacagtgaaagtaatcgacaatcgccagtttggccgcaggccggtagttggccagtgtaccatacggagcctagaatcttttctatgcgacccatacagtgcggagtctccaagcccccagggcggacccgacgacgtatcactgctctctccgggggaagacgttctgatcgatatagatgataaggagccactaatcccgattcaggaggaggagttcatagactggtggagtaagttctttgcttcgattggcgagagggagaagtgcgggtcctatctcgagaaagactttgatacactgaaagtttatgacactcaactggagaatgtggaggcttttgaggggctgtctgacttctgcaacacatttaagctttatcgcggcaagactcaggaggaaacggaagacccatccgtgatcggtgaatttaaggggctgttcaagatttacccgttgcctgaggacccggccatccctatgcctcccagacagttccaccagctcgccgcgcaagggccacaggaatgcctcgtgcgcatatatatagtgcgagctttcgggctgcagccaaaggaccctaatggcaagtgtgatccatacataaagatatcaatcggaaaaaaatcagttagcgaccaggataattacatcccttgcacgctcgaaccagtcttcggaaagatgttcgagcttacctgtaccttgcccctcgagaaagatctgaagatcacactgtatgactatgatttgctttcaaaagacgagaaaatcggcgaaacagttgtggacctcgagaatcgcttgctgagcaagtttggggcccgctgtggtctgcctcagacttactgtgtgtcgggtccaaaccagtggagagatcagctacgcccatcacagttgcttcacctgttctgtcagcagcaccgggttaaggcaccagtgtaccgcactgatagggtcatgttccaagataaggaatactctatagaggagatcgaggccggcagaatcccgaacccccacctgggtccggtggaggagcgactggcgcttcacgttttgcagcagcagggactggtgccggagcacgtagagagtcgccccttgtattccccactgcagcctgacattgagcagggcaaacttcaaatgtgggtcgacctgtttcctaaagcgttgggacgcccaggccccccgtttaatatcaccccaagacgcgccagacgcttttttttacgatgtatcatttggaacactagagacgtgattctggacgacttaagtttgacaggtgaaaagatgtcagatatttacgtaaagggatggatgatcggcttcgaggaacataagcagaagactgacgtgcactatcgcagccttggaggcgaaggcaatttcaactggcggtttattttccccttcgattaccttcccgcagagcaggtgtgcacaattgcgaagaaagatgccttttggcggctcgacaaaacggaaagcaagatccccgctcgcgtggtgttccagatctgggataacgataagttcagctttgatgacttcctcggcagcctacaacttgaccttaacaggatgcccaaacccgctaagacagccaaaaagtgctctctagaccaactcgacgatgcatttcatcctgaatggtttgtgtccctgttcgaacagaagaccgtgaaaggctggtggccttgcgtggcagaagagggcgagaaaaagatccttgccggcaagctagagatgaccctggaaatcgtagctgagtccgaacacgaggaacggccggctggccagggcagggacgagcctaacatgaatcccaaactggaggatccacgcaggccagacacttcttttctgtggttcacctccccctacaagaccatgaagtttatcctgtggcgcaggttccgttgggcaattatcctttttatcatcctgtttatcctgctgttgtttcttgccatctttatctacgcatttccaaactacgctgctatgaagttggttaaaccattttct

SEQ ID NO: 10667 - DNA, 6243 bp, synthetic construct
  misc_feature 1..6243: note = source = /note="Description of Artificial Sequence: Synthetic coding sequence"
  source 1..6243: mol_type = other DNA
atgctctgctgcctcctggtcagagcttcaaaccttccgtccgccaagaaagaccggaggtcggacccggtggcatccctgacttttcggggagtcaagaagcggaccaaggtcatcaagaactctgtcaatcccgtgtggaacgaaggcttcgagtgggatctgaagggcatcccgttggaccagggtagcgaattgcacgtagtggtgaaggaccatgagacgatgggtagaaaccggttccttggagaagcaaaggtgcctctgcgcgaagtgctggcaactccctccctctcggcctcgttcaacgcgccactgcttgatacgaagaaacagcccactggcgcttcgctggtgctgcaggtttcgtacacgccgctccctggcgcggtgcctctgtttccaccgccgacccctctggaaccctcccctactctgccggatctggacgtggtagccgatactggaggtgaagaggatacggaggatcagggcctcaccggtgatgaggctgaaccgtttctcgatcagtccggggggccgggcgcgccgaccactccccgcaagctcccttcccggccgccaccgcactacccgggaatcaagcgtaaaagaagcgcgccgacgtcgcggaagctgctctcagacaagccgcaggactttcaaatccgcgtgcaagtgatcgaaggacgccagctccccggagtgaacatcaaacctgtcgtcaaggtcaccgcggccggacaaactaaacgcactaggatccacaaagggaattccccgctgtttaatgaaacgctgttcttcaacctcttcgattccccaggcgaacttttcgacgaacctatcttcatcactgtcgtggattcacgctcgctgcggaccgatgccctgctgggcgagttccggatggacgtgggaactatttaccgggaaccaaggcacgcctacctccggaagtggttgctcttgtcagacccagacgatttctcggcaggtgcacgaggatatctcaaaacgtcgctgtgcgtgttgggtccaggtgacgaggcccctctggaaaggaaagacccgagcgaagataaagaagatattgagtccaatctgctccggccaaccggagtcgcattgcgcggagcccacttttgcctgaaagtgttcagagcagaagatctgcctcagatggacgatgcagtgatggataacgtcaaacagatcttcggatttgaatctaataagaagaacctcgtcgaccctttcgtcgaagtctcattcgccggaaagatgctttgctccaaaatcctggaaaagacggcgaatccgcagtggaatcaaaacatcaccttgccggccatgtttccgtcgatgtgcgaaaagatgcggatccggatcattgattgggatcgcctgacccataatgacatcgtggccactacctatttgtcgatgtccaagatcagcgcccccggtggagagatcgaagaagagccggcaggagctgtgaagccgagcaaggcgagcgatttggatgactacctcggatttctccctaccttcggaccgtgctacattaacctttacggatcaccacgcgaattcacgggtttccctgatccgtacactgaactgaacactgggaagggcgaaggcgtggcttaccgcgggcgccttctgctctcactggaaaccaagctcgtggaacactcggagcaaaaagtggaggacttgccagcagatgatattctgcgcgtggagaaatatctgagacgacggaaatacagcctgttcgctgcgttctacagcgccactatgctgcaagacgtggacgatgcaatccaattcgaagtgtccatcggcaactacggcaataagttcgacatgacctgcttgccgctggcctcgactacccagtactcacgcgcagtctttgatggatgccactactactacctcccatggggcaacgtgaaaccggtggtggtgctctcttcctactgggaagatatttcccaccggatcgaaactcaaaatcagctgctgggaattgccgatcggctggaagcgggactggaacaagtccatctggccctcaaggcgcaatgctcgactgaagatgtcgatagcctcgtggcccagcttaccgacgagctgatcgcggggtgcagccagccgcttggggacatccacgaaaccccctcagccacccaccttgatcaatacctctaccagctgagaacccatcatctcagccagattactgaggctgctctggccctgaagctcggccactcggaactgccagctgccctggagcaagcggaggattggctcctgcgcctgagagccttggcggaagaaccccagaattcgctgccagatattgtgatctggatgctccagggtgacaagcgggtggcataccagcgtgtcccagcgcatcaggtgctgttttcgagacgcggagctaactactgtggcaagaactgtggaaagctccagactattttcttgaagtacccgatggagaaggtgcctggcgcgaggatgccggtccagatcagagtgaagctctggttcggactctcggttgatgaaaaggagttcaatcaattcgcggaaggcaaacttagcgtgtttgctgaaacctacgagaacgaaaccaagctggctctggtcggaaattgggggactactggactgacctacccgaagttctcagacgtcactggaaagattaagctgccgaaggattcctttagaccttctgccggatggacctgggccggagactggttcgtgtgccccgaaaagaccttgctgcatgatatggacgccggacatctgtcatttgttgaggaggtattcgagaaccagacccggctcccgggaggacagtggatctacatgagcgataactacacggacgtcaacggggagaaggtgttgccgaaagacgacatcgaatgcccgctcggctggaagtgggaggacgaggaatggtcgactgacttgaaccgggctgtggacgaacaaggctgggaatactcaatcactatcccaccggaacgcaagccaaagcactgggtcccagccgagaagatgtactacactcacagacgccgccggtgggtgcgcctgaggcgccgggacctctcgcaaatggaagctctgaaacggcatcggcaagccgaggcggagggagaaggatgggagtatgccagcctgttcgggtggaaattccacctcgaataccgcaagacggatgcgtttcgccgcagacggtggcggcgacggatggagccactggaaaagactggtcctgcggcagtctttgctctggaaggagctctgggcggggtgatggacgacaaatccgaggacagcatgtccgtctcaaccctgagcttcggtgtgaacagaccaaccatctcatgcatttttgattacgggaaccgttaccacctccgctgctacatgtaccaggccagagatctcgccgcaatggataaggactcgttcagtgacccgtacgctatcgtgtcattcctgcatcagtcgcagaaaactgtcgtggtcaaaaacacgctgaatccaacctgggaccaaaccctcatcttctacgaaatcgaaatcttcggagaaccagcaaccgtggcggaacagccgccgtcgatcgtcgtggagttgtacgaccatgacacgtacggcgcagacgagtttatgggaagatgcatctgccagccgtcgctcgagcggatgccgcgcctggcgtggttcccactgacccgcggatcgcaaccgtccggtgagttgctggcctcctttgagctgattcaacgcgaaaaaccagctatccatcatatcccgggattcgaagtgcaggaaacttctaggatcctggatgagtcggaggacaccgacctgccgtatccaccgccgcaacgtgaagctaacatatacatggtcccacagaatatcaagcctgcactgcaacgcaccgcgatcgagatcctggcctggggactgcgcaacatgaagagctaccaactggccaatatctcgtcgccgtcacttgtggtagaatgcggcgggcagactgtgcaatcctgcgtgatccgcaacttgcgcaagaaccccaacttcgacatctgcactctctttatggaggtgatgctgccccgcgaggaactgtactgcccgcccattactgtgaaggtcatcgacaatagacagtttggacgcagacctgtcgtgggacagtgcaccatccgttcgttggaatcgttcctgtgtgacccttactcggccgagagtccatcacctcagggtggacccgacgatgtgtcgttgctgtccccgggcgaggacgtgctcatcgacatcgacgataaggagccactcatcccaatccaggaagaagaattcatcgactggtggtctaagtttttcgcgtccatcggtgagcgggagaagtgtgggagctacctggagaaggacttcgacactctcaaagtgtacgacactcagctggaaaacgtggaagcgttcgaagggctgtccgacttttgcaatacctttaagctctaccgaggtaaaacccaagaggaaaccgaggatcctagcgtgatcggtgagtttaaaggactcttcaagatttatcccctcccggaggatccagctatcccgatgccgccaaggcaattccatcagctggccgctcagggaccgcaagaatgtctggtgagaatctacatcgtccgagccttcgggcttcaacctaaggacccaaatgggaagtgtgatccctatatcaaaatctcaatcggaaagaaatctgtgtcagatcaagacaattacattccgtgcactttggagccggtgttcggtaagatgttcgagctcacctgtactctcccgcttgaaaaggatctgaagattaccctttacgactacgacctcctttccaaggatgagaaaattggtgagactgtggtagatctggaaaacaggctgctgtcgaaattcggtgcgcggtgcgggctgccacaaacctactgtgtctctggacctaaccagtggcgggaccagttgcgcccttcacagttgctgcacctcttctgccagcaacacagggtgaaggccccggtgtaccgcaccgatagagtcatgttccaggacaaggagtattcgatcgaagaaatcgaggcaggaagaattccgaacccgcacctcggtcctgtggaggagcggctcgcgctccacgttctccagcagcagggcctggttccggagcacgtcgaaagccgcccgttgtactcgccactgcagccggacatcgagcagggaaagctgcagatgtgggtggacctgttccctaaagccctcggccggccgggaccaccattcaacatcaccccacgtagagctcgccgcttcttcctccggtgcatcatctggaatacccgcgatgtcatcttggacgacctgtcattgaccggagagaagatgtctgacatctatgtcaagggatggatgattggcttcgaggagcacaagcagaaaactgacgttcattaccggtccctgggtggagaaggaaacttcaattggcggttcattttccctttcgattaccttcctgctgagcaggtgtgcactatcgccaagaaggatgcattctggcggttggataaaaccgagtcgaagatcccagcgagggtggtgtttcagatctgggacaacgacaaattcagcttcgacgacttcctgggatcgctgcaactggatctcaacagaatgccaaagccagccaaaactgccaagaaatgctcactggaccagctggatgacgcttttcatcctgagtggttcgtcagcctgttcgagcagaaaacggtgaaggggtggtggccttgtgtggcagaagaaggcgagaagaagatcttggcaggcaagctggagatgaccctcgaaatcgtggccgagtcggaacacgaggaacgcccagcgggacagggccgcgacgaaccaaacatgaacccgaaattggaggaccctcgccggccggatacgtccttcctgtggtttacttcgccttacaagactatgaagttcatcctgtggcggcgctttcgctgggccataattctgtttatcatcctgttcatcctgctcctgttcctggcaatcttcatctacgcgttccctaattacgcggccatgaaactcgtgaagcccttctcc

SEQ ID NO: 10668 - DNA, 6243 bp, synthetic construct
  misc_feature 1..6243: note = source = /note="Description of Artificial Sequence: Synthetic coding sequence"
  source 1..6243: mol_type = other DNA
atgctgtgctgtctgctggtgcgtgcaagcaatcttccttccgcaaagaaagacaggagaagcgatccagtggcgagcttgacctttaggggagtgaagaaacgcactaaggtcataaagaattcagtcaatcccgtgtggaatgaaggatttgagtgggacctgaagggaattccactggatcagggctccgagctccacgtggtggtgaaggatcatgaaactatggggcggaaccgatttctgggtgaggcaaaggtgccactgagagaggtcctggcgactccgtcgctgtcagcatcttttaacgcaccgctgctggatactaagaagcaacctactggagcatccctcgtcctgcaagtcagctacaccccactgcctggagcagtgccacttttccctccaccaacccctcttgagccaagccctactctgcctgacctggacgttgtggcagacaccgggggtgaagaggacactgaagatcaaggacttaccggagatgaagcggaacccttccttgaccaatccggtggacctggagcacccactaccccaagaaagctgccttcgcgacctccccctcactaccctgggataaaacgtaaacgcagcgcacccaccagccggaagctgctgagcgataaacctcaggatttccagattagggtgcaggtgatcgaaggacgacaactgcccggtgtgaatatcaagcctgtcgtcaaggtgacggcggcaggccaaaccaagagaactcggattcataagggaaattcccctcttttcaacgaaaccctgtttttcaatctgttcgatagccccggggaactttttgacgaacctattttcatcacggtggtggattcacgatcgctgcgaactgatgcactcctgggagaatttaggatggacgtcgggactatctaccgggagcctcgtcatgcctacctgagaaagtggctgttgctgtccgaccctgatgattttagcgcaggagcaaggggctatcttaagacttccctgtgtgtgctgggtccaggagatgaggcgccactggaaaggaaagatccgtccgaggacaaagaggacattgaaagcaatttgttgcggccgaccggcgtggcgctgcgaggtgctcatttctgtctgaaggtgtttagagcagaggatctcccgcaaatggacgacgcagtgatggataacgttaagcaaatctttggatttgaatcgaacaagaagaacctcgtggacccctttgtggaagtctcgtttgcaggcaaaatgctctgctcgaagatacttgaaaagaccgccaatccacaatggaaccaaaacatcaccctcccggcaatgtttcctagcatgtgtgaaaagatgagaatccgcatcattgactgggataggcttacccacaatgatatcgtggcaaccacttacctctcgatgagcaaaatcagcgcaccaggaggagagatcgaagaggagcctgctggggcggtcaaaccatccaaggcatctgatcttgatgattaccttggcttccttccaactttcggtccatgttacattaacctctacggttcgcctcgagaatttaccggatttccggacccatacactgaactgaacactggaaagggagaaggagtggcgtacagaggaaggcttctcttgtccctcgaaaccaagctggtggaacattccgaacaaaaggtggaggacctgccagcagatgatattcttagagtggaaaagtacctgcgcagacgaaaatactctcttttcgcagcattttactcagctactatgttgcaagacgtggatgacgcaattcaatttgaagtgtccattggaaattacggaaacaagttcgacatgacttgcctccctctggcaagcaccactcaatactcccgggcagtgttcgacgggtgtcactactactacctcccctggggaaacgtgaagcctgttgtcgtgctctcgtcgtactgggaggatattagccacaggattgaaacccaaaaccaactgcttggaattgcggataggttggaggcaggtctggaacaagtgcatttggcattgaaggcacagtgttccacggaggatgtcgattcgcttgtcgcccagctcaccgatgagctgatcgcaggatgttcccagccactgggcgacatacatgaaaccccgagcgcaactcatctggaccagtatctctaccagctccgcactcatcatctttcgcagatcaccgaggcagcactggcattgaagctgggccactcagaactgccagcagcccttgagcaagctgaagattggctgctgcgactgagagcactcgcagaagaaccccaaaattcgctccctgatatcgtgatttggatgctgcaaggcgataagcgtgtagcttaccagagggtgcccgctcatcaagtgcttttttcgagaaggggtgcaaactactgcggaaagaactgtgggaagctccagactatctttctgaagtacccgatggaaaaggtgcctggtgcacgcatgcccgtgcaaattcgggtgaaactttggtttgggttgtcggtcgatgaaaaggaattcaaccaatttgcagaaggaaagctgtctgtgttcgcagagacttacgaaaacgaaaccaaacttgcactggtgggcaactgggggaccaccgggttgacgtacccaaagttttcggatgtgaccgggaaaatcaagctcccgaaggattcgttcagaccatcagctgggtggacttgggcaggggattggtttgtgtgtcctgaaaagacgctgctccatgacatggatgcaggacacttgagcttcgtggaagaagtgtttgagaaccaaactcgacttcctgggggacagtggatatacatgagcgacaactacaccgatgtgaatggggaaaaagtgcttcctaaagatgacatcgaatgcccactggggtggaaatgggaagatgaggaatggtccaccgatctcaatagagccgtggatgagcaaggctgggagtactcgattaccattccacctgaacgtaaacctaagcattgggtaccagcagagaagatgtactatacccataggcgtcgccggtgggtgagactgcggcgcagagatctgtcacagatggaggccctgaagcgccatagacaggccgaagccgaaggagaaggatgggaatacgcgtccctgtttgggtggaagttccacctcgagtacagaaaaaccgatgcctttaggaggcgccggtggcgaagaagaatggagcctcttgaaaaaacgggtcctgccgcagtgtttgccctcgagggtgccctggggggtgttatggatgataaatcagaggactcgatgagcgtgtcgaccctctcgtttggggtgaaccgccccactatatcctgcatatttgactacggaaatcgctaccatcttagatgttacatgtaccaagcccgagatctggcggcaatggataaagattccttttctgatccctatgcaatcgtgtcctttctccaccagagccaaaagaccgtggtcgtgaagaatactctgaatccgacctgggaccagaccttgattttctacgaaattgagatttttggtgagccagcaactgttgcagaacaaccaccctcaattgtcgtcgaactgtatgatcacgacacgtacggtgccgacgaattcatgggaaggtgcatatgtcagccttcccttgaacgtatgccccgcctggcatggtttcctcttacccgggggtcccagccctcaggcgaactgctggctagtttcgagctcattcagcgtgaaaaacctgcgattcaccatattcctggcttcgaggtccaggaaacttcgaggatcctggacgaatcggaggatactgatctcccttaccctccacctcaaagagaggccaatatctacatggtgccgcagaacatcaagccggccctgcagcgaactgcaatcgaaattctggcgtggggattgcggaacatgaagagctaccaactggccaacattagctcccccagcctggtggtggaatgcggcggtcagactgtgcaatcgtgtgtgatacgaaacctgcggaagaatcccaattttgatatctgcacgttgtttatggaagtcatgctgcctcgagaagaactttactgcccaccaattactgtgaaggtgattgataataggcaatttgggcggcggcctgtggttggtcaatgtaccattagatcgcttgaatcctttctgtgtgacccatactcggctgagtcaccaagcccacaagggggccccgatgatgtgagcctcctgtcacctggtgaggatgttctcatcgacatcgacgataaggagccactgattccaatccaagaggaagaattcatcgattggtggtctaagttttttgcgtcgattggtgaacgcgaaaaatgtgggtcgtacctggaaaaggattttgatacgctgaaggtgtacgatacccagcttgaaaacgtggaagcctttgaaggattgtccgacttctgtaacacctttaagctctacagaggcaagacccaggaagaaactgaggatccctcggtcattggggagtttaaaggactcttcaagatttaccctctgccagaggatccagccattccgatgccacctagacagtttcatcagctcgccgcacaaggacctcaggaatgtctggtgagaatttacatcgtcagggccttcggccttcaacccaaggaccctaatggaaagtgtgacccttacatcaagatatcgattggtaagaagtcagtgtcggatcaagataactacatcccttgtacgcttgaacctgtatttggaaagatgttcgagcttacctgtaccctgcctctcgaaaaggatctgaaaatcaccctgtacgactatgacctgctttccaaggatgagaagattggtgaaaccgtcgtcgacttggagaacagacttctgagcaagttcggagctcgttgcggcctgcctcagacctactgtgtcagtggaccaaatcaatggagagatcaactgcgtccttcgcagctccttcaccttttttgtcagcagcatagagtcaaggcaccagtgtaccggaccgatcgagtgatgtttcaggacaaagaatacagcattgaagaaattgaagcgggaaggatccctaatccccacctcggacctgtggaggaacggcttgcgctccacgttcttcaacagcaaggccttgtgccagaacatgtggagtcgcgccctctgtactcgccacttcagcctgatattgaacaaggcaaacttcagatgtgggtcgatctgtttccgaaagcccttgggaggcccggacctccattcaacattactccgcgacgagcaaggagatttttccttagatgtatcatttggaacactagagatgtgattctggatgatctgtcgctcactggagagaagatgtctgatatctacgtgaagggttggatgatcggctttgaagaacacaagcagaaaacggatgtgcactaccggtccctcggaggtgaaggtaactttaactggcgattcatttttcctttcgactacctgccagccgagcaagtgtgcacgatcgctaagaaggatgcgttctggcggctggataagaccgagtccaagattccagcaagggtggtgttccagatttgggacaacgataagttctcctttgatgattttctcggctcgttgcaactcgacttgaatcgtatgcccaaaccggccaagactgctaaaaagtgctcactggatcaactggacgacgcatttcaccctgaatggtttgtctccctttttgagcaaaagactgtcaaaggatggtggccttgcgtcgcggaggaaggagaaaagaagattctggcaggaaagctggagatgacgctggaaatagtggcagagagcgaacacgaagaaagaccagccggacaaggtcgggatgaaccgaacatgaatcccaagttggaggatccaagacggccagataccagctttctttggtttacctcgccttacaagacgatgaagttcatcttgtggcgccggttcagatgggccattattcttttcattatcttgtttattcttcttttgtttcttgcgatcttcatatatgcgtttcctaactatgcagccatgaagctggtgaaacctttttcg

SEQ ID NO: 10669 - DNA, 6243 bp, synthetic construct
  misc_feature 1..6243: note = source = /note="Description of Artificial Sequence: Synthetic coding sequence"
  source 1..6243: mol_type = other DNA
atgctgtgctgcctcctggtccgggcatcgaatctgccgtcagcaaagaaggatagacggtcagatcctgtcgcctcgcttacctttcgaggtgtcaaaaaacgaaccaaggtgatcaagaattcagttaaccctgtgtggaatgaagggtttgaatgggatctgaagggcattcctctcgatcaaggttcggaacttcatgtggtcgtgaaggaccatgaaacgatggggcgcaaccgttttcttggcgaagcaaaggtcccccttcgggaagtgctcgcaacccccagcttgtcggcatcgttcaacgcaccacttcttgacaccaagaagcagcccaccggtgcttccctggtactgcaagtgagctacactccccttcccggagcagtgccgcttttccctcctcccaccccgctggaaccctcacccactctgccagacctcgatgtcgttgcggataccggaggtgaagaagataccgaagatcaaggccttactggggacgaagcagaaccatttctggaccaaagcgggggcccaggcgcacctaccactcctcgtaagctcccttcgcgcccacccccacattacccaggaataaagagaaagcggagcgcaccaacttcacgaaagctgctttcagataagccccaggattttcaaattcgggtgcaagtgattgagggtcgtcaacttccaggcgtcaacatcaagcctgtggtcaaagtgactgccgcaggtcagaccaagagaactagaattcataagggaaactcgccacttttcaacgaaactctcttctttaatctgtttgattcaccaggtgaactgtttgatgaacctatcttcattactgtggtcgactcacgaagccttcggaccgatgcactgcttggagagtttcgtatggacgtaggaactatttacagagaaccacgtcacgcgtacttgagaaagtggctcctgttgtccgatcctgatgatttctcagcgggtgctcgaggataccttaaaacgtccctttgtgtgcttggaccgggtgacgaggcccccctggaacgaaaggacccttcggaggacaaagaggatatcgaaagcaaccttctgcgcccgactggagtagccctccgcggcgcacacttttgtctgaaggtgtttcgcgcagaagatctgccgcaaatggacgacgccgtgatggacaatgtcaagcagatatttggatttgagtccaataagaaaaaccttgtcgaccctttcgtggaagtctcctttgcaggtaaaatgctctgttccaagattctcgaaaagacggcaaacccacagtggaaccaaaacattactcttcctgcaatgttcccttcaatgtgtgagaagatgagaatacgcataattgattgggatagactgacccataatgatattgtggctactacttacctctcgatgtcaaaaatctcggcaccaggaggagaaattgaagaagagccagcgggggcagtgaagcctagcaaagcatcggatttggatgactaccttggatttttgccgacgtttggaccttgctacatcaacctttacggatcgcctcgcgaatttactgggtttcccgacccatacactgagcttaataccggaaaaggtgaaggagtcgcgtaccgcggacgtctgctcttgtcccttgaaactaaactggtggaacattccgaacaaaaggtggaggacctcccagcggacgatatcctccgggtcgaaaagtaccttcggcggcgcaagtacagcctgtttgcagcattctattcggcaaccatgttgcaggatgtggatgacgcaattcaatttgaggtgtcgattggaaattacggcaacaagtttgacatgacttgtctgccattggcatccactacccagtatagcagggctgtgttcgacggatgtcattactactacctcccatggggcaacgtgaagcctgttgtggtgcttagctcctactgggaggatatatctcatcggatcgaaacccagaatcagcttctgggaattgcagatcgtcttgaagcaggactcgaacaagtccatctcgcacttaaagcccaatgcagcaccgaggacgtggattcgctcgtggcgcaactgactgatgaactgattgcgggatgttctcaacctctgggggacatccacgaaacgccttcggccactcacttggatcaatacctttaccagctgaggacgcatcacctgtcacaaataaccgaggccgcgcttgcgctcaagctgggccactccgagctgcccgccgcgctggagcaggcagaggattggttgttgaggctgagagcactcgccgaagaacctcaaaactcgctcccagacattgttatttggatgctccagggtgataaacgtgtggcataccagcgcgtgccggcacaccaggtgctcttttcgagacgaggcgcaaactactgcggaaagaattgtggaaagttgcagacgatttttctgaagtaccctatggagaaggtgcccggagcaagaatgcctgtgcaaattcgcgtcaagctgtggtttggactcagcgtggatgaaaaagagtttaaccagtttgccgaaggaaagctgtccgtgtttgcggaaacctatgaaaacgagactaagctggcccttgtgggaaactggggaactacgggcctgacttatccgaaattctcggacgtgactgggaagataaaactgccaaaggattcgtttcggcctagtgcaggatggacctgggcgggtgattggtttgtgtgtcccgaaaagactcttcttcatgacatggatgcaggacatctgtcgtttgtcgaagaggtctttgaaaaccagactcggctccctgggggacaatggatctatatgtcggacaattacactgatgtcaacggggaaaaagtgctgcctaaggatgatatagagtgtccccttggatggaaatgggaggatgaagagtggtccaccgaccttaaccgcgcagtggatgaacaggggtgggagtactccataaccattcctcctgaacggaagcctaagcattgggtgccggccgaaaagatgtactacacccatagacgcaggcggtgggtgcgtctccgtcgccgtgacctcagccagatggaagccctgaaaagacatagacaagcagaagcagagggagaaggctgggaatacgcctctctttttggttggaagttccatctggagtacagaaagaccgatgctttccgccgccgcagatggagacgcagaatggaacctcttgaaaagacggggcccgcagcagtgtttgcgctggaaggagcattgggaggcgtcatggatgataaatccgaagattcaatgtcggtttcaactctgagctttggtgtgaacagacccaccatcagctgtatctttgactacggtaacagataccacctgagatgttacatgtatcaagcgagagatctggcagccatggacaaggatagcttcagtgacccatacgccatcgtctctttcctccaccaatcgcaaaaaaccgtagtcgtcaagaatactttgaacccaacctgggatcaaaccctgattttctacgagatcgaaatctttggtgaaccggcgaccgtggctgagcagcccccttccatcgtggtggagctgtacgaccacgatacttacggggctgatgaattcatgggtaggtgtatttgtcagccctcccttgaacgcatgcctagactggcctggtttcctctgacccgcggttcacagccatcaggagaacttcttgcatcctttgaacttattcagagggaaaagcctgcgattcatcatatccctggattcgaagtgcaagaaacttctcgcatcctcgacgaatctgaggacactgatttgccgtacccaccacctcaacgagaagcaaacatttacatggtgccacaaaacattaaaccagccctccaacggacggcgattgaaatcctcgcatgggggttgagaaacatgaaatcgtaccaactggcgaatatcagctccccttcgcttgtggtcgaatgtggaggtcagactgtgcaatcgtgtgtgattcggaacctcagaaagaaccccaattttgacatctgcaccctcttcatggaggtgatgcttcctagagaggaactttactgtccacccatcacggtgaaggtcatcgacaatcggcaatttggccggcgcccagtggtgggacagtgcacgatacgaagcctcgagtcctttctgtgtgacccttactccgctgagtcacccagcccacaagggggcccagacgatgtgtcgttgctgtccccaggagaagatgtgcttattgacattgatgataaagaacctctcattcctattcaggaggaggagtttattgattggtggtcgaaattcttcgcatccatcggagaacgcgagaagtgtggttcgtaccttgaaaaggatttcgatacgcttaaggtctacgatactcaactggagaatgtggaagcattcgaaggtttgtccgacttctgcaacacgtttaaactgtaccggggaaaaactcaggaggaaaccgaggatcctagcgtgattggtgagtttaagggccttttcaagatttaccccctgcctgaggatcctgccattcccatgcctccgagacaatttcatcaattggcagcgcagggacctcaggaatgcttggtgcgcatctacattgtcagggcatttggactgcagccgaaagatccgaatggtaagtgcgacccgtacattaagatttcaataggcaaaaagtcggtatcagatcaggataactacattccatgtactctggaacctgtgtttggaaaaatgttcgaattgacgtgtaccctgccactcgaaaaggatctgaagataaccttgtatgattacgatcttctttcgaaggatgaaaagataggcgaaaccgtcgtggacctggagaatagacttctgtcaaagttcggagcgcggtgcggtttgccacagacttactgtgtgtcaggaccaaaccagtggcgggatcaactccggcctagccagctgctgcatcttttttgtcaacagcaccgcgtcaaggcacctgtgtaccggaccgacagagtgatgttccaagataaggaatactcgattgaagagattgaagccggaagaattccgaaccctcatctcggtcctgtggaagagagacttgcccttcatgtgctgcaacagcaaggcttggtcccagaacatgtggaatccagacccctctactctcctctgcaacctgatatcgagcagggtaagctgcagatgtgggtggatctgttccctaaggcactcggtcggcctgggccaccattcaacataactcccaggcgtgcgcgcaggttctttcttaggtgcattatctggaatacccgcgacgtgatcctcgacgatctgtcactgaccggggaaaagatgtccgacatttacgtgaaaggatggatgatcggctttgaagagcacaagcaaaaaacggatgtccattacaggtccctggggggagaaggaaactttaactggagattcatattcccatttgactaccttcctgcagaacaggtctgtaccattgcaaagaaagatgctttttggagactggataagacggaatccaagatccccgcaagagtggtttttcaaatttgggataatgacaagttctcctttgatgactttcttgggagtctgcaacttgatctgaaccgtatgcctaaaccagccaagaccgccaagaaatgttcgctcgatcagctcgatgatgcctttcatcccgagtggttcgtgagcctgttcgagcaaaagactgtgaaaggttggtggccatgcgttgcggaagaaggagaaaagaaaatcctcgccggaaagctggaaatgaccctggagatcgtggcagaatcggagcatgaagagcgccctgcaggtcaaggtcgcgatgaaccaaatatgaacccaaagctcgaggaccctaggcgtcctgatacctcgttcctttggtttacttcgccatacaagaccatgaagtttatcctttggcgtagatttagatgggcaatcatactctttatcatcctgtttatcttgcttctcttcctggcaattttcatttacgcatttccgaattacgcagcgatgaagttggtgaagcctttcagc

SEQ ID NO: 10670 - DNA, 6243 bp, synthetic construct
  misc_feature 1..6243: note = source = /note="Description of Artificial Sequence: Synthetic coding sequence"
  source 1..6243: mol_type = other DNA
atgctgtgctgcttgctcgtgcgagcatcaaatctcccgtcggcaaagaaagaccgccgctcggacccggtcgcatcccttacttttcgaggcgtgaagaaaaggaccaaggtgatcaaaaacagcgtcaacccagtttggaacgaaggattcgaatgggacctgaagggcattccacttgatcaaggatctgaactgcatgtcgtggtcaaggatcacgaaaccatgggacgaaatcggtttctcggagaagcaaaagtgccccttagagaagtgctggcaactccatcactttcggcttcgtttaacgcacctctgctggatacgaagaagcaacctaccggtgcctcgttggtcctgcaagtgtcctacaccccactgcccggggcagtccctctgtttcctccaccaacccctctcgaaccctcacctactctgccagatctcgacgtggtcgccgacaccggaggtgaggaggacacggaggaccaaggactgaccggtgatgaggcagaaccatttcttgatcaatcaggcggccctggtgcccctaccaccccgcggaaattgccatcacggccaccacctcactaccctggaatcaaacggaagcgttcggccccgacgtcccgcaagctccttagcgataaaccacaagacttccagattagagtgcaggtgattgagggtagacaactgccaggtgtgaacattaaaccggtcgtgaaggtgaccgcagctggacaaaccaagaggacccggattcataagggaaactcgccacttttcaatgaaactctcttctttaaccttttcgacagtcctggtgaattgttcgatgagcctatctttatcacggtggtcgattcaagatcgttgaggaccgacgccctgcttggggaatttcgcatggatgtcggaactatttaccgggaacctcgccatgcttaccttcggaagtggctcctgttgtccgacccagacgacttttccgcaggagcaagaggctacctgaaaacttctctttgcgttctcggtccgggtgatgaagcacctctggaaagaaaggatccttcagaggacaaagaggatatagaaagcaaccttctccgaccaactggagtggcgttgcggggagcgcatttttgcctgaaagtgtttcgggcagaggaccttcctcagatggacgacgcagttatggataacgtgaagcagatttttgggtttgaaagcaacaagaagaacctcgtggacccctttgtcgaagtgtcgtttgcaggaaagatgctctgttcgaaaatcctggaaaagactgccaatcctcaatggaatcagaacattactcttccagcaatgtttcctagcatgtgcgaaaagatgagaattcggataattgattgggacagactgacccacaacgatatagttgcgaccacgtacctttcgatgagcaaaatcagcgcgcccggaggtgaaatcgaggaggaacctgccggcgccgtgaagccgtccaaggcaagcgatctcgatgattacctcggctttcttccaaccttcggcccttgttacatcaacctgtacgggagtccgagagaattcactggatttcctgatccctacactgagttgaacactggtaaaggagagggagtggcttaccgcggacggctgctcctttcccttgagactaaactcgtggaacattcagaacaaaaggtggaagatctgccagcagacgatattctgagggtcgagaagtacttgaggcggcgaaaatacagcctcttcgcggccttctactcagcaaccatgctgcaagacgtcgatgatgcaatccaatttgaggtgagcatcggtaactacggaaataagtttgatatgacctgcctgccactggcctcaaccacccaatattcgagagccgtgttcgacggctgtcactactactacctcccatggggtaatgtgaagcccgtcgtggtgcttagctcctactgggaggacatctcgcatcggattgaaacccaaaatcaactgctcggaatcgcagaccgacttgaagcgggactcgagcaggttcacctcgcgctgaaggcacaatgttctactgaggacgtcgacagcctcgtggcacaacttactgatgaactcatcgcaggatgttcgcagccgcttggggacattcacgaaaccccatccgcaacccatctcgaccagtacctctaccagcttaggactcatcatcttagccagatcaccgaagccgcgctggccttgaaactcggccatagcgaactgcccgcagcccttgaacaggccgaggattggcttctgcggctgagagctctggcagaagaaccacagaattcgctcccagatattgtgatttggatgcttcagggagataagcgcgttgcatatcaaagagtccctgctcatcaggtgctgttttcgagaagaggtgcgaactactgtgggaagaattgcggaaagctgcaaaccatttttctcaagtaccccatggaaaaagtcccaggtgcacggatgccagtgcagatccgggtgaaactttggttcggactgtcggtggatgaaaaggagtttaatcagtttgctgaagggaaactgtctgtgtttgcggaaacttacgaaaatgaaactaaactcgcgctcgtggggaactggggcaccactggtttgacctaccctaaattctcggatgtcactgggaagattaaactgccaaaggatagcttcaggccctcagctgggtggacctgggcaggagactggttcgtgtgccctgaaaagacgctgcttcatgatatggacgcaggacacctctcatttgtcgaagaagtctttgaaaatcaaactcgccttccaggcgggcaatggatatacatgtcggacaactacaccgacgtgaacggggaaaaggtgcttcccaaggacgatattgagtgtcctctgggatggaagtgggaggacgaagaatggtccactgaccttaacagagcagtggacgaacagggttgggagtacagcataactatccccccggaaagaaaacctaagcattgggttcctgcagagaagatgtattacacccatcgtcgtcgtcgctgggtgcggctcagacgccgtgatctttcccagatggaagcactgaagcggcatcgtcaagcggaagcagaaggagaaggatgggaatacgcttcgcttttcggctggaagtttcacctggaatacagaaagactgatgcattccgtcgaaggagatggcgacgccgtatggaaccactggagaaaaccggcccagcagccgtctttgcactggaaggagcactcggcggcgtgatggatgataagagcgaggacagcatgtcggtgtcaactctgagctttggtgtgaacagacctaccatttcctgtattttcgactacggcaaccggtaccatctgaggtgctacatgtaccaggccagggatcttgctgccatggataaggactcgttctccgatccgtacgcaattgtttcgttccttcatcaatcgcagaaaactgtcgtcgtgaagaatacccttaatccgacctgggaccagaccttgatcttttacgaaattgagattttcggtgaacctgcaactgtggcagaacagcctccttcaattgtcgtagagctgtacgatcatgatacgtacggagcggatgagtttatgggccggtgtatatgccaacctagccttgagagaatgcctagactggcgtggttcccgcttacgcgcggatcgcagccatccggggaactgctcgcatcatttgagcttattcaaagggagaaacccgccatacatcatatccccggctttgaggtccaagagacgtcacggattttggacgagtcagaagataccgacctgccataccctcccccacaacgagaggccaatatctacatggtgccacagaacatcaaacctgccctccagcgaaccgccatagagattcttgcctggggactccgtaacatgaaatcctaccaattggctaacatatcttcaccgagcctggtggtggaatgtggagggcaaacggtccagtcctgtgtgattaggaatctcagaaaaaaccctaacttcgatatttgtacgctgtttatggaagtcatgcttcctcgggaggagctctactgccctcctatcaccgtcaaagtgatcgataataggcaatttggccgcagaccagtcgtgggccagtgtactattcgctcgctcgagagcttcttgtgtgatccttacagcgcggaaagcccttcccctcaaggaggaccagacgatgtttcgctcctgtcaccaggagaggatgtgcttatcgacatcgacgataaagaacctctgattccgattcaagaagaagagtttatcgactggtggtcgaaattctttgcatcgattggtgagcgtgaaaaatgtggatcctaccttgagaaagattttgatactcttaaggtgtacgatacccagttggagaacgtggaggcattcgaaggactctcggacttttgtaacacgttcaagctgtacagaggaaagacgcaagaggaaactgaagatcctagcgtgatcggggagtttaagggccttttcaagatctaccctttgcccgaggaccctgcaattccaatgccccctaggcagttccatcagctcgcagcacagggtcctcaggaatgcttggtgcggatctacatcgtccgggcatttgggcttcagcctaaagatccaaacggtaaatgtgatccatacatcaagatctcaataggaaaaaagagcgtgtctgatcaagacaactacatcccttgtaccctggagccagtctttggaaagatgtttgagctcacctgtacgcttccattggaaaaggatctcaagatcactctgtatgattacgacctgctttctaaggatgaaaagataggggagactgtcgtggatttggaaaaccgccttctttccaagtttggggcacggtgcggacttccccagacgtactgtgtgtcggggccaaatcaatggcgtgatcaattgcgaccatcccagctgctgcatctgttttgtcaacaacatagagtaaaggcacctgtgtatcgcactgatagggtgatgtttcaggataaggagtactccatcgaagaaattgaagcaggaagaattcctaacccgcatctgggtccagtggaggagcggctggcccttcatgtgcttcaacagcagggtcttgtgccggaacatgtggagtcgcgaccgctgtactcgccgttgcaacccgacattgaacaaggcaaactgcagatgtgggtggatctgtttcctaaggcgctggggcgccccggtcctccttttaacattacgccgaggcgcgcaaggagattctttcttcgatgtatcatttggaacactcgagatgttattcttgatgatctttcattgacgggggaaaagatgtcagatatctatgtcaaggggtggatgattggatttgaagaacataagcaaaagaccgacgtgcattacaggtccctcggcggagaaggcaatttcaattggagatttatctttccattcgactaccttccggctgaacaagtgtgtacgatcgcaaagaaggatgcattttggaggttggacaagactgaatccaagatccctgccagagtggtctttcagatttgggataacgataagttttcctttgatgatttcctcggttccttgcaactggacctgaatcggatgccgaagccagcaaagaccgctaagaagtgtagcctggaccaactcgacgacgcatttcatccagagtggttcgtgtcactgtttgagcagaaaaccgtcaagggatggtggccgtgtgtcgctgaggagggagaaaagaagatacttgcaggcaagctggagatgactcttgaaattgtcgccgaaagcgagcacgaagagcggcccgctggccagggccgtgatgagcctaacatgaatcctaaactggaagatcctagacggcccgatacttcgtttttgtggttcacttccccgtacaagaccatgaagtttattctgtggcgcaggttccgatgggcaattatcctgttcatcatacttttcattcttcttctgttccttgctattttcatttacgcatttccaaattacgcagctatgaagctcgtaaagccattttcc

SEQ ID NO: 10671 - DNA, 6243 bp, synthetic construct
  misc_feature 1..6243: note = source = /note="Description of Artificial Sequence: Synthetic coding sequence"
  source 1..6243: mol_type = other DNA
atgttgtgttgcctcctggtgcgtgcctccaacctgcccagtgcaaaaaaggacaggcggtcagatcctgtggcttcactgactttcagaggggttaaaaaaagaaccaaggtgatcaaaaactccgtgaacccggtgtggaacgagggattcgagtgggacctgaagggcatccccctagaccagggtagcgagttgcatgtcgtcgtgaaggaccacgaaacaatgggccgtaatagattcttaggcgaggccaaagtgccactcagggaggtgttggcaactccctccctgtccgcatccttcaacgcccccctgctagatactaaaaaacagccgacaggcgccagcctggttcttcaggtgtcctatactcctctgcctggtgccgtgcccctgtttcccccccctacaccattggaaccctcccccactctgccggatcttgatgtggtggctgacacaggcggtgaagaagataccgaagaccagggacttaccggtgatgaggccgagcccttcctggatcagagcggaggcccaggcgcccctacaacgccaaggaagctgcccagtagaccccccccacattacccagggattaagagaaaaagatctgccccaacttcccgcaaattactttctgataaacctcaggattttcaaataagagtgcaggtgattgaggggcgacagcttcccggggtcaacatcaagcctgtggttaaagttaccgctgcaggacagacgaaacggacccggatccacaaaggcaattcaccactgtttaacgagaccctgtttttcaacctattcgacagtcccggggagttattcgacgaacctatatttatcacagtggtggacagccgctcactgaggacagacgctttacttggcgagttccggatggatgtaggtactatttatcgtgagcctagacatgcttacttgcgcaagtggctcctgcttagcgaccctgacgatttttctgccggcgcgaggggctacctgaaaacatctttatgtgtattagggcccggcgatgaggctcccctagagaggaaggaccccagcgaagacaaagaggacatcgaatcaaatctactcagaccaacgggagtggccctgcggggggctcatttctgccttaaggtcttcagggcagaagatctgccccagatggacgacgcggttatggataatgtcaagcagatctttggattcgagagcaataagaagaacctggtggatccctttgtggaagtgtcgtttgctggtaaaatgctgtgcagcaagatcctggagaaaacagcaaacccccaatggaatcagaacatcaccctgcccgctatgttcccgtccatgtgcgagaaaatgcgcattcggatcatcgattgggaccggctaacacataatgatattgtagcgactacctatctttccatgtcgaagatctctgctccagggggtgagattgaggaggagcccgctggggcggtaaagccaagcaaagcctcagaccttgacgattatctcgggttcctccctacctttggcccctgctatataaacctgtacggctcacctagggagttcactggattcccagacccttacaccgagttgaacactggaaaaggcgaaggagttgcttacagaggccggctgctcttgtcactggagaccaaactagttgagcacagcgaacagaaggtcgaggatcttcccgctgatgatattcttcgagtcgaaaagtacctgcgccgcaggaagtactctctgtttgcagccttctattccgcaaccatgctgcaggatgtggacgatgcaatccagttcgaagtctccatcggcaactatggaaacaagtttgacatgacttgtcttcccttggcatccacaactcagtattctcgcgcggtgttcgatgggtgtcactattattatctcccctgggggaatgtaaagcccgttgtagtcttgtcctcatactgggaagatatttctcaccgcatagagacacaaaaccagttattaggtatcgctgataggctggaagccggcttggagcaggtccatttggcacttaaggcccagtgctctacagaggacgtggacagcttggtcgctcagctgactgacgaacttatagcaggatgcagccagccacttggtgatatacatgaaacaccgtctgctactcacctcgaccagtatctatatcagctgcggacccatcacctgtctcagatcaccgaggcagcactcgcactgaagctgggccacagtgagctgcctgcggcgcttgaacaggctgaagactggctgttacggcttagggccttggcagaggaaccccagaattcactgcccgacattgtgatctggatgctgcagggcgataaaagagtggcataccaacgcgtgccagcccaccaggtgctattttcgaggagaggcgcgaattactgtgggaaaaattgcggaaagttgcagaccatattcctcaagtaccctatggagaaagtcccaggggccaggatgccagtccagatcagagtgaagctgtggttcggactgagcgttgacgaaaaggaattcaaccagtttgcagaagggaagttgtccgtattcgcagagacgtatgagaacgagacaaagttagcccttgtgggtaattgggggactaccgggctgacgtaccccaaattctctgatgtgacagggaaaatcaagctccccaaggacagctttagaccctcagcgggttggacgtgggcgggagattggttcgtctgcccggaaaagactctgctacatgatatggatgcggggcacctctctttcgtggaagaggtattcgagaaccagacccgcttgccagggggccagtggatctacatgagcgataactacaccgacgtgaacggggaaaaggtgcttcctaaggacgacatcgagtgccctttggggtggaagtgggaggatgaggaatggagtaccgacctcaacagagctgtggacgaacagggctgggaatactccatcactattccccctgagaggaaacctaagcactgggtccccgccgaaaagatgtattatacgcacagacgaaggcgatgggttcgactgcggcgtcgcgatctgagtcagatggaggcgctgaaaaggcatcgtcaggcagaagctgaaggggagggctgggagtatgcaagtctgttcggctggaaattccatctggagtacaggaagacagatgccttcaggagaaggcgatggaggagaagaatggagcccctggagaaaaccggtcccgctgctgtgtttgcacttgagggtgcgctgggaggggtgatggatgataagagcgaggacagcatgtccgtgtcaacactatccttcggggtcaaccggcctaccatttcgtgcatctttgattatggtaacagatatcacctcaggtgttatatgtaccaagcccgcgacctcgctgccatggacaaagactctttctcagatccctatgccatcgtcagctttctgcatcagagccagaagacagttgtggtgaagaataccttaaatcctacgtgggatcagactcttatcttctatgagatcgaaatctttggagaaccagcaacagtcgcggagcagccaccctctattgtggtggagttatatgaccacgatacttatggcgccgatgaattcatgggccggtgcatctgccagccgagtctcgaaaggatgccacgcctcgcatggtttcctttgaccaggggatctcaaccaagtggggagttactcgcaagcttcgaactgatccagagagagaagcccgcgatccaccacataccaggattcgaggtccaggagaccagtcgcattctggacgagtctgaagacacggatctcccttacccgccgccacaaagggaggctaatatttacatggtgccccagaatattaaaccggctcttcagcgaactgctattgaaatccttgcctggggtctgagaaacatgaagagctaccaactagccaatattagcagtccttcactggtggtggaatgtggcggccagaccgttcagagctgcgtgattcggaatcttcgcaagaaccccaattttgacatttgcaccctctttatggaggtgatgttgccccgtgaggagctttactgcccaccaattactgtaaaggtgatcgacaaccgtcagtttggtcgacgacccgtagtgggccagtgcaccatccgatccttggagagctttctgtgtgatccatattcggctgaatcaccttccccgcaggggggcccagacgatgtttcccttctcagtcccggggaagacgtgttgatcgatattgacgacaaagaaccactcatccctattcaggaggaggaatttatcgattggtggagtaagtttttcgccagcatcggtgagagggagaaatgtgggtcttatctggagaaggatttcgataccctgaaggtctatgatacacagctcgaaaatgtggaagcctttgagggcctttccgacttctgcaatacattcaagctttatcggggcaaaacgcaggaggagaccgaggacccgagcgtgataggggagttcaagggcctgtttaagatttatcctcttcccgaggaccctgccatacccatgcctccaaggcagtttcaccagctcgctgcccagggcccccaagagtgtttggtcaggatctacatcgtccgcgccttcggattgcaaccaaaggaccctaacggcaagtgcgacccatatatcaagatctccatcggcaaaaagtccgtgtccgaccaagacaattacattccatgcacattagagcccgtctttgggaagatgttcgagctgacctgcacccttcccttagaaaaggacctgaaaatcaccctgtatgactacgacctgctgagcaaggatgagaaaataggagagaccgtcgtggatctcgaaaataggctcctctctaaatttggagcccgatgtggtctcccgcagacttattgcgttagcggcccgaaccagtggcgcgatcagcttcgccctagccagctgttacacctcttttgccagcagcaccgcgttaaagcccccgtgtatagaaccgatcgcgtgatgttccaggacaaggagtacagcatcgaggagattgaagccggccgcatcccaaatccccacctgggaccagtggaagagcgcctagcattgcacgtgttgcagcagcagggactggtgcccgagcacgtggaatcaaggcccctgtatagtcctctgcaacccgacattgaacagggcaagctgcagatgtgggtcgacctgtttcctaaggccctcggaaggcccggaccgcccttcaacatcacgccgcgtcgggcacggaggttctttctgaggtgcattatctggaacacccgcgatgtgatactggatgacttgtccctgacaggggaaaagatgtctgatatttatgttaagggatggatgatagggttcgaggagcataaacagaagaccgacgtgcattatcggagccttggcggtgagggcaactttaattggcgtttcatctttccctttgactatctgcctgctgagcaggtctgtacgatagcaaagaaagatgccttttggcggctggacaaaaccgagagcaagatccccgccagagtcgtgttccagatctgggacaatgacaagttttctttcgacgactttctgggttctctgcaactcgacctgaataggatgcctaagcctgctaagaccgccaagaagtgcagcctggatcagctggatgatgccttccaccccgaatggttcgtgagcctgttcgaacagaagaccgttaaaggctggtggccatgtgtggccgaagaaggcgaaaagaaaatcctggccggaaagcttgagatgaccctcgagatcgtggccgagagcgagcatgaggaacggccagccggccagggccgggatgaaccaaatatgaatcccaagctcgaggatccgcgcagacctgatacgtcctttctttggttcacctctccgtataagactatgaagttcatcctgtggcgccgatttcgttgggccataatcctctttattattctattcattcttcttctcttcctcgcgatcttcatatatgcctttccaaactatgctgctatgaagctcgtaaaacccttcagc

SEQ ID NO: 10672 - DNA, 6243 bp, synthetic construct
  misc_feature 1..6243: note = source = /note="Description of Artificial Sequence: Synthetic coding sequence"
  source 1..6243: mol_type = other DNA
atgttgtgctgtctccttgtgagggcctcaaatcttccctccgcaaaaaaggaccgtcggtctgacccggtggcctcactgacgtttagaggggtgaaaaagaggacaaaagtcatcaagaactcagtcaacccagtgtggaacgagggttttgagtgggacctgaaggggattccattagatcagggctctgagctgcatgttgtggtgaaagaccatgagaccatgggacggaataggttccttggagaagcgaaggtcccgttgcgagaggtgctggccacaccctcgctgtcagcttcctttaacgctccgctgctagatacaaaaaagcagccaaccggggcatcattggtcttgcaggtctcttacacaccgctgccgggtgcagtccctctcttcccaccgcccactcccctggagccatctcccactcttccagatcttgatgtggtagctgataccggcggagaggaggacacagaagatcagggcctgactggtgatgaagcggagccttttctagaccagtccgggggcccaggtgcgcctaccactccccggaagctccccagccggcctccgccgcactaccccggcatcaaaagaaagcgtagcgcaccgactagcaggaagttgctttctgacaaaccccaggattttcaaattagggtgcaggtaatcgagggaaggcaactgcctggcgtcaatatcaagcccgtcgttaaggtcacggctgctggccagaccaagcggacccgaatccataaagggaattcacccttatttaacgaaacattgtttttcaacctgttcgacagtcccggtgagcttttcgacgagccaattttcataacagtcgttgactcaaggagcctacggacagacgcgctccttggagaatttcgcatggacgtaggcactatatatagagagcctcgccacgcttatttaaggaagtggttactgctttctgaccccgacgacttctcagcaggcgctagggggtacttgaaaacttccctgtgtgttttggggcccggcgacgaagctccactcgaaaggaaggatccgtcagaagacaaagaggacatcgaaagcaaccttctcaggccgacaggcgtcgcgctgaggggggctcatttctgcctgaaggtttttcgtgctgaggacctgcctcagatggatgatgccgtcatggataatgtaaagcagatattcggtttcgagagcaacaaaaaaaacctagtggaccctttcgttgaagtgtcctttgccgggaagatgctgtgttcaaagatcctcgaaaagactgcaaatccccaatggaatcaaaatataacacttcccgccatgttccccagtatgtgcgagaaaatgagaatccgcatcatcgattgggatagactgacccacaacgatatcgttgctacgacctacctatccatgagcaagatctccgccccaggcggtgagattgaagaggagcctgcaggtgctgttaaaccgtccaaggcctctgacctggatgactatctgggatttctgcccactttcgggccctgttacataaacctgtatgggtcaccccgcgagttcaccggctttcccgacccctacactgaactcaataccgggaaaggtgagggcgtggcgtataggggcaggctcctgctgtctcttgaaacgaaactggtggagcactcagaacagaaagtcgaagaccttcctgccgacgacatcctgcgcgtggaaaagtacctcaggcgcaggaagtattctttgttcgctgctttttactccgccactatgcttcaggacgttgacgatgcaatacagttcgaggtgtccatcggaaattacggaaacaaatttgacatgacctgtttgccactggcatccactactcagtacagtcgggccgttttcgacggttgccactactactacctcccctggggcaacgtgaaaccggtcgtggtcctgagcagctactgggaggatattagccaccggattgagacacagaaccagctgttagggatagccgatcgcctggaggcagggcttgaacaggtgcatctggcgttaaaggcacagtgcagcactgaggacgtggatagtttggtagctcagctgacggatgaactgattgctgggtgcagccaacctctcggagacatccatgaaactccttcagctacacacttagaccagtatctgtatcagcttcggacacaccacctctcacaaatcacagaggccgctctagctctgaagctgggtcactccgaactcccagctgccctcgaacaggcagaggactggctgttaagactcagggcgctggccgaagagccccaaaatagcttgcccgatattgtaatctggatgttgcagggcgacaagcgagtggcatatcaacgagtaccggctcatcaggtgctgttcagccgcaggggcgccaactattgtggcaagaactgcggtaagttgcagacgattttcttaaagtatcccatggagaaggtgccaggcgcgcggatgcctgtccagatccgggtcaagctatggttcgggctctctgtcgatgaaaaggaattcaatcagttcgctgagggaaaactgagtgtctttgcggaaacttatgagaatgagacaaagcttgcgctcgtgggcaactggggcaccaccggcttaacatatccaaagttcagcgacgtgacgggcaaaattaagctacccaaggattcattccggccttccgccggatggacatgggccggcgactggttcgtgtgtcctgagaagacgctgctccacgacatggacgccggacatctctctttcgttgaagaggtcttcgaaaaccagaccagactgcccggaggacagtggatttatatgtctgataattacactgacgttaacggcgaaaaggtgctccctaaagacgatatcgagtgtccattgggatggaaatgggaggatgaagagtggtccacggacttgaaccgcgctgtcgacgaacagggatgggaatattccattaccattccccctgagcggaagccaaaacattgggtgcctgcggagaagatgtactatacccataggcggcgccgctgggtgagattgcggcggagggacctgtcacagatggaggcccttaaaaggcatcgccaggccgaagccgaaggggaagggtgggagtacgcatcactcttcggatggaagtttcaccttgaataccgtaagaccgacgcctttagacgccggcgctggagaagaagaatggagccactcgaaaaaaccggccctgccgcagttttcgcactcgaaggggccttaggcggcgtgatggatgataaatctgaggactctatgagtgtgtcgactctgtcgtttggtgtaaatcgcccaacgatcagctgtatctttgattacgggaatagatatcacctcaggtgctatatgtatcaggccagagatttggccgctatggataaggacagcttctcggacccatacgccatagtgagctttctccaccagtcgcaaaaaactgtggtagtcaagaatacgttgaatcccacatgggaccagaccctgattttctatgagattgaaatcttcggagagcctgcaactgtagccgagcagccacctagtatcgtggtggagctgtacgaccatgatacctatggcgccgatgaatttatgggacgttgcatttgccaacctagcttggagagaatgccaaggctggcctggttcccgttaacgcggggctctcaaccctccggagaacttctggcctcattcgaactgatacagcgcgagaaaccggcaattcatcatatccccggctttgaggtccaggagacaagccgtatcctagatgagtctgaggatacagacttgccctatccaccccctcagcgggaggctaatatatacatggtccctcagaatataaaacctgcacttcagaggactgccattgaaatacttgcttggggcttgcggaacatgaaatcctatcaattggctaacattagttccccatctctggtagtggagtgcggaggacaaacagtgcagagttgtgtgatcaggaacctgcgtaaaaacccaaacttcgatatttgcacactctttatggaagtaatgctcccccgggaggagctatattgtcccccaatcactgttaaggtcatcgacaatcgccagttcggacggcggccagtcgtggggcagtgtacgattaggagtttggagtcatttctgtgcgacccgtattctgcagagtcaccgagccctcaaggcggcccagatgatgtcagcctcttatctccaggggaggacgtgctgatcgacatcgacgataaagagcccctgattcctattcaggaagaagaatttattgattggtggtctaagttttttgcttccatcggggagcgagagaagtgcggtagctacttggagaaagacttcgatacgctgaaggtgtacgacacgcaactcgagaacgtcgaggcctttgagggtctctcagacttttgtaatacgttcaaactttatagaggcaagacccaggaggagaccgaggatccgtccgtcattggtgagtttaagggtctgttcaaaatctatcctctccctgaagaccccgcaatccctatgccgccaaggcagtttcatcagttagccgcccaaggccctcaggagtgtttggtccgcatctacatagtgagagccttcgggctgcagccgaaggacccaaatggcaaatgcgacccttacattaaaatcagtatagggaagaaaagtgtgagtgaccaagacaattacatcccctgcaccttggagcctgtgtttggaaagatgttcgagctcacctgtactcttcctcttgagaaggatctgaagatcacactttacgattatgacttgctgtctaaagacgagaagatcggcgaaacggtagtcgatctagagaatcggttgcttagcaagttcggagcgcggtgcgggctacctcagacatactgcgtctctgggcctaatcaatggcgcgatcagctaaggccatctcagctattgcatctgttttgccagcagcatcgagtgaaggcccctgtgtaccggactgatcgtgtgatgtttcaagataaagaatattccatcgaggagatcgaagcagggagaataccgaacccccacttgggcccagttgaagaacgcctggcactccacgtcctccaacaacagggtctggtaccagagcacgtggaatcaagaccactctactcccccctgcaaccggacatagaacaaggaaagctccagatgtgggtggacctatttcctaaggccttgggccggccagggcctccttttaacattacaccgcggcgcgcccgccggtttttcttgcgctgcataatttggaatacaagggacgtgatcctcgacgatctgagccttacaggcgagaaaatgtccgatatctatgtaaaaggatggatgatcgggtttgaggagcacaaacaaaagactgatgtccactatagatccctgggcggagaagggaattttaactggcgtttcatctttccattcgactatctgcccgcggaacaagtttgtacaatcgcaaagaaggacgccttctggcggctggacaagacagaaagtaaaatacccgcccgtgtggtgttccagatctgggacaacgataagtttagttttgatgacttcctgggctcactgcagttggatttgaacaggatgccaaagccagccaagacagctaaaaagtgttccctcgaccaacttgacgatgcattccaccccgagtggtttgtctcgctcttcgaacagaaaacagtgaagggttggtggccctgtgtggccgaggagggagaaaagaaaatactggccggtaagttggaaatgactctggaaattgttgctgagtccgaacatgaagaaaggccagccggacaaggacgcgacgagccaaacatgaaccccaagctggaagatccgagacgtccagacaccagcttcctctggtttacttcaccttacaagaccatgaaatttatcctgtggcgcaggttccgctgggctattatcctgttcatcattctgtttattctgctgctgttccttgccatttttatttatgcattccctaattatgctgcaatgaagctggttaaaccattttca

SEQ ID NO: 10673 - DNA, 6243 bp, synthetic construct
  misc_feature 1..6243: note = source = /note="Description of Artificial Sequence: Synthetic coding sequence"
  source 1..6243: mol_type = other DNA
atgctgtgctgcctgcttgtgcgtgctagtaacctgccgtcggcgaagaaagatcgcagatcggaccctgtggccagcctgaccttcaggggggtcaagaaaagaactaaagtgatcaagaactcggtcaacccagtgtggaatgagggattcgagtgggatctgaaagggatcccacttgaccagggcagtgaactgcacgtggttgtcaaggaccatgaaacgatggggcggaacagattcctgggtgaagcgaaggtgcccctgcgcgaagtgctcgctacgccatccctctccgcgtccttcaatgccccgcttctggacaccaagaagcagccaacgggcgcttccttggtgctgcaggtgtcttacaccccactgccgggtgcggtcccgcttttcccgccgcctacgcctctggagccgtcccccaccttgcctgacctcgacgtggtggccgacactggcggagaggaagatacggaagatcagggtctgaccggagacgaagccgagccgttcctcgatcagtcaggcggaccgggcgcacctactacccctagaaaactgccgtcccgcccgccaccacactacccgggaatcaaaaggaagagatccgctccgacttcacggaagctcctgtcagataagccccaggactttcaaatcagagtccaagtgatcgaaggacgccagctccctggtgtgaacatcaagcccgtcgtcaaggtgaccgccgcaggacagaccaagagaacccggattcacaaaggtaattcccccttgttcaacgaaaccctgtttttcaatttgttcgattccccaggagaactgttcgacgaaccgatctttatcaccgtggtcgacagcagatcgctgaggactgacgctctgctgggagaatttaggatggatgtgggaaccatttacagggagccgcgccacgcctacctcagaaagtggcttctgctgtccgaccctgacgacttcagcgccggagcccgcggataccttaaaacctcgctctgcgtgctgggtccaggcgacgaggccccgctggaacggaaagaccccagcgaagataaagaggacatcgaatccaaccttctccgcccgaccggtgttgcactgcggggagcgcatttctgtctgaaggtgttcagagcggaagatctcccacaaatggatgacgccgtgatggacaatgtcaagcaaatcttcggatttgaatcgaacaagaagaatctcgtcgacccatttgttgaagtctcgttcgcgggcaagatgctgtgttctaagatactggaaaagactgctaatccacagtggaaccagaacatcactctccccgcgatgtttccatctatgtgcgaaaagatgcggatccggattatcgattgggaccggcttacccacaacgatatcgtggccaccacttacttgtctatgagcaaaatcagcgccccgggaggagaaatcgaagaggagcctgctggcgcggtcaagccctcaaaggcttcagaccttgatgattacctggggttcctcccgacttttggaccgtgctacatcaatctgtacggaagcccacgggaattcaccggatttccggatccgtacactgaattgaacaccgggaaaggtgagggagttgcctaccgggggagactgctgctgtcactcgagactaagctggtcgaacattcggagcaaaaagtggaggacttgccggccgacgatatcctgcgcgtcgaaaagtacctccgcaggcggaagtactcactgttcgccgccttctactccgcaactatgctgcaggatgtggatgacgccatccagttcgaagtgtccatcggcaattacggcaataagttcgacatgacctgcctgcctctggcatcgacgacccagtacagccgggcagtgttcgacggatgtcattactactacttgccgtgggggaacgtgaagccggtcgtggtgttgtcatcatactgggaagatatttctcaccggatcgagactcagaaccaactgctcggaatcgccgatagactggaggcgggcctcgagcaggtccacctggcgctgaaggcccaatgctccacggaggatgtggatagcctggtggcacagctcactgatgagctcattgcagggtgctctcagccgctgggagacatccacgaaactccttcggcgactcacttggaccaatacctctaccaacttcgcactcaccatttgtcccaaattactgaggctgccctggccctgaagctgggacactccgaactcccggccgctctggaacaggccgaggactggttgctgcggttgcgggccctggccgaagaaccgcaaaattcactcccggacatcgtgatctggatgctgcagggagacaagcgcgtggcttaccagcgcgttccggcacaccaggtgctgttcagtagacggggagcaaactactgcggtaagaactgtggaaaactccagactatcttccttaagtaccctatggaaaaggtcccaggagcaaggatgcctgtgcagattagagtgaaactttggttcggactgtcggttgacgagaaggagtttaaccaattcgccgagggaaagctcagcgtttttgccgaaacttacgagaatgaaactaagctcgctctggtcgggaattggggaaccacgggactcacgtacccaaagtttagcgacgtgaccggtaaaatcaagctgccaaaggattcgttccgcccttcagcaggatggacttgggcaggggattggttcgtctgcccagaaaagactctcctccacgatatggatgcgggacacctgagttttgtggaggaagtgttcgagaaccaaactcgactgccgggcggacagtggatctacatgtcggataactacactgatgtgaatggtgaaaaggtgctgccgaaagacgacatcgaatgcccgctcggctggaaatgggaggatgaagagtggtccaccgaccttaacagagccgtggacgaacagggttgggagtactcgatcaccatcccgccggagcggaagccgaaacattgggtcccggccgagaaaatgtactacactcacagacggcgccgctgggtgaggttgcgccgcagagatctttcccagatggaggcgttgaaacgccaccgccaagcagaagcggaaggagaggggtgggaatacgcatccctcttcggatggaagtttcacctcgagtatagaaaaaccgacgcgttccgtcggcggagatggcgccgccgcatggaacccctggaaaagacgggcccggccgcggtattcgctctcgaaggagccttgggaggcgtgatggacgacaagtccgaagattcaatgtcggtgtcgactctgtcgttcggcgtgaacaggcccaccatctcgtgcattttcgactacgggaatcggtaccacctcaggtgctacatgtatcaagcccgggacctcgctgcgatggataaagactccttttcggacccgtacgcaatagtctccttcctgcatcagagccaaaagactgtcgtggtcaagaacaccctgaatccgacttgggaccagactctgatcttctacgagatcgagatatttggtgaaccggccactgttgctgagcaaccaccgtccatcgtcgtcgaactgtacgatcatgacacctacggcgcggacgagttcatgggtaggtgtatttgtcagcctagcctggaacggatgccgcggctggcttggttcccgctgactcgcgggtcgcaaccgagcggagaactgctcgcttcctttgagctgatccagcgggaaaagcccgcgattcatcacatcccgggtttcgaagtacaggagacttccaggatcctcgatgagtccgaggataccgatctgccctacccaccgccgcagcgcgaagctaatatctatatggtcccacagaacatcaaaccggccctccagcgcacggcgatcgaaatcctcgcttggggactgcgaaatatgaagtcctaccaactggccaacatctcctccccttcgctcgtggtggaatgcggcggacagactgttcaatcctgcgtgatcagaaatctgcgaaagaaccctaatttcgacatttgcactttgtttatggaagtcatgctgccccgggaagagttgtactgccctcctatcaccgtcaaagtcatcgacaaccggcaattcggtcgccggccggtggttggccagtgtaccatcaggtcgctggaatcgtttctttgcgacccatacagcgcagaatcccccagcccgcagggcgggcctgatgatgtgtcgctgctctcacctggggaagatgtgttgattgatatcgatgacaaagaaccgctgattccgattcaggaagaggagttcatcgactggtggagcaagttcttcgcgtccattggcgaaagagaaaagtgcggatcatacctcgaaaaggatttcgacacgctgaaggtgtacgacactcaacttgagaacgtcgaagccttcgaagggctttccgatttctgtaacacttttaagctgtaccggggcaagacccaagaagagactgaagatccatccgtgatcggagagttcaagggcctgttcaagatctaccccctgcccgaagatccggctatccctatgccaccacgccaattccaccaattggccgcgcaaggcccgcaggaatgcctggtgagaatctacatcgtgcgggcattcggacttcagcctaaggatccgaacggaaagtgtgacccctacatcaagatctcgatcgggaaaaagtcagtctccgaccaagacaactacatcccctgtactttggagcctgtgttcggcaagatgttcgaactgacctgcactttgcccctcgagaaagacctgaagatcaccctgtacgattatgatctcctgtcgaaagatgaaaagatcggagagacggttgtggacctggagaaccgcctgttgtcgaaattcggagcccgctgcggactcccacagacgtactgcgtgtccggaccgaatcagtggagggatcagctccggcctagccaactgttgcacctgttctgtcagcagcacagagtcaaggctcctgtgtaccggactgatcgcgtgatgttccaggacaaagagtactcaatcgaagaaatcgaagcgggtagaatcccgaatcctcacctgggccccgtggaagaacgcttggccctccatgtgctgcagcaacagggacttgtgccggaacacgttgaaagcagaccactgtactcgccgctccagccagacatcgaacaaggcaagctccaaatgtgggtggatttgttcccgaaggccctggggcgcccagggccccccttcaacatcactcctcgcagagccagacgattctttcttcggtgcatcatctggaacactagggatgtcatccttgacgacctgagccttaccggagagaaaatgtccgacatttacgtcaagggttggatgatcggattcgaagagcataagcaaaagaccgacgtgcactaccggtcgctcggaggagaaggcaacttcaactggagatttatctttcctttcgactacctcccggccgagcaggtgtgcaccatcgcgaagaaggacgcgttctggcgcctggacaaaactgagagcaagattcctgcacgcgtggtgtttcaaatctgggacaacgataagttctcgttcgatgacttcttgggttccctgcaactggatcttaataggatgccaaaacctgctaagactgctaaaaagtgctccctggaccagctggacgacgccttccatccggagtggttcgtgagcttgttcgagcagaaaactgtgaagggatggtggccgtgcgtggcggaagagggcgagaagaagatcctggccggaaaactggaaatgactctcgaaatcgtggcggaatccgaacatgaagagcggcctgcggggcagggaagggatgaaccaaacatgaatccgaagctggaagatccccggaggccagacacttcgttcctctggttcacttccccatacaaaaccatgaagtttattctctggcgtagatttagatgggcgatcatccttttcattattctgttcatcctgctgctcttccttgcaatcttcatctacgcgtttcccaactacgcggcaatgaagctggtgaaacctttcagc

SEQ ID NO: 10674 - DNA, 6243 bp, synthetic construct
  misc_feature 1..6243: note = source = /note="Description of Artificial Sequence: Synthetic coding sequence"
  source 1..6243: mol_type = other DNA
atgctctgctgccttctggtgcgcgcttccaacctgccttctgcaaaaaaggatcggagaagcgatccagtcgcgagcctgacttttcggggggtcaagaagagaacaaaggttatcaagaattcagttaatcccgtgtggaatgaggggtttgagtgggatctgaagggtattcctctggaccaggggtctgagctccacgtcgtcgtgaaggatcatgaaacaatgggtaggaacagatttctgggtgaggccaaggtgccgcttagggaggtcctggcgactccatctcttagcgctagctttaacgctcctcttctggacaccaagaagcagcctacaggtgcgtcactggtgctgcaggtcagttacactcccctgccaggagccgtacccctctttccacctccaacccccctggaacccagcccgacactgcccgacctcgacgtggtagccgacacaggtggggaggaagatacggaggatcagggcctcaccggagacgaggccgagccattcctggatcaatccggcgggccaggggctcccactacccctcggaagctccccagtagaccaccccctcattatccaggaataaagcgaaagcggagcgcacccacctctaggaagcttttgtccgataagccccaggacttccagataagggtgcaggtgattgagggccggcagctgccaggcgtgaacataaagcccgtggtgaaggtgaccgcagctggccaaacgaaacgcacgcgcatacacaagggcaattctcctctgtttaacgaaacgctgttctttaacctgttcgatagccctggcgaactgttcgatgagcccatcttcatcacagtcgtcgactctcggagccttaggacagacgccctcttgggtgagttccggatggacgttggtaccatctatagggagcctcgccatgcatacttgcgaaagtggctgctcctgagcgacccagacgatttttctgcaggcgcacggggttacctcaaaacctccctgtgcgtactgggtcctggcgacgaagcgcctcttgagagaaaagaccccagtgaagataaggaagacatcgaatctaatctgctgcggccaaccggggtggctctgcgcggtgcacatttttgtctgaaggtattcagggccgaagacttgccacagatggacgatgccgtcatggataatgtcaagcagatattcgggttcgagtccaataaaaagaatctggtcgacccatttgtagaagtctcttttgcagggaagatgctttgcagtaagattctggagaagacagctaaccctcagtggaaccaaaatatcacccttcccgcgatgtttccaagtatgtgtgaaaaaatgcgaatccggatcatcgactgggatcggctgacgcacaacgatatagtggctacgacatacctgagcatgagcaagatttctgcacccggaggggaaatcgaggaggagcctgccggggctgttaagcccagcaaggcatccgacctggacgattacctcgggtttctgccgacattcggcccctgctatatcaatctgtacgggtcacctagagaattcaccggctttcctgacccctacactgagctcaacactgggaagggggaaggggtggcataccgcggccggcttctgctctctctcgagactaagctggtggaacacagtgagcaaaaagtggaagacctccccgccgatgacatccttagggttgagaaatatctgaggagaagaaagtacagcctgtttgccgccttctacagtgccactatgctccaggatgtcgacgatgcgatccagtttgaagtgtcaattggcaactatgggaataaatttgatatgacctgcctgcctttggcatcaacgacacagtacagccgggctgtgttcgacggatgccactattattatctgccctgggggaatgtaaaacctgtggtcgtgttgtcctcctattgggaggatatttcacatagaatcgagacacagaaccagctcctcggaattgctgatagattggaggctggccttgagcaagtgcatctggccctgaaagctcagtgctccaccgaagacgtcgacagcttggtggcccagttgactgatgagttgatagccgggtgtagtcagccactgggcgatattcacgaaacccctagcgccacccaccttgaccagtacctgtaccagctgaggactcatcacctgtcccaaattaccgaggcagctctggcccttaaactgggtcacagcgagctgcccgctgccctggaacaggccgaggattggctgttgcgactgcgagccctcgcggaagaacctcagaattcactgcccgatattgtgatttggatgttgcagggggataaacgggtcgcctatcagcgggtccccgcgcaccaagtactcttttcacggcggggagcaaattattgtgggaaaaattgtgggaaactgcagaccatttttcttaagtatccaatggaaaaagtccccggcgcccggatgccggtgcagatccgcgtgaagttgtggtttgggctttcagtggacgaaaaggaattcaaccagtttgctgaaggcaagttgtctgtgttcgccgagacctatgaaaacgaaacaaaactcgccctcgtgggaaattgggggacgacgggccttacttaccccaagttctccgatgtgacaggcaagataaagctgcccaaagattccttcaggccgagtgccggttggacatgggctggagactggttcgtgtgcccagaaaaaacattgctgcacgatatggatgcggggcatctgtcttttgttgaggaggtcttcgagaatcaaactcgccttcccggaggtcagtggatttacatgtccgacaactacaccgacgtcaacggtgagaaggttctgccaaaagacgatatcgaatgccccctgggctggaagtgggaagatgaggagtggagtacagatctgaaccgggcagtcgacgagcagggttgggagtattctattactattcctccggaacggaagccaaaacactgggtcccagctgagaagatgtattacacccacagacggcgccgctgggttcggcttagaaggagagacttgagtcagatggaggcccttaaacggcacaggcaggctgaagccgaaggcgagggctgggaatacgcttctctgttcggctggaagttccaccttgaataccggaagacagatgcttttcggcgcagacgctggaggagacggatggaaccgctggagaagaccggccccgcggccgtgttcgcacttgaaggagctctgggcggagtgatggatgacaagagcgaggacagcatgagtgtgtcaaccctgagctttggggtcaaccggcccacgatcagttgtatttttgactacggaaatagatatcacctcagatgctacatgtatcaggcccgggatctggcagccatggacaaagactccttttcagacccctacgccatcgtgtcctttctgcaccaatctcagaagacagtggtcgtcaaaaatacgctcaaccctacgtgggatcagacactcattttctatgagatagagatctttggggagcctgctaccgttgcagaacagcctccctctatcgtcgtggagctgtatgatcacgatacttatggagcagacgagttcatgggtcggtgtatctgtcagccttccctcgagcggatgccccgactggcctggtttccactgacccgggggtcccagcctagcggcgagctccttgcaagctttgagctgattcagcgagagaagcccgccatccaccacataccggggtttgaagtgcaggagaccagtcgcattctcgatgagtctgaggatacagatctgccctaccctcccccccagcgcgaggctaatatctacatggttccccagaacatcaagcccgccctgcaacggaccgcgatcgagattctggcatggggtctgcgcaacatgaagtcctaccagctggccaatatatcttcccccagcctggtcgtcgagtgcgggggacagactgtgcagagctgcgtcatccgaaacctccgcaagaatcccaacttcgatatttgtaccctgtttatggaagttatgcttccacgcgaggagctgtactgtccaccgattaccgtaaaggtgatcgataatcggcagtttggacggaggcccgtggtgggacaatgcactatcaggagtttggagtcctttctctgcgatccctacagcgctgagagcccttccccccagggtgggccagacgacgtgtccctcctgtctcccggagaagatgtgctgatcgacatcgatgataaggagcccctgattcctatacaggaagaggagtttattgattggtggtctaagttcttcgccagcatcggagagcgggaaaagtgtggcagctacctcgagaaggattttgatacgcttaaagtgtacgatacccaactggaaaacgtggaagcgttcgaaggacttagcgacttttgtaacaccttcaagctctacagaggtaagacccaggaggagactgaggatccctccgtgattggcgaatttaagggactgtttaaaatttacccccttcccgaggatcctgccattcccatgccacccaggcagttccaccagttggccgcgcaggggccgcaagagtgtcttgtgcgcatctacatagtgcgcgctttcggcctgcagccaaaggacccaaacggaaaatgtgatccatacatcaaaattagcattggcaagaaatcagtttctgatcaggataactatattccatgcacgctggaacctgtcttcggaaaaatgttcgagcttacgtgcaccctgccgttggaaaaagacctgaagattaccttgtacgattatgatctgctgtccaaggacgagaagattggagaaacggttgtagacttggaaaaccggctgttgtccaaattcggagctaggtgtggattgccccagacctactgtgtatccggtcccaatcagtggagagaccaacttcgaccgagtcagttgcttcacctgttctgccagcagcatagagtgaaggccccagtgtatcggactgatagggtgatgttccaggacaaggagtattcaatcgaggaaatcgaggctggaagaatccctaaccctcatttgggtcccgtagaggagaggttggcacttcatgttttgcaacagcagggattggttccagagcatgtggagtccaggccactctattcccctctgcagcctgacattgagcagggcaagttgcagatgtgggttgatcttttcccaaaagccctgggtcgcccgggccccccgtttaatattacacctaggcgcgcaagaaggttctttctgagatgtattatatggaatacccgcgacgtcatcctcgatgatctgtcactgactggcgaaaagatgtctgatatttatgtaaagggatggatgatcggttttgaagagcacaagcaaaaaacagacgtgcactacagaagcctgggtggtgaaggaaacttcaattggcggttcatctttcccttcgactacttgcctgccgaacaggtctgcacaatcgcaaaaaaggacgccttctggaggctggacaaaaccgagagcaagatcccagctcgggtagttttccaaatttgggataacgataagttcagttttgacgatttcctgggaagcctgcagcttgacctcaatcgaatgccaaagcctgccaaaaccgcaaaaaagtgttccctcgaccagctggatgatgcttttcaccctgagtggtttgtgagcctttttgaacagaagacagtgaagggctggtggccttgtgtggccgaagaaggagagaagaaaatcctggcaggtaagcttgaaatgacattggaaatcgtagcggagagcgaacacgaggagcgaccagctggtcagggacgggatgaacctaatatgaatccaaagctcgaagacccgcgccgacctgatacctcttttctgtggttcacctccccctacaagaccatgaaatttattttgtggcgaagatttcggtgggcaattatcctctttattattctgttcattctgctgctcttcctggcgattttcatctacgcatttccaaactatgccgccatgaaattggtcaagccattcagt

SEQ ID NO: 10675 - DNA, 6243 bp, synthetic construct
  misc_feature 1..6243: note = source = /note="Description of Artificial Sequence: Synthetic coding sequence"
  source 1..6243: mol_type = other DNA
atgttgtgctgcctccttgtccgtgcatccaatcttcccagcgctaagaaggaccggcgtagcgatcccgtggcgagtctaacctttcgaggagtgaagaagcggaccaaggtgataaaaaacagtgtgaaccccgtgtggaacgaaggattcgagtgggacctaaaaggaatcccactcgaccagggatcagagttacatgtagtggtgaaagaccatgagaccatggggcggaatcgcttcctgggggaggcgaaggtgcccctccgggaagtgctggctactcccagcctgagcgccagtttcaacgctccactactggatacaaagaagcagccaactggagcttccctagtgctacaagtgtcttataccccccttcccggagctgtgccactttttcctccacccactcccttggagccttctccgacgcttccagatctggatgtggtcgccgatacggggggagaggaggataccgaagaccaggggttgactggcgacgaggcagagccgttcctcgatcagtctgggggtcccggggcccctacaacaccccgaaaactcccaagccgaccccccccccactatcctggcatcaagaggaagcggagcgctcccacatccagaaagcttctatccgataaaccacaggatttccagattcgggtccaggtgatcgaagggcgtcagctgcctggagtcaatattaagcctgtggttaaagttaccgcagccggtcagacaaaaagaacccgtatacataaggggaattccccgctcttcaatgagaccttgttctttaatttgttcgacagccccggcgagctgttcgacgagccaatctttatcacagtcgtggacagtcgatcgctcagaactgacgcgctgctaggggagtttcgaatggatgtgggtaccatataccgcgagccgcggcatgcttacctgagaaaatggttgttgttgtctgacccagatgatttctcggctggtgcccgggggtacctgaagactagcctttgtgtgcttgggcccggcgacgaagcacccctggagaggaaggatcccagtgaagacaaggaagacatcgagtcaaacctcctgaggccaaccggggtggctcttagaggtgcccacttttgtctgaaggtttttagagcggaggacttgccgcaaatggacgacgcggtgatggacaacgttaagcagatattcgggttcgagtcgaacaagaagaatctcgtggacccttttgttgaggtgagtttcgcgggaaaaatgctttgcagcaaaattctcgagaaaactgctaacccacagtggaatcagaacataacattaccggccatgttcccttccatgtgtgagaagatgagaattcgtataatcgattgggaccgcctaacccacaatgatatagtggcgacaacctacttgtccatgagcaaaatctccgcccctggaggcgagatcgaggaggaacctgccggggccgtaaagcccagcaaagcttccgatcttgacgattacttgggcttcctgcccacttttggtccttgttatatcaatctgtacggctcaccccgcgagtttaccgggtttcccgacccttacaccgaactaaacactggcaaaggggagggcgtggcctaccgcggaagactcctcctcagcctagagaccaagctcgtcgaacactctgagcagaaagtcgaagaccttcctgccgacgatatcctcagagtggagaagtacctgcggagacggaaatactccctgttcgctgccttctattcagctacaatgttacaggatgtcgatgatgccattcaattcgaggtgagcatcggcaactatggcaataaattcgacatgacttgcctgcccctcgcttctaccacccagtatagccgcgcagtgttcgacggatgtcactattattatcttccatgggggaacgtcaaaccagtggtggtcctgtcttcatactgggaggacataagtcatcggatcgaaacacagaaccaactgctgggcatagctgacaggctcgaagccggcctggagcaagtgcatctcgccttgaaagctcagtgctcgacagaggacgtggattctctcgttgctcaactgaccgatgaactgatcgccggatgctcacagcccctgggagatatacatgaaacacccagcgcaacacaccttgaccaatatctgtaccaactacgcacacaccacctgagccagattaccgaggcagcattggcccttaaactaggccacagcgaacttccggccgctctggagcaggcagaggactggttgttgcgacttagggccctagccgaagagccccagaacagtttgccagacattgttatctggatgctacagggggacaaacgagtggcataccagcgcgtgcctgcccatcaagtcttgttctccaggagaggagccaactactgcgggaagaattgtggaaagctccaaacaatattccttaaataccccatggagaaggttcctggagctcgaatgcctgtccagatccgggtgaaactgtggtttggcttgtctgtggacgaaaaagaattcaatcagtttgcggaaggaaagttgtccgtcttcgcagaaacctacgagaacgaaacaaagttggctctggtaggcaactgggggacaacagggctgacatatcctaagttctcggatgtgactggcaagatcaagttaccaaaagattcgtttagaccaagcgcaggatggacatgggccggcgattggtttgtgtgccccgaaaagacactcttgcacgatatggatgctgggcatctgtccttcgtggaggaggtgtttgagaatcagaccagactccctggcggccagtggatttacatgtccgacaactacaccgacgtaaacggcgagaaggtgttgcccaaagacgacatagaatgccctctgggctggaagtgggaggatgaggagtggagcaccgatctgaaccgtgctgtggatgagcaaggctgggagtattctataaccatcccgcccgagcgtaaaccaaaacactgggtccccgcagaaaagatgtactacacccatcgccggcggcgctgggtccgcttacggcggcgagatctctcccagatggaagccctaaagaggcatcggcaggccgaagctgagggtgagggatgggaatatgcatccctatttgggtggaagttccacctggagtatcgcaaaaccgatgcgttcaggcggagaaggtggagacgccggatggaacccttagaaaagacaggcccggctgcggtctttgcgctggagggcgctctggggggagtcatggatgataaatccgaggactctatgagtgtttcaaccctgtcctttggggttaacaggccaacgatcagctgtattttcgactatggcaatcgctaccacctacgatgttatatgtaccaggctcgcgatttagccgcgatggacaaggactcgttcagcgacccctacgccattgtttctttcctgcatcagagccagaaaacggttgtggtgaaaaataccctaaatccgacgtgggatcaaactctcatcttctatgagatcgagatcttcggggagcccgcgaccgtagcagaacagccacccagtatagtggtggaactttacgatcatgacacttacggcgccgatgagtttatgggccggtgtatctgccaaccgtcactcgaaagaatgccacgcctcgcgtggtttccccttacaagaggatctcagccctccggagagcttctcgcatcatttgagttgattcagcgggagaaacctgcaattcatcacattcctggtttcgaagtacaggaaacctcacgtattctggacgagtccgaggataccgaccttccctacccaccaccccagagggaggccaatatctatatggtcccgcagaatatcaaacctgcacttcagcgaacagctattgaaattttagcatgggggttacgaaacatgaaatcataccaactcgcgaacatcagctctccgagcctggtggtggagtgtggagggcagactgtccagtcttgcgtcattagaaatttacggaagaaccctaatttcgacatatgcaccctgtttatggaagtaatgctaccgcgggaggaactctactgccctcccataacggtgaaagtgatcgacaaccggcagtttgggcgcaggcccgttgtcggccagtgtaccatacggagccttgagtcatttttatgcgatccatattctgcggagtcccccagcccacaaggagggcctgacgatgtgagtctgttgtctccaggagaggacgttttgatcgatattgacgacaaagagcctcttatccctattcaggaagaagagtttatcgactggtggtccaagttctttgcttctatcggcgagcgcgaaaagtgtgggtcataccttgagaaggattttgacactctcaaggtgtatgatacccaactggaaaatgttgaagcattcgaggggctgagtgacttctgtaatacttttaaattataccgtggaaaaactcaggaggagactgaggacccgtccgtgatcggagagttcaaagggttgtttaaaatttaccccctgccggaggatccggctatccccatgccacccaggcagttccatcagttggcagcgcagggcccacaggaatgcctggtacggatctacattgtgagagccttcgggttgcagccaaaggatcctaacgggaaatgcgatccgtacatcaagatctcaatcggtaaaaaaagcgtctccgaccaggataattatatcccttgtaccctcgaaccagtgttcggcaaaatgttcgagctgacctgtaccttacccctggagaaggacctcaagatcaccttatacgactatgacctgttgagtaaggacgagaaaataggggagaccgtggtcgacctcgagaaccggctgctttcaaaattcggggctcggtgtggtcttcctcagacttactgcgtgagtggaccaaatcagtggcgggaccaattgcgccccagccagctgctccacctgttttgtcagcaacatcgggtgaaggccccagtctatcggaccgacagagtgatgtttcaggacaaggaatattcgatcgaggaaattgaggcaggccgcatcccaaaccctcatttggggcccgttgaggagcggctggcacttcacgttctgcagcaacagggtctggtaccagagcatgtggaaagtcgccccctgtacagtcctctgcaaccagatattgagcaaggtaaactccagatgtgggttgacttatttcctaaggccctgggtcggccaggtcctccttttaacattacacccagacgggcacgtagattctttctgcgatgtataatttggaacactcgggatgtcatcctggatgatttatctctcactggagaaaaaatgtctgatatatacgtgaaaggctggatgattgggttcgaggagcataaacagaaaaccgatgttcattacaggtctttgggtggcgagggaaatttcaactggaggttcattttcccgttcgactacctgcccgctgaacaggtgtgtacaattgctaaaaaagacgctttctggaggctggacaagaccgaatcaaaaatcccagcacgggtggtgtttcagatctgggacaacgataagttcagctttgacgacttcctgggcagccttcaactggatcttaatagaatgccaaagccggcaaagacagcaaaaaaatgttcactcgaccagctggatgatgcattccatcctgagtggttcgtctcattgtttgagcaaaagactgtaaaaggttggtggccatgcgtagcggaggagggagaaaaaaagattctcgccggtaagctggaaatgactttggagatcgtggctgagagtgagcacgaggagcggccagcaggacaggggagggatgaacctaacatgaatcccaagctggaggacccgcgccggccggacactagctttctctggtttacatccccctataaaacaatgaagttcatcctatggcgcagatttcgctgggcaatcatcctcttcatcatcttattcatcctcctcttatttttggccattttcatttacgcatttcctaattacgccgctatgaagctggtaaaaccctttagc

SEQ ID NO: 10676 - DNA, 6243 bp, synthetic construct
  misc_feature 1..6243: note = source = /note="Description of Artificial Sequence: Synthetic coding sequence"
  source 1..6243: mol_type = other DNA
atgctttgctgtctgctggtgcgggcgagcaatctgccgtctgcaaaaaaggatcgtcgttcagacccagtcgccagcttgacctttcggggagtgaaaaagcgaactaaggtgattaagaactccgttaatcctgtgtggaacgagggcttcgaatgggatttgaagggtatccccctcgaccagggatctgagctgcatgtcgtggtgaaggatcacgaaaccatgggccgcaatcggtttctgggagaggccaaggtgccactcagagaagtcctcgcgacgccctccttgtcggcttcatttaacgcaccactgctggatactaagaagcagcctacgggggcttccctggtgctccaagtgagctacaccccgctgcctggagccgtgcctttgttcccgccgcctaccccactcgagcccagccccactctcccagacttggatgtggtggcggacactggcggagaagaagatactgaggaccagggcctgaccggagatgaagcagaaccgttcctggatcaatcaggagggcctggagccccgaccactccgcggaagctgccctcccggcctccgccgcactaccctggcatcaagagaaagcggtccgccccgacgtcacgtaagctcctctcggataagccacaagactttcaaatccgcgtccaggtcatcgagggtaggcaactcccgggtgtgaatatcaaaccagtggtgaaagtgacggccgcgggtcagaccaaacggaccagaatccacaaaggtaactccccgctgttcaacgagactctgtttttcaatctcttcgacagcccgggggaacttttcgacgagccgatcttcatcaccgtggtcgactcaagatccctgagaactgacgctctgcttggagagtttcgaatggacgtgggaaccatatacagggaaccgcggcacgcgtacctgaggaagtggttgctgctgagtgacccggacgatttttcagcgggggctcgcggatatcttaagaccagcttgtgtgtgttggggccaggagacgaggcaccgttggaacgcaaagatccgtccgaagataaggaggacatcgaaagcaacctgctcaggccgactggagtcgccctgcgaggggctcatttctgcctcaaagtctttagagcggaggacctcccacagatggacgatgccgtgatggataacgtgaagcagatcttcggattcgagtcaaacaaaaagaatctcgtggacccgtttgtggaggtgtcctttgccggcaagatgctgtgcagcaaaattctggaaaaaacggcaaatccacaatggaaccagaacattactttgcctgcaatgttcccgtcgatgtgcgagaagatgcggatcagaatcatcgattgggatcggctgacccataacgatatcgtggcgaccacgtaccttagcatgagcaagatctccgctcctggcggagaaatcgaggaggagccggcaggggcggtgaaaccatccaaagcctccgatctggacgattacctgggattcctcccaactttcggaccgtgttacatcaacctgtacggatcgccgagagaattcaccggtttcccagacccgtatactgaactgaataccggcaagggggaaggagtggcttaccgaggccggctcctgctttcgctggaaaccaagctcgtggagcactcagagcaaaaggtggaagatctgccagccgacgatatcttgagagtagagaaatacctccgccgccgaaagtactctttgttcgcagccttctactcggccaccatgctccaggatgtcgacgatgcgatccagtttgaggtttccattgggaactacggaaataagttcgatatgacttgcctgccactggcaagcactactcagtacagtcgggctgtgttcgatggatgccactactactaccttccgtggggaaacgtgaagccagtcgtcgtgctctccagctactgggaggacatttcgcaccgaattgagactcagaaccaattgctgggcatcgcagaccggctggaagccgggctggagcaagtccatctcgcactgaaggcacaatgtagcaccgaggacgtcgactctctcgttgcccaattgaccgacgaactgatcgccggatgtagccagcccctgggggacatccatgaaactccctcggcaactcacctcgatcagtacctgtaccagctgcgcacccaccacctgtcccagatcaccgaagcagccctggcgctgaagctgggtcacagcgaactgccggcagcgctcgagcaggctgaggactggctgctgcggctgagagcgttggccgaagaacctcaaaattccctgccggatatcgtgatttggatgctccagggagacaagcgggtcgcgtaccagcgggtcccggcccatcaggttttgtttagtcgcaggggagccaattactgcggtaaaaactgtggaaagctccaaaccatcttcctgaagtacccaatggagaaggtcccaggcgcccgcatgccggtccagatccgcgtgaagctgtggttcggactctctgtagacgaaaaggagtttaaccagttcgccgagggtaagctgtcggtgttcgctgaaacctacgaaaatgaaaccaagctggctctggtgggaaattggggtactaccggcctgacttacccaaagttctcggacgtgactggaaaaatcaaactccctaaggacagctttagacccagtgccgggtggacttgggctggcgattggttcgtgtgcccagaaaagaccctgctgcatgatatggacgccggccatctgagcttcgtggaagaagtgttcgaaaaccaaactcgcctcccggggggacaatggatttacatgtcagacaactataccgatgtgaatggagaaaaggtgttgccaaaggacgacatcgaatgccctctgggatggaagtgggaggacgaggagtggtcgactgatcttaaccgcgccgtggatgaacagggatgggagtactccattacgatcccgcccgaacgcaagccaaagcactgggtgccggccgagaagatgtactatacccatcgccgtagacgatgggtcaggctgagacgccgcgacctctctcaaatggaggcactgaagcggcaccgccaagcagaagctgagggcgagggatgggaatacgcgtccttgttcggttggaagttccacctggaataccgaaagactgacgcattccgccgccgcaggtggagacggcggatggaacctctggagaaaactggcccagctgcggtgtttgcgttggaaggagccctcggcggagtgatggatgataaatccgaggactcaatgtccgtgtccacccttagcttcggagttaatagacctactataagctgcattttcgactacggaaaccgctaccatctgcggtgctacatgtatcaggctcgggatctcgccgctatggataaggactcatttagtgacccgtacgccatcgtgtccttcctccatcagtcgcaaaagaccgtggtggtcaagaacacgctgaatccaacctgggatcagaccctgatcttttacgaaattgagatcttcggcgaaccggctaccgtggccgaacagccaccatcgatcgtggtggaactctacgaccacgatacttacggtgccgacgaattcatgggtaggtgcatctgtcaaccgtcattggaacggatgcctcgactcgcctggttcccgctgaccagaggtagccaaccgtccggagaactgctggcctccttcgaactgatccagagagaaaagccggccattcatcacattcccggctttgaggtccaggaaacctccaggatcctcgatgagtcggaagatactgacctgccatacccgcccccacagagagaggccaacatctacatggtgcctcaaaacatcaaaccggctttgcagcgcactgcaatcgagattctggcgtggggactgaggaacatgaagtcgtaccaacttgctaacatctcaagcccttcgctggtggtagaatgcggaggccagacggtccagtcgtgcgtgatcagaaaccttcgcaaaaatccgaatttcgacatttgcacccttttcatggaagtcatgctgcctagagaagagctttactgccctcctatcaccgtcaaggtgatcgataaccggcaattcggacggaggcctgtcgtgggacaatgcaccatcaggtcattggagagcttcctctgcgacccttattccgcagaatcgccatccccgcagggtggcccagatgacgtcagcctcctctcccccggcgaggacgtgctgattgacatcgacgacaaagaacccctcatcccaatccaggaggaagaattcatcgactggtggtcgaaattcttcgccagcatcggggaacgggaaaaatgcggctcgtacctggagaaggacttcgatacgctgaaggtctacgacactcagctcgaaaatgtcgaggccttcgaaggactgtcggacttttgtaacactttcaagctgtaccggggaaagacccaagaggaaactgaagatccgtcggtgattggagagttcaagggacttttcaaaatctaccccctgccggaagatccggcaatccccatgccgccacggcagtttcatcagctggccgcccagggaccccaggagtgcctggtccgcatttacatcgtgcgggcgttcggactgcaacccaaggacccgaacgggaaatgtgacccttatatcaaaatcagcatcggcaagaagtcggtgtcggaccaggataactacatcccctgcacccttgaaccagtgttcgggaaaatgttcgaattgacctgcacgctccctttggaaaaagacttgaaaatcaccctctacgactacgatctcctctcgaaggatgagaagatcggtgagactgtggtggacttggaaaaccggctcttgtcaaagttcggtgcgcggtgtggactgcctcagacgtactgcgtgtcaggcccgaatcaatggcgcgaccagctccggccttcacagctccttcacctcttctgtcagcagcaccgggtgaaggcgccggtctaccgaaccgatcgcgtcatgttccaagacaaagaatactcgatcgaagagatcgaggccggacgcatcccaaacccacacctcggccctgtggaggagcgcctggccctgcacgtgctccagcagcagggactcgtcccggagcacgtggaaagccgcccactttactcccctctgcagccggacattgagcagggaaagctgcagatgtgggtggatctgtttccgaaggcactcggccgcccgggaccccctttcaacataacccctagaagggcccgccgcttcttcctgcgatgcatcatctggaacactagggacgtgatcctggacgacctgtcactgaccggcgagaagatgtcggacatctacgtgaaaggatggatgataggattcgaggagcacaagcaaaaaaccgacgtccattaccgttcactgggcggggagggaaactttaactggaggtttatcttcccgttcgactacctgcctgctgagcaggtctgcaccatcgccaaaaaggacgcgttctggcggctggataagaccgaatctaagatcccggctcgcgtagttttccaaatctgggataacgataagttttcattcgatgattttctgggctcgttgcagctggacctgaatcggatgcctaagccggcgaaaacggcaaagaagtgctcccttgatcaactggacgacgcgttccacccggaatggttcgtttcccttttcgagcaaaaaactgtgaagggctggtggccatgcgtcgcagaagaaggagaaaagaagatccttgcgggaaaactcgaaatgactcttgaaatcgtggccgaaagcgaacatgaggagcggccggctggtcaagggagagatgaaccgaatatgaaccccaagctggaggacccccgccgccctgacacttcgttcctttggttcacctcgccgtacaagacgatgaaattcatcctgtggcgcaggttccgctgggccattatactctttatcatcctgtttatactcctcctctttctggccatcttcatttatgcatttccaaattacgcagcgatgaagttggtaaagccattctca

SEQ ID NO: 10677 - DNA, 6243 bp, synthetic construct
  misc_feature 1..6243: note = source = /note="Description of Artificial Sequence: Synthetic coding sequence"
  source 1..6243: mol_type = other DNA
atgctctgttgtctccttgtgagagcctcgaacttgccaagcgcaaagaaggatcgacgctccgatcctgtcgcctcgctgacgtttagaggcgttaagaagcgaacgaaggtgatcaagaactcggtgaatccagtttggaatgaagggttcgaatgggatcttaaaggaataccactggatcaaggctctgaactgcacgttgtggtgaaggatcacgaaaccatgggccgtaatcgctttcttggtgaggcaaaggtgcctctccgcgaagtgctggcgaccccatccctctccgcatcatttaacgctcctcttctcgacactaagaagcagcctaccggcgcaagcctggtcctgcaagtgagctacacccctctcccaggtgctgtgcctctgtttcctcctcctactccactggagccatcgccaactctgccggatctcgatgtcgtggccgacactggtggagaggaggataccgaagatcaaggtctgactggggacgaggcagagccattcctcgatcaatcaggtgggcctggggcacccactaccccaagaaagctgccgagcagacctccaccacattaccccggaattaagagaaagcgaagcgcaccaacttcgcgcaaactgctgtcggataagccccaagacttccaaattcgtgtgcaagtgattgaaggacgccaacttcctggagtgaatatcaagcctgtggtgaaagtgaccgcggcagggcagacgaaacgaactcggattcataagggaaactcgccattgtttaacgaaactctctttttcaatctgttcgattcccctggcgaactgtttgacgagcctatctttatcaccgtggtggattcacgttcgcttaggactgatgcacttcttggtgagtttagaatggacgttggtactatttacagggaaccaagacacgcatacttgagaaagtggctccttctgtcggatccagatgactttagcgctggcgcccgcggatacctgaaaacctcgctgtgcgtcctgggacctggtgacgaggcccctctggagagaaaagatccaagcgaagataaggaagatattgaatccaaccttcttaggcctaccggtgtggcactgcgaggagcccacttttgtctcaaagtgttcagagcagaggaccttccacaaatggatgatgccgtgatggacaacgtgaagcagatttttgggttcgaatcgaataagaagaacctggtggacccatttgtggaggtgtcctttgcaggaaaaatgctttgcagcaagattctggaaaagaccgcgaacccccagtggaaccagaacattactcttcctgcaatgttcccttccatgtgtgagaaaatgcgaattcgaataatcgattgggacagactgacccataacgacattgtggcaactacttacctctcgatgtcgaagatatcggcccctggtggagaaattgaggaggaacctgcaggcgctgtcaagccatcgaaggcatcggatctggatgattaccttggttttcttccgacctttgggccttgctacattaacctgtatggttccccgcgggaatttactggattccctgatccgtacaccgaactcaacaccggtaagggcgaaggtgtggcatacagagggagactgttgctgagcctcgaaactaaactcgttgaacattccgagcagaaggtcgaagatcttccagcagacgacatcctgagagtggaaaagtacctcagacgacgtaagtactcactctttgcagcattttactccgcaaccatgctgcaggacgtggatgatgcaatccagtttgaggtgtcgattggaaactacgggaataagtttgatatgacttgtctgccactcgcctcgaccacgcaatactcacgggcggtgttcgatggctgccattactactaccttccttggggaaatgtcaaacccgtagtggtgctgtccagctattgggaggatatcagccacagaattgaaactcagaaccaacttctgggtattgctgatcggctggaagcaggactcgagcaggtgcatcttgccctcaaagctcagtgttccactgaagatgtggactcgctcgtggcccagctcaccgatgaactcatagcagggtgtagccaaccccttggagatattcacgagactccttccgcaacccaccttgatcaatacttgtaccaactgcgcactcaccatctttcccaaatcacggaggctgcactcgcgctgaagttgggtcactcagaactgcccgccgcactggaacaggccgaggattggcttctgaggctgcgagcacttgcagaagaaccccaaaactcacttccagacatcgtgatttggatgttgcaaggggacaagagggttgcgtaccaaagagtgcctgcacatcaggtgctgttttcacggagaggagctaattactgcggtaaaaactgtggtaaacttcaaaccatctttcttaagtacccgatggaaaaggtgccaggcgccagaatgcccgtgcaaattcgagtgaaattgtggttcgggctgtcggttgatgagaaagagttcaaccaatttgcagaggggaagctgagcgtgttcgcggaaacctatgagaatgaaaccaagctcgcactggtcggtaactggggaacgactggacttacctacccaaagttctcggacgtcaccggaaagataaaactgccgaaagactcctttcggcctagcgccggctggacttgggcaggagactggtttgtgtgccctgaaaagaccctgttgcatgatatggacgcaggacacctgtcattcgtggaggaggtctttgaaaaccaaaccagactgccaggcggtcagtggatttacatgtccgacaactatactgatgttaacggagaaaaggtgcttcctaaggacgacatcgagtgtccccttggctggaagtgggaggatgaggaatggagcaccgacctgaacagagcggttgatgagcaaggttgggaatactccatcactattccgcccgaaaggaagccaaaacattgggtgccagctgaaaagatgtactacacccatcgacggcggcgctgggtgcggcttcgtcggcgagatctgtcccagatggaggcattgaagagacacagacaagccgaggcagagggtgaagggtgggagtatgcctccctgtttgggtggaagttccatcttgaataccgaaaaactgatgcttttagacggaggcggtggcgtcggagaatggaaccgcttgaaaaaaccgggcccgcggcggtgtttgcccttgaaggagcacttggaggcgtgatggacgataagtcagaggattccatgtcggtgtccaccctgtcgtttggagtcaaccggccaactattagctgcattttcgactacggtaaccggtaccatttgcgctgttacatgtaccaagcccgggatcttgcagcgatggataaggacagcttttccgatccttacgcaatcgtttcatttctgcaccagagccaaaaaaccgtcgttgtgaagaatacccttaacccaacctgggatcaaactcttatcttctacgagattgagatattcggagagccagcgactgtcgcggaacaaccgcctagcattgtcgtcgaactttacgatcatgatacctacggtgccgatgaattcatgggaaggtgcatctgtcagccgtcgcttgagagaatgcctagacttgcatggtttcctctcactagaggttcgcagccatcaggagaacttcttgcatcattcgaactgattcagagagagaagcccgcaatccatcacattccaggctttgaggtgcaggaaacctcaagaatccttgatgaatccgaggacaccgatctcccgtacccacctccgcaaagggaagcgaacatctacatggtcccccagaacattaagcctgcccttcaaaggaccgcgatcgagatcctggcgtggggactgcgcaacatgaaatcgtatcaattggcgaatatctcctcgccatcgcttgtggtcgaatgtggagggcagaccgtgcaaagctgtgtcataagaaaccttaggaagaaccctaatttcgatatatgtactctctttatggaagtcatgcttccgcgggaggaactgtactgccctcctatcaccgtgaaggtcattgataatcgacaatttggtcgtagacccgtggtgggacaatgtaccatccgtagcttggagagctttctgtgtgatccttacagcgcagagtcgccttcacctcaaggcgggcctgatgatgtgtcactcctgtctccaggagaagatgtgcttatcgacattgatgacaaggagccactgattcctattcaggaggaggaattcatagattggtggagcaaattcttcgcatccattggggaacgcgagaagtgtggttcctatcttgagaaggactttgacacccttaaagtctacgatacccagctcgaaaatgtggaagcatttgagggtctgtcggatttctgtaatacgtttaaactctaccgcggaaagactcaggaagaaaccgaggacccttccgtgataggggaattcaagggattgtttaagatttaccccctgcctgaagatcctgcaattcccatgccacctaggcaatttcatcagcttgcagcacaaggccctcaagaatgtcttgtgcggatctatatagtcagggccttcggtctgcagccaaaggatcccaacggtaagtgcgacccgtacattaagatttccattggaaagaaaagcgtgtccgaccaagacaactatatcccttgtaccctcgaaccagtgttcggtaaaatgttcgagcttacctgtacccttccccttgagaaggatcttaagattaccctgtacgattatgaccttctttcgaaggatgaaaagattggcgaaactgtggtggaccttgaaaaccgcctgctgtcgaagtttggcgcgcggtgtggactccctcaaacctactgtgtttcaggacctaatcaatggcgagatcaactccggcctagccagcttcttcatctgttttgtcagcaacacagggtcaaggcccctgtttacagaaccgaccgagtgatgttccaagacaaagagtattccatagaagaaatcgaagcaggtaggatccctaacccacacctcggaccggtggaagaaaggctggctcttcatgtccttcagcagcagggactggttccagagcatgtcgagagcagaccattgtactccccactccaaccagatattgaacagggcaaacttcaaatgtgggtggacctgtttcctaaagcacttggtcgcccaggaccaccttttaacatcactccaagacgggcgcgccggttttttcttagatgtattatctggaacacccgcgacgtgattcttgacgatctgtcacttaccggtgaaaagatgtccgatatctacgtgaaaggctggatgatcgggtttgaggaacataagcaaaagacggatgtccattacagaagcctcggaggagaaggaaacttcaactggaggttcatatttccatttgactatcttccggcagaacaagtgtgtactattgctaaaaaggatgcattttggaggcttgacaagactgaatctaagatacccgcaagagtcgtgttccagatttgggacaatgataagttttcgtttgacgactttctcgggtccttgcagctcgatctgaataggatgccaaagccagccaaaaccgcgaaaaagtgctccctggatcagctcgatgacgcgtttcatcccgaatggtttgtctcgctcttcgaacagaaaaccgtcaagggatggtggccatgcgtggcggaagagggagaaaagaaaatcttggctggtaagctcgagatgactcttgagattgtggccgagtccgaacatgaggaacgtcctgccggacaaggccgtgatgagcccaatatgaaccccaagctcgaagatccgcggcgtccagacacttcgtttctttggttcactagcccctacaagaccatgaagtttattctttggcgaaggtttagatgggctattatccttttcataattctctttatcctgcttctgtttctggccatctttatctacgcttttccaaactacgcagcaatgaagctcgttaagccttttagc

SEQ ID NO: 10678 - DNA, 6243 bp, synthetic construct
  misc_feature 1..6243: note = source = /note="Description of Artificial Sequence: Synthetic coding sequence"
  source 1..6243: mol_type = other DNA
atgctttgctgtcttctggtgagggcaagcaatctgccttcagcaaagaaggataggcgatccgatcccgtcgcttcgcttacgttcaggggcgtgaaaaagagaacgaaggtgattaaaaactctgtgaacccggtgtggaacgagggatttgagtgggacctcaagggcattccactggaccaaggaagcgaactgcacgtcgtggtaaaagatcatgagaccatgggccgtaatcgtttcctcggagaggccaaagtgcctctaagggaggtacttgcaaccccatccctgtctgcttctttcaatgcacccctcctggacacaaaaaagcaacccacgggagcatcactggtcctacaggtaagctacactccccttcctggggcggtacctttgttcccaccaccgacccccctggaaccaagtcccacacttcccgacctcgacgtcgttgccgataccggcggtgaggaagacaccgaagaccaaggattaaccggagacgaggctgagccattcctggatcagtcaggagggccaggggctcccacgacccctagaaagctgccatctcgcccaccgccgcactaccccgggatcaagcgcaagcggtctgccccaacctcccggaaactgctcagcgataagcctcaggatttccaaatacgtgtgcaggttattgagggaaggcaattacccggcgtgaacatcaagcctgtcgttaaggttacagccgctgggcagacaaagcggactagaattcacaaaggaaactctcctcttttcaacgagacactgttcttcaacctttttgactcccccggggagctgtttgacgaacccatctttattaccgttgtcgacagccggagccttcggacggacgctctgctcggagaattcagaatggatgttgggaccatttacagggagccgcgtcatgcttacctgagaaagtggctgctgctctctgatccggatgacttctcagccggcgcaaggggataccttaagaccagcctgtgcgttctcgggcccggcgacgaggccccactagaacgcaaggatccctccgaagataaggaggacatagaatctaacctattgcggccaactggagtggcacttaggggggcccacttctgtctgaaagtttttagagccgaggatctgccacaaatggacgacgctgtgatggataatgtgaaacagatctttggctttgagagcaataaaaaaaacttagtggacccctttgttgaggtgtccttcgccggcaagatgctgtgcagcaaaatattagaaaagactgccaacccccagtggaatcagaacataactctccctgccatgttcccctctatgtgcgagaaaatgcgcatccgcattattgattgggacagactcacccacaatgatatcgtggccactacctacctctctatgtccaagatctctgcgcccggcggggagattgaagaagagcctgccggcgccgtaaagccgagtaaagcctccgacctggacgactacttgggttttctgcccaccttcggaccctgctatatcaatttatatggatctccaagggagttcactgggtttcccgacccttacacagaactgaacactggcaagggcgaaggagtcgcataccgtggtagactacttctgtctttggaaacaaagcttgtcgagcattccgagcagaaggtggaggatctgccagccgatgatattttaagagtggaaaagtatctcaggcggcgcaaatacagcttattcgctgcattttactcggcgacaatgctgcaggacgtggacgacgctattcagttcgaggttagcataggaaattacgggaataaatttgacatgacctgcctgcccttggctagcaccacgcaatacagtagggccgtattcgacggctgtcattactactatctgccttggggaaacgtcaaaccagtagtggtgctatcctcatactgggaagatatttctcatcgcatcgaaacgcagaatcagctcctcggcatcgccgacagattagaagccggcctggagcaggtgcacctagctttgaaggcacagtgcagcacagaggacgtggactcactcgttgctcagctgaccgacgagttgattgcagggtgtagtcaaccgttgggggacattcacgaaacgcccagtgcgacacatctcgaccaatacctatatcaactgcgaacgcaccacctgagccagatcaccgaggccgccctcgcactgaagttgggccattcagagttaccagccgctctagagcaggcagaggattggctgctccgcctgcgggcactcgctgaggaaccgcaaaactccctcccagacattgtgatctggatgctacaaggcgacaaacgagtggcttaccagcgagtacctgcccatcaggtgctattttcccgtaggggtgccaactactgtgggaagaattgtggaaaacttcagacaatctttctcaagtaccctatggagaaggtgcctggcgccagaatgccggttcagatccgggtcaaactctggttcggcctatctgtggacgagaaggaatttaaccaattcgcagaggggaagctgagcgtctttgcggagacatacgaaaacgagaccaagctcgccttggttggcaactggggaaccactgggctgacatatccaaagttctcggacgtcaccggtaagatcaagctacccaaggattcatttagaccatctgccggctggacatgggccggggattggtttgtgtgtccagaaaaaactcttctccatgatatggacgcaggtcacctttcattcgtagaggaggtgttcgaaaatcagactcgactcccaggcggtcagtggatctatatgtctgataattacaccgacgtcaacggcgaaaaagtgttaccgaaagacgacatcgaatgtcccctggggtggaagtgggaggatgaggagtggagtacagacctcaatcgggcagtcgatgagcagggctgggaatactctatcaccattccgcccgagcgcaaacctaagcattgggtgccggccgaaaaaatgtattatacccatcggcggcgacgatgggtgaggctccgcaggagagatcttagccagatggaagctttgaaaaggcatcgccaggcagaggctgaaggtgaggggtgggaatacgccagtttgttcggctggaaatttcacctcgaatatagaaagaccgatgccttccgccggcggcgatggcgcaggagaatggagcccctagagaagacaggacccgctgcggtcttcgctctggagggtgcgttgggtggcgttatggacgacaaatcggaggactctatgtccgtcagtaccctatccttcggggtaaatagacccaccattagctgcatattcgattatgggaatagatatcacctacgctgttatatgtaccaggccagggatcttgccgctatggacaaagattccttcagcgacccttacgcgatcgtctcctttctccaccaaagccagaaaactgtcgtggtgaagaacacactgaaccctacctgggatcagaccctgattttctacgagattgaaatctttggggaaccggctaccgtggccgaacagccgccttccattgtcgtagagctgtacgaccatgatacctacggggctgatgagttcatggggaggtgcatttgccagccatccctggaacgaatgccgcgtctagcttggtttcctctgacacgcggaagccagccttccggcgagctcctcgcttctttcgagctgatccagcgtgaaaaaccagccatccaccatatccccggttttgaggtgcaggaaacttctcgcattcttgacgagagcgaagacacagacctgccatatccacctcctcagcgggaagccaacatttacatggttccgcagaacattaagccagctctccagcggaccgcaatcgaaatcctggcttggggactgagaaatatgaagtcgtatcagcttgccaacatctcttctccctcactggtggttgagtgcggaggccaaactgttcagtcctgcgtgattagaaacctccgaaagaacccgaacttcgacatttgcacccttttcatggaggtcatgttaccaagagaggagctgtattgtccacctatcaccgtgaaggtgattgataatcgccagtttggtcgccgaccggtggtgggtcagtgtacgataagatccctggagtcgttcctatgtgatccgtattctgccgagtcccccagtccacagggcggcccagacgacgttagtctattgagccccggtgaagatgtcttgatcgatattgatgacaaggagcccctgatacctatacaggaggaggaattcatcgactggtggtccaagttctttgctagcataggtgagcgggagaaatgtggctcttacctcgaaaaggactttgacactttgaaagtgtacgacactcagctagagaatgttgaagcttttgaaggcctgtccgatttctgcaatacgttcaagttgtaccgaggcaagacccaggaggagacagaagatccttccgtcatcggcgagttcaaggggctgttcaagatctaccccctcccagaggaccctgcgattcctatgccaccccgtcagttccaccaattagccgctcagggtccacaggagtgcctggtgcgcatctacattgtacgtgccttcggactgcagccaaaggatccaaacggaaagtgcgatccctacataaaaatcagcattggcaagaaatctgtgtccgatcaggataactatatcccttgcaccctggaacctgtttttggcaaaatgttcgagctcacatgcacactgccactggagaaagatcttaaaatcacattatatgattatgacctgctgtctaaggacgagaagatcggggaaaccgttgtagaccttgagaaccggctgctgtccaagtttggagctcggtgcggtcttccccaaacctattgcgtgtccggtcctaatcagtggagagaccagttgcggccttcacagctccttcatttgttttgtcagcagcatcgcgtaaaggcacctgtgtaccgaacagatcgtgttatgttccaggataaagaatactctattgaggaaatcgaggcagggcggatccccaaccctcacctcggtccagttgaagaacgactggctctccacgtcctgcagcagcagggcttggtacctgagcatgtggagagcaggccattgtattctccgctgcaaccagacatcgagcagggaaagctgcagatgtgggtcgatctcttccctaaggctctgggtagaccaggacccccattcaacatcaccccaaggcgggctcgccgcttttttcttcggtgcatcatctggaacactagagacgtgatcttagatgatctgagtctgaccggggaaaaaatgtcagatatctacgtgaagggatggatgattggctttgaggaacataagcagaagaccgatgttcactatcgttccctcggaggagaggggaacttcaactggcggtttatctttccatttgactatcttcctgccgagcaagtttgtaccatcgcaaaaaaagatgctttctggcgcctggacaagaccgagtctaagatccccgctcgtgttgtgtttcaaatttgggataacgacaagttctcctttgacgactttcttggatccctccaactggatcttaacaggatgcctaagcctgccaagactgctaagaagtgtagcctggaccagctggatgacgcatttcatcctgagtggttcgtgagcttattcgaacagaagacggttaagggctggtggccatgtgttgccgaggagggcgagaagaaaatcttggccgggaagttggagatgacactcgaaatagtggccgagtctgagcacgaagagaggccggcaggccaaggccgcgacgaacccaatatgaatcccaagctggaggacccaaggagacctgacacatcctttctgtggtttacctccccctataaaacaatgaaattcattttatggagaagattccggtgggccattatactgtttatcatcctgttcattttgctgctatttcttgcaatcttcatatacgcattcccaaactatgccgcaatgaaacttgtcaaacctttttct

SEQ ID NO: 10679 - DNA, 6243 bp, synthetic construct
  misc_feature 1..6243: note = source = /note="Description of Artificial Sequence: Synthetic coding sequence"
  source 1..6243: mol_type = other DNA
atgctgtgttgcttgttagtgcgcgcaagcaacctgccatctgccaaaaaagacagacgctccgacccagtcgcaagcctgacgtttaggggcgtgaagaaacggacaaaggtaatcaagaatagtgtcaacccggtctggaatgagggatttgaatgggacctgaagggcatacccttggatcaaggaagcgagctgcatgtggtcgtgaaagaccatgagacaatgggtcgtaatcgcttccttggggaggccaaagtgcctctgagagaagtgctggcgacaccatctctgtcggcttctttcaatgcccctttattagataccaaaaaacagcccacgggagcttcgctcgtgcttcaggtctcttatacccctttgccaggtgctgtgccgctcttccccccccctacacctctggagccgtccccaacgctaccagatcttgatgtggtggccgacaccggcggcgaggaggataccgaggatcagggactgacgggtgatgaggctgagcctttccttgatcagtcaggaggccccggcgcaccgaccaccccacggaaactaccctcaagacccccaccccattatccagggatcaaacgcaagcggtctgccccgacatcaagaaaactgctgtctgataagccccaagacttccagatacgggtgcaggttattgaggggcggcagcttcctggcgtgaacattaagcccgttgtcaaggttacagccgctggccagacaaaaaggactcgtattcataagggcaacagtcctttgttcaatgagaccctcttcttcaaccttttcgatagccccggggagctgtttgatgagcccattttcataacggttgtggacagtcgctcattgaggactgacgcccttctcggggagtttcgaatggatgtgggaaccatttatagggagccacgccacgcttacttgagaaagtggctactcctctccgacccagacgatttcagtgctggagcccgcggctatctcaagacctcgctgtgcgtattaggcccgggtgatgaggcccctttggaacgtaaggaccccagcgaggacaaggaagacatagagtcaaacctgctgagacccactggggtcgccctgcgaggcgcccacttttgtttaaaggtatttcgcgcagaggacttgccccagatggacgatgctgtcatggacaatgtcaaacagatcttcgggtttgagagtaataagaagaatttagtcgatccttttgtggaagtgagctttgcaggcaagatgttgtgtagcaaaatactggagaagaccgccaacccacaatggaatcagaatatcacgctgcccgctatgtttccatccatgtgtgagaaaatgcggattaggattatcgactgggatcgactcactcacaatgacattgtggcaaccacatacctgtctatgtctaagattagcgctcctggcggagaaattgaggaggagccagcgggtgctgttaagccttccaaagcaagtgatctggacgactatctgggcttcctccccactttcgggccctgctatataaacttatatgggtctccgcgggaatttacaggctttcccgacccttatacagagctcaacaccgggaaaggggaaggggtggcctaccgtggcagactactgctaagcttggaaaccaagctcgtcgagcatagtgaacagaaggtggaggacctgccagctgatgatattcttcgcgtcgaaaaatacttacggcgacgcaagtactctctgtttgcagccttctattcagccactatgctgcaagacgttgacgacgcaatccaatttgaagtgtccatcgggaattatggtaacaagtttgacatgacctgcctgcctctcgccagcaccacacagtatagccgggccgtgtttgatggctgccattattattacctgccctgggggaatgtgaaacctgtggtggtgctgtctagctactgggaggatatctcacaccgcattgagactcaaaatcagctgctcggaatcgccgaccgccttgaagcaggcttggaacaggttcacctggcactcaaagcacagtgcagcacggaggacgtggactctctggtcgcacaactcacagatgaactgatagccggttgtagccagcctctcggcgatattcacgagacccctagcgcaacccatttggatcaatacctgtaccagctccggactcaccatctgagccagattactgaggccgctctcgcgttgaagcttggccacagcgaactcccagccgcacttgagcaggctgaggactggctacttcgcctgcgcgcgctagctgaagagccacagaattccctgcccgacattgtaatatggatgcttcaaggcgataagcgtgttgcttaccagcgggtccccgcacatcaagttctcttcagccgaagaggcgcgaactattgtggaaaaaactgtggcaaactccaaactatcttcctgaagtaccctatggagaaagtgcccggagctagaatgccagtgcagattagggtaaaattgtggttcggcttatctgtggatgagaaggagttcaaccagttcgctgaaggcaagctgagtgtgtttgccgagacatatgaaaatgagacaaagttggcactggttgggaactgggggaccactggcttgacataccccaagttctcggatgtgactggcaaaatcaaactccctaaggatagctttcggcctagcgctggttggacttgggcaggtgactggttcgtttgtcccgaaaagacactcctgcacgacatggacgccgggcatctcagctttgtggaagaagtgtttgaaaatcagactagactgcctggaggccagtggatttacatgagcgacaactatacggacgtcaatggggagaaggtgctcccgaaggatgatatcgagtgtccccttggctggaagtgggaggatgaagaatggagcaccgacctgaaccgggccgtagatgagcaggggtgggagtatagcatcacaattcctccagagaggaaacccaagcactgggttcctgcagagaaaatgtattacacccaccggcgcagacgctgggtccgattgcggcggcgagatctctcacaaatggaggccctcaagagacatagacaggctgaagcagagggagaggggtgggagtacgccagtctcttcggttggaaattccaccttgagtataggaaaactgatgctttccggcgccggaggtggcggcgccgaatggaacccctggagaagaccggacccgccgcagtattcgccctagaaggcgcactggggggcgtcatggatgataaatcagaggattcaatgagtgtctctactctgtctttcggcgttaaccgacccacaatttcttgtatttttgattatggaaaccgctaccatttacgctgctacatgtatcaggccagggatttggccgcgatggacaaggattcattcagcgacccttacgccatcgtgtctttccttcaccagtcccagaagaccgtagtcgtgaaaaatacactgaaccctacttgggatcagaccctcatcttttacgagattgaaatctttggagagccagctaccgtcgcagaacagcccccttcaatcgtggtggaactatatgaccacgacacctatggcgctgatgagttcatgggccggtgtatctgccagccatcccttgaacgcatgcccagactggcctggtttcctcttactcgcggtagtcaacctagcggcgaattgctagccagtttcgagctgatccaacgcgaaaagcctgccattcaccatatccctggcttcgaagtccaagagacatcccggatcctcgatgagagcgaggacaccgatctgccctacccacccccgcaaagagaggcaaatatctacatggtcccccagaacatcaaacctgccctacagcggactgcaatagagatcctggcttggggcctgcgaaacatgaagagctatcaactcgccaatatttcaagtcccagtttggtggttgagtgtggcggccagacagtgcagagctgcgtgatacgcaaccttcgaaaaaaccctaattttgatatttgcacactgttcatggaggtgatgctgccccgggaggaactgtattgccccccaattacagttaaagtcatagataaccgccagttcgggcggaggcccgtggttggacagtgtacaatccgatctctggaaagctttctatgcgacccttattctgcagagtccccatctccacaggggggaccggatgacgtaagtctgctaagtcccggagaagatgtcctaattgacattgacgacaaggaacccctaatcccaatacaagaagaggaattcattgactggtggtcaaagttttttgcctctattggcgagagagaaaaatgtggttcatacctggaaaaagatttcgacaccttgaaggtgtatgacacccagctggaaaacgtggaagcattcgagggactgagtgacttctgtaatacatttaagttgtaccgagggaagacccaggaagagacagaagatcccagcgttatcggcgaattcaaaggactgtttaagatttacccgctgcctgaagatcccgctatacctatgcctcctaggcaatttcatcagcttgcggcacagggaccccaggagtgcctggtgagaatctacattgttcgggcatttggccttcagcccaaagaccctaacggaaagtgtgatccatacattaaaatttctatcgggaaaaagagcgtctccgaccaagacaactatataccctgtaccctcgaacctgtcttcggtaaaatgtttgaactcacatgcactcttcccctcgaaaaagaccttaaaattactctatacgattatgacctcctgagtaaagatgagaaaatcggagagactgtggtcgacttagaaaacaggctgttgagcaaattcggcgcacgatgcggcttgcctcagacatattgcgttagtggcccaaaccagtggcgagatcagttgcgacctagccagcttttgcacctgttttgtcagcagcaccgcgtaaaggcccccgtctaccgaaccgaccgtgtgatgtttcaggacaaggagtactccattgaagaaatcgaagctggacgcatccctaaccctcacctggggccggtggaggaacggcttgctttacacgtgcttcagcaacagggattggtgccagagcatgtcgaaagtcggcctctgtactcgccactccaacccgacatcgagcaaggaaagctccagatgtgggtggacctgttccctaaggctctggggcgcccaggtcctccatttaatattacgccccggcgggcaagaagattttttctgcgatgcataatctggaacacgagagacgttatccttgacgacctatcgctaacaggcgagaaaatgtcggacatttatgtcaaaggttggatgatcgggttcgaggagcacaagcagaagaccgatgttcactatagaagcctggggggcgagggcaactttaactggcggtttatctttccattcgattacctgcccgcagaacaggtgtgcaccattgccaaaaaggatgccttttggaggttggataaaactgaatccaagattcccgcccgggtcgtattccagatttgggacaatgataagtttagtttcgacgattttctcggctccctgcagttggacctgaatcgcatgcccaagcctgccaaaacggcaaagaagtgctctcttgaccagctcgacgacgcctttcaccctgagtggtttgtttcactctttgaacaaaaaaccgtgaagggttggtggccgtgcgtggccgaggagggggagaaaaaaatactggccggcaagctcgaaatgacgttggagatcgtggccgagagcgaacatgaagagagaccagctggccaaggtcgggacgagccaaacatgaatcctaaactggaggatccacgacgacccgatacatcttttttgtggtttacgagcccgtacaaaacaatgaaattcatcctctggcgcaggtttaggtgggctattatcttgttcataatcctatttatattgctgcttttcttggcaatttttatctatgcgttccccaactacgcggccatgaagcttgtgaaacccttcagc

SEQ ID NO: 10680 - DNA, 6243 bp, synthetic construct
  misc_feature 1..6243: note = source = /note="Description of Artificial Sequence: Synthetic coding sequence"
  source 1..6243: mol_type = other DNA
atgctgtgttgcctgctcgtgagggcctccaacttgccatccgccaaaaaagaccgccgcagcgacccagtcgcttctctaacattccggggcgtcaaaaagagaacaaaggtgatcaaaaacagtgtaaaccctgtgtggaatgaaggattcgaatgggatttgaaggggattcccctggaccagggctctgagctccacgtcgtcgtgaaggatcacgagacaatgggacgaaaccgcttcttaggggaagctaaagtcccattacgagaggtgcttgccacaccctcactaagcgctagcttcaacgctcccctgcttgacacaaaaaaacagcccaccggagcgtcattggttcttcaagtctcatatacccctcttcccggcgctgtgccgctgttcccccccccgactccacttgagccatcacctaccctcccagatctggacgttgtagctgacactgggggtgaggaagacacagaagaccaggggctgacgggcgacgaggctgagccttttctggatcagtcaggaggaccaggggcaccaacgacgccacggaagctgccctctagaccaccccctcattacccgggtatcaaaagaaagcggtcagcccctactagcagaaagctgttgagtgacaagcctcaggacttccagatcagggtacaggtgatagagggacgccagctgcctggtgtgaacatcaaacctgtcgtgaaggtgacggctgccggccaaaccaagcggaccagaattcacaagggcaactcccccctgtttaacgagacgctattcttcaacttattcgactctcctggggagctttttgatgagccgatcttcattaccgtggtcgattcccgaagcctaagaacagatgccttgctaggcgaatttcgcatggatgttggcactatttaccgggagccccgccacgcctatctgcgcaaatggctgttgctgagtgatcctgatgacttctctgctggcgccagggggtatctgaaaacatcactgtgcgtgctgggaccaggcgatgaagcgcccctggaacgtaaggatccctctgaggacaaggaagacattgaatccaacctactcagaccgaccggggtcgccctgagaggcgcacacttctgccttaaggttttcagagcagaagacctgccacaaatggacgatgcagttatggataatgtgaagcagatatttgggttcgagtcgaacaagaaaaatttggtggacccatttgtggaggtcagtttcgccgggaagatgctgtgcagtaagatcctcgagaagaccgcaaaccctcagtggaaccagaatattaccctgcccgctatgttcccaagcatgtgcgagaaaatgagaatccgtattattgattgggacagactcactcacaacgacattgtggccaccacatatcttagcatgagtaagatatccgcacccggtggagagatcgaggaagaacccgcgggcgccgtgaagccatcaaaggccagcgacctggacgactacctcggttttctccccacctttggtccttgttacattaatctgtacgggagcccccgggagttcaccggattccctgatccttatacagagctgaacactggtaagggcgaaggagtggcctatagaggcagactgcttctcagtctagagacgaaacttgttgagcactccgagcaaaaagtcgaggatttacccgcagatgacattcttcgcgtggaaaagtacttgcgaaggcggaagtatagtcttttcgcagccttttattccgccacaatgctgcaggacgtggatgacgctattcagtttgaagtatcaatcggaaattacggcaacaagttcgacatgacatgcctgccgttggcctcaacaacgcaatactccagagcggtgtttgacggatgccattactattacctgccatggggaaacgtaaagcccgtcgtcgtactcagtagttactgggaggatatttcacacaggattgagacacagaatcagctgctgggcatcgccgaccgactggaggccggattagaacaggttcatctggcactcaaggcccaatgcagcactgaagatgtcgattccctggtggcgcagctaaccgatgaattaatcgccggctgctctcagcctctcggggacattcacgagacccccagcgcaacccatctggatcagtatctgtatcagctgcgaacccaccacttgtcccagatcaccgaggccgccctggctcttaaacttggccattccgaactgccagctgcattagagcaggctgaggactggctgttacggctgcgagccctggcagaggagccacagaattccctacctgacatagttatatggatgctacagggggataagagagtagcataccaaagggtgcccgcacatcaagtcctgttttccagacgcggcgctaactactgcgggaagaattgcggcaaattacagacaatctttctcaaatacccaatggagaaagtccctggcgctcgtatgcctgtccagattcgggtgaaattgtggtttggactgagcgtggatgagaaggaatttaaccagtttgcagagggcaaactgtccgtcttcgcagagacttatgaaaatgagacgaaactcgctctggtagggaattggggtaccacaggtctcacttacccaaagttttcagacgtgacagggaagatcaagctccctaaggactcattcaggccgagcgcagggtggacttgggccggagactggtttgtgtgtcccgagaaaaccctgttgcacgacatggatgccggacacctgtcattcgtagaggaggtattcgaaaatcagaccagactgcccggcggccagtggatttatatgtccgacaattatactgacgtgaacggcgagaaggtactaccaaaggacgacatcgagtgccctctgggctggaaatgggaggacgaagagtggagcaccgacctgaacagagcggtcgatgagcaaggatgggagtattccataactatcccccctgagagaaaacccaaacactgggtgcctgctgagaagatgtactacacccaccgaagaagacgctgggtgaggctccggcggcgggatctgtcacagatggaggcccttaagagacataggcaggccgaggccgagggagaggggtgggaatacgcctctctttttgggtggaagtttcaccttgagtatcggaagaccgacgcattccgccggagaaggtggagacgccgcatggagcctctcgaaaagactggcccagccgcagtattcgctctcgagggtgcattaggaggggtgatggacgacaagagcgaggacagcatgtctgtttccactctctccttcggcgtgaatcggccaacaatcagttgcatttttgactacggaaacaggtatcatcttaggtgctacatgtatcaagctcgggacctggccgcgatggataaggactccttcagtgacccctacgcaattgtctcttttctgcatcagtcccagaagactgttgtggtgaaaaacacccttaaccctacatgggatcaaactctcatcttttacgagatcgagatcttcggtgagccagcaacggtcgcagagcagccacccagtatcgtggtggaattgtatgaccacgatacctatggggccgatgagttcatgggtcgatgtatctgccagccttctctggagcggatgcctcgcttggcctggttccccctgactcggggctcacagcctagcggggaattgttggctagcttcgagcttattcagagagaaaagcccgcaatccaccatatcccagggttcgaggtgcaggagacttcccgcatactagatgagagcgaggataccgacctgccataccctccaccacaacgagaggcgaacatctacatggtgccacagaatatcaagccagccctgcagcgaactgctatcgaaatcttggcatggggacttaggaacatgaaatcttaccagcttgctaatatatctagcccctccctcgtggtggaatgtggaggtcagacagtacagagctgcgttattaggaacttaaggaaaaaccctaattttgatatttgtacattgtttatggaagttatgttgcccagagaagaattatactgtcctcctatcacggtcaaagtgatagataataggcagttcggtcgccggcctgtggtcggccagtgtactatccgctctctggagagctttctttgtgatccttattctgccgaaagtccatccccccaaggtggacccgacgatgtctcactgctttctccaggagaagatgttctgatcgacattgacgacaaagagcccctgattcccattcaggaagaagagttcatcgactggtggagcaagttctttgctagtatcggggagcgtgagaagtgtgggtcatacctggagaaggatttcgacaccctgaaggtgtacgatacccagttagagaatgtcgaggctttcgaaggcctgagtgacttttgcaatactttcaaactttacagaggcaagacgcaggaggaaaccgaggacccatctgtcatcggcgagtttaaggggctgttcaaaatctatcctttacctgaagaccccgccatacctatgcctccccgccagttccatcagctggctgctcaaggcccacaggaatgcttggtccgaatctacatcgtcagggcattcgggttacagcctaaggaccccaatggaaagtgtgatccatacattaagatctctattggaaaaaagtcagtgagcgatcaggataattatatcccatgcaccctcgaaccagtctttgggaaaatgttcgaactgacttgtacactcccgttggagaaggatctgaagattacgctgtacgactacgacctgctttcaaaagatgaaaagattggcgagactgtggtggacttagagaatcggcttctgtctaagttcggcgcaaggtgtggtttgccccagacatactgtgtctctggtcccaaccagtggcgtgatcagctacgaccttcgcagcttctgcatctgttttgccagcagcatagagtgaaggcacccgtgtatcgtacggacagggtgatgttccaggataaagagtattccatcgaggagattgaggccgggcgtatccccaatccacatctggggcctgtggaagagcggttggcacttcacgtactgcagcagcaggggcttgtgcctgaacatgtagagtcacggccactgtacagtccgttacagccagatatcgaacaggggaagctccagatgtgggtagatctcttccccaaggcactggggaggccaggtcccccatttaacatcactcctcggagggcaaggcggtttttcttgcgctgtatcatctggaacacccgcgacgtcatcctggatgacctcagtctgaccggagagaagatgagcgatatttacgtaaaggggtggatgatcggctttgaagagcacaaacaaaaaaccgacgtgcattacaggtcccttggaggcgagggaaactttaattggcgattcatcttcccatttgattacttaccggctgagcaggtgtgtacgatcgcaaagaaagacgcattctggcggttggataaaactgaatctaagatccctgcaagagtggtgttccagatttgggataatgacaagttcagcttcgacgacttcttggggagtctgcagctggacctgaaccgaatgccaaagcccgccaaaaccgccaagaagtgttcactggaccagctggatgacgcctttcacccggagtggttcgtctccctgttcgagcagaagacagtgaaaggatggtggccgtgtgtggctgaggagggagaaaaaaaaatcttagccgggaaactcgaaatgacccttgaaattgtggccgaatccgagcatgaagagagacccgccgggcagggtagggatgagcctaatatgaatccaaagcttgaagacccccgtcgacccgacacaagtttcttatggttcacctcaccatataagaccatgaagtttatattgtggaggcgcttcagatgggccattatcctgttcatcatcttatttatcctccttctgtttttggcaatatttatctacgccttcccaaattatgcagccatgaaactcgtcaagcctttctcc

SEQ ID NO: 10681 - DNA, 6243 bp, synthetic construct
  misc_feature 1..6243: note = source = /note="Description of Artificial Sequence: Synthetic coding sequence"
  source 1..6243: mol_type = other DNA
atgctgtgttgcctccttgttcgagcgtctaacctcccctccgccaagaaggatagacgaagcgatcctgttgcctcactgacctttcgcggcgtcaaaaagaggactaaggtcatcaagaactcggtgaacccggtgtggaatgagggattcgagtgggacctcaaaggtatcccattggaccagggttcagaactgcatgtcgttgttaaggaccacgaaaccatgggccgtaatcggttcctgggagaagcgaaggtcccgctgagggaagtcctcgccaccccgtccctgtccgcctccttcaatgcaccgctgctggacaccaagaagcaaccgactggtgccagtctcgtgctgcaagtctcctacacgccattgcctggcgcggtcccgctcttccccccgccgaccccccttgagccgtcgccgactctgccggatctggacgtcgtggcagatactggaggagaggaggacacggaggatcaggggctgaccggcgacgaagcagagccgttcctcgaccagtcgggcggaccaggcgccccaaccacgcctagaaaactcccatcgcgcccgcccccacattaccctggtatcaaaagaaagcgctccgcccccacgtcccggaagttgctgtcggataagcctcaggactttcaaattagggtccaggtcatcgaaggacgccaacttcccggagtgaacatcaaaccggtggtcaaagtgaccgcggcaggccaaacgaagcggactcggatccataagggaaattcccccctgttcaacgaaaccctgttctttaaccttttcgactcaccgggggaactgttcgatgaaccaatcttcataactgtggtggatagcagaagccttcgcactgacgctctcctgggagaattcagaatggatgtgggaaccatctacagggaaccccgccacgcctacctgcgaaaatggctcctcctcagcgaccccgatgatttctcggccggggctcgcggttacctcaagacttccctgtgcgtgctgggaccaggggatgaagccccgctcgaaagaaaagacccttcagaggacaaagaggatatcgagtccaacctgcttagaccaaccggagtggcactgcggggggctcatttctgtttgaaggtctttcgtgccgaggatttgccgcagatggatgacgccgtgatggataacgtgaaacagatctttggattcgaaagcaacaagaagaatttggtggacccgttcgtcgaagtgtcctttgccggaaaaatgttgtgctcgaagatcctcgaaaagaccgctaatccgcagtggaatcaaaacattaccctgcccgccatgtttcctagcatgtgtgagaagatgcgcatcagaatcatcgattgggatagattgacgcacaacgatatcgtggcgaccacttacctctccatgtcgaagatttccgcaccgggaggggaaattgaggaagagccggcaggcgccgtgaaaccttctaaggcatcagacctggatgattacctgggtttccttcctacctttggaccgtgttacatcaacctgtacggaagcccgcgggaattcaccggttttccagacccttataccgagctcaacaccggaaagggggaaggagtggcgtacagagggcggcttctcctgtccctcgaaacgaagctcgtcgaacacagcgaacagaaggtggaggacctcccggcggacgatatcctgcgggtcgaaaagtacctgcgacggcggaagtacagcctgttcgcggccttctactcggctacgatgctccaggatgtcgacgacgcaatccaattcgaggtcagcatcggcaattacgggaacaaattcgacatgacttgcctgcccctggccagcaccacccagtactcgcgggccgtgtttgatggatgccattactactacctgccttggggcaacgtaaaaccggtggtggtactgtcctcgtattgggaggacattagtcacagaatcgaaacccaaaaccagttgctcggcatcgcggaccggctggaggccggacttgagcaagtgcatctggcccttaaggcgcagtgctcgaccgaagatgttgattcattggtggcccaactcacggacgagctgatcgccgggtgtagccagccactgggtgacatccatgaaaccccgtcagccactcacctcgatcaatacctgtatcaactccgcactcaccaccttagccaaatcactgaagcagcgctggctctgaagttggggcacagcgagctgccagcggccctggagcaggccgaggactggctgctgcgtctcagagccctggcagaagaaccccagaacagcctgcccgacatcgtgatctggatgctgcagggtgacaaaagggtggcttaccaacgtgtgccggctcaccaggtgttgttctcgcgccgcggagcaaattactgtggcaagaattgcggaaagctccagaccatcttcttgaagtacccaatggagaaggttcctggagccagaatgccggtacagatccgggtgaagctctggtttggcctgagcgtggatgaaaaggagtttaatcagtttgctgaaggcaagctgtccgtgttcgctgaaacctacgaaaatgagacgaagctggccctcgtcgggaactggggaactactgggctgacctacccaaagttttcagacgtgaccgggaagattaagctcccaaaagactcattccggccctcggcgggatggacttgggcaggtgactggttcgtgtgccctgaaaaaactctgctgcacgacatggacgctggacatctctcgttcgtggaagaggtgttcgagaatcagacccgcttgccgggaggacagtggatttacatgagcgacaactacactgacgtgaatggagagaaggtgctgcctaaggatgatatcgaatgcccactcggatggaagtgggaagatgaagagtggtcgactgatctcaatcgggccgtggacgagcagggatgggaatactccatcaccatcccgccagagcggaagccaaaacattgggtgccggccgagaagatgtactacacccatcgccgccgcagatgggtccggctgcgcagacgcgacctgtcccaaatggaagcactgaaaagacaccggcaggccgaagccgaaggagaaggctgggaatacgcttccctgtttggatggaagttccacctggagtatcggaaaactgatgctttccggcggagacgctggcggcgtaggatggaaccactcgagaaaaccgggccggccgccgtgttcgcgctggaaggtgcattgggaggagtgatggacgacaaatccgaggactctatgtcggtgtcaaccctgagctttggggtgaaccgacccacgatttcctgcatcttcgactacggaaaccgctaccacctcaggtgctacatgtatcaggctcgggacctggcggcgatggacaaagactcgttctccgacccgtacgccattgtgtcgtttctgcaccaatcgcagaaaacggtcgtcgtgaagaatactttgaatccgacgtgggatcaaacgctcatcttctacgaaatcgaaatcttcggggaaccagccactgtggccgagcagcccccgtcgatcgtcgtggaactgtatgatcacgacacgtacggagcagacgagtttatgggtcgctgtatatgccagccgtcactcgaacgcatgcctcggctcgcctggttccctctgactcggggatcccaaccatccggggaactgcttgcttccttcgagctgattcagcgggagaagcctgcaatccatcacatccccggatttgaagtgcaggaaacctctcgaattctggatgagagcgaagatactgatctgccgtaccccccgccacagagggaagcgaacatctacatggtgcctcaaaacatcaagcccgccctgcaacgaaccgcaatcgaaatcctggcgtggggcctccgcaacatgaaatcataccagctcgcgaatatctcgtctccgtcattggtggtagaatgcggaggacagactgtgcagagctgcgtgatacgcaacttgcgcaagaaccctaacttcgatatttgcaccttgttcatggaggtcatgctccccagagaagagctgtactgcccccctattactgtgaaagtcattgataacagacagttcggcagacgtccggtcgtcggacagtgcactatccgctcgctcgaatcattcctgtgtgacccatacagcgcggagtcaccctcaccgcagggaggtcctgatgacgtgtccctgctcagcccgggggaggacgttctcattgatatcgatgacaaagagccgttgatccccatccaggaggaggagttcatcgattggtggtccaagttcttcgcttcaattggagagagagagaaatgcggatcctacctggaaaaggactttgacaccttgaaggtgtacgacactcagctggagaatgtcgaagcgttcgaaggactgtccgacttctgcaacaccttcaagctctaccggggaaagactcaggaggagactgaggacccgtcggtgatcggcgagtttaaaggactgttcaagatctaccccctcccggaagatccagccatccccatgccccctcgccaattccaccaactcgctgcccagggcccacaggagtgcctcgtgaggatctacattgtccgggcgtttggtctgcaaccaaaggacccaaatggaaaatgcgatccctacattaagatatcaatagggaagaagtcggtgtcggatcaggacaactacatcccatgtaccttggagcccgtgttcggaaagatgttcgaactgacttgcaccctgccgctcgagaaggatctgaaaatcactctctatgattacgacctgctttccaaggacgagaaaatcggggaaaccgtcgtggaccttgaaaataggctcctgtcgaagttcggcgctagatgcggactgccacaaacttactgcgtgtcaggaccaaatcagtggagagatcagctcaggccgagccaactcttgcacctcttctgccagcaacatcgggtgaaggctccagtctaccggaccgatagagttatgttccaggataaagaatattcaatcgaggaaatcgaggcaggcaggatcccaaatccgcatctcggaccggtggaggagagactggccctgcacgtcctccaacagcaaggattggtcccggaacatgtagaaagccggcctctgtattcgccgctgcaaccagatatcgagcaaggtaagctgcagatgtgggtggatctctttccgaaggcactgggacggccaggaccaccgtttaacatcactcctagacgcgcccgccgcttctttcttcgatgcatcatctggaacacccgggacgtaatcctggacgacctgagcctgactggagaaaagatgtccgacatctacgttaagggatggatgatcggattcgaggaacacaagcaaaagacggacgtgcactacaggtccctgggtggcgagggtaatttcaactggagatttatcttcccattcgactatctgccggctgaacaggtgtgtaccatcgccaaaaaggacgcattctggcgcctggataagactgaatcgaagatccctgcgcgggttgtgttccagatctgggacaacgacaagttctccttcgacgattttctgggctccctccagctggatcttaaccgcatgccaaagcctgccaagactgcaaaaaagtgttccctcgaccaattggacgatgcgtttcatcctgaatggttcgtgtcactgttcgagcagaaaactgtcaagggctggtggccctgcgtggcagaagaaggtgagaaaaagatcctcgcgggcaagctggagatgaccttggagatcgtggctgagtcagaacacgaagaacggccggccggtcagggacgggacgaaccgaacatgaacccaaagctggaggaccctaggcggccggataccagctttctttggttcacctcaccgtacaagactatgaagttcatcctttggagacggttccgctgggcgatcatcctgttcatcatcctcttcatccttctgctgtttctcgcgattttcatttacgcctttccaaactacgccgccatgaagctcgtgaagccattctca

SEQ ID NO: 10682 - DNA, 6243 bp, synthetic construct
  misc_feature 1..6243: note = source = /note="Description of Artificial Sequence: Synthetic coding sequence"
  source 1..6243: mol_type = other DNA
atgctgtgctgcctcctggtgcgtgcgtctaatctgccatccgctaagaaggatcgccgtagcgatccagtcgcatcccttacgtttcgcggcgtcaagaaacgtaccaaggtgatcaaaaactcggtaaaccctgtgtggaacgaaggttttgaatgggatctgaaaggaatccctcttgaccagggatccgagctgcatgtggttgtcaaagatcatgaaactatgggcagaaatcgcttcctgggagaggctaaggtgcccctcagagaggtgctcgccacgccctcgttgtccgcttcgttcaacgcgccactgctcgataccaaaaagcagcccaccggcgcatcgcttgtgttgcaagtctcgtacacgccacttccaggagccgtgcctctgttccctccaccgactccacttgaaccgtcgccaacgctgccggatctcgatgtggtcgctgataccggtggagaagaagatacggaggatcaaggattgactggtgatgaggctgaaccttttcttgaccaatcgggaggtccgggagcaccgactaccccacggaagctcccatcgcgcccccctccacactacccgggcataaagcgcaagcggtccgccccaacttcgaggaagctcctgagcgataaaccacaagatttccaaattagagtccaggtgattgaaggacgccaactccccggagtgaacatcaagccagtggtgaaggtcactgccgcgggtcaaactaagcgtactcggattcacaagggaaattcgccactgtttaatgagactctgtttttcaacctttttgactcacccggggaactgtttgatgagccaattttcattactgtggtcgactccagatcccttcggaccgacgcgcttttgggagaatttcgcatggacgtgggcactatctatcgcgaaccccgtcatgcttacttgcgcaaatggcttctgctttcggatccagacgatttttccgccggagcaagaggttaccttaaaacttcactttgtgtcttgggacccggcgacgaagcaccgctggaaaggaaagatccttcagaagataaggaagatattgagtcgaatctgcttagaccaacgggagtggccctgcgcggtgctcacttttgtctgaaggtctttagagcagaagatcttccacaaatggatgatgcagtgatggataacgttaagcagattttcggatttgagtctaacaagaagaaccttgtcgatccatttgtcgaggtcagctttgctggaaaaatgctctgttccaagatccttgagaaaacggcaaatcctcaatggaaccagaacatcacgttgcctgccatgttcccctcgatgtgtgagaagatgcgcatccgcattatagactgggatcgtctcacccataatgacattgtggcgaccacgtacctctccatgtcgaaaatctcggcccccggaggagagatagaagaggaacctgcaggagcagtgaagccatccaaggccagcgatctcgatgattaccttgggttcctgccaacgtttggtccctgctacataaacctgtatggttcacctcgcgagtttactggtttccctgatccatatactgagctgaataccgggaagggtgaaggagtggcttaccgaggaaggcttcttctttcactcgaaaccaagttggtcgaacactcagagcagaaggtggaggatcttcccgcggacgatattctcagagtcgaaaagtacctgcgcaggcgtaagtactcgctttttgcagcattctactcagcaaccatgctccaggacgtggatgatgcaatacagttcgaggtatccattggcaattacggaaataagttcgacatgacttgcctgccactcgcgtcgaccacccagtacagccgggcagtgtttgacggatgtcattactactaccttccatggggaaacgtgaagcctgtcgtggtcctttcctcatactgggaagatattagccatcgtattgaaacccaaaaccaactgttggggatagcagaccggcttgaagctgggctcgaacaagtgcatctggcccttaaggcacaatgctctacggaggatgtggattccctggtcgcacaacttactgacgagctgatcgcaggctgttcccagcctttgggtgatatacatgaaaccccctccgccacccatcttgatcaatatctgtaccaactcagaactcatcacctgtcgcagattacggaagccgcccttgcccttaaactcggtcacagcgaattgcctgcagcactcgaacaggccgaggactggctcttgagactgagagcccttgcagaagaacctcaaaactcgcttccggacatcgttatctggatgctccaaggggataagcgagtcgcgtaccagcgcgtccccgcccatcaggttcttttttcaaggcggggggcaaactactgtggtaagaactgtggaaaacttcaaactatctttctcaaataccctatggaaaaggtcccaggagctcgaatgccagttcagatcagagtcaagctgtggtttggactgtccgtggacgagaaggagtttaatcaattcgcggaaggaaaattgtccgtgttcgcggaaacctacgaaaatgagactaaactggcacttgtggggaactggggaactaccggactgacctaccccaagtttagcgacgtgactggtaagatcaaactgccaaaggactcgtttcgcccatccgcggggtggacttgggcaggggactggtttgtgtgccctgagaaaaccttgttgcatgatatggacgcaggccacctctccttcgtggaagaggtgtttgaaaaccagaccagacttccaggaggtcagtggatctacatgagcgataactacactgacgtgaacggtgaaaaggttctgccgaaggatgatattgaatgtcctcttgggtggaaatgggaagatgaagagtggtccactgatctgaatcgggcagtcgatgagcagggctgggaatactcaattactatccctccagaacgcaaaccgaagcattgggtgccggctgagaaaatgtactatactcacagacgaaggaggtgggtgcggcttcgccgacgagatctttcacaaatggaagcacttaaacgtcatagacaggcagaagcggaaggagagggttgggaatacgcctccctctttggatggaaattccacctggagtaccggaaaacggatgcgtttcggagacgtagatggagacgcagaatggagccacttgaaaaaactggtccggcagcagtgttcgcactggagggagcattgggaggggtgatggatgataagtccgaggattcgatgtccgtgtcaactctgagcttcggtgtcaacaggcctacgatttcatgtatctttgactacggcaatagataccatctgaggtgttacatgtaccaagcacgggacctcgcagcaatggataaggattccttcagcgatccctacgccattgtgtcatttctgcatcagagccaaaagaccgtcgtcgtgaaaaacacccttaacccaacctgggatcagacgctgatcttctacgaaattgagatctttggtgaacctgcaaccgtggcagagcaacctccatcgatcgtggttgaactctacgatcatgacacttacggggccgacgaattcatgggaaggtgtatttgtcagccctcgctcgaacgaatgccacggttggcctggttcccacttactcgcggctcacaaccgtcgggtgagctcctcgcatcgtttgaacttatacagcgcgaaaagccagcaatccatcacatacctggtttcgaagttcaagaaacttcgaggatcctggacgagtccgaggataccgacctcccttacccgccaccccaacgtgaagctaacatttacatggttcctcagaacattaagcctgcacttcaaagaactgcaattgaaatcctcgcctgggggctcagaaacatgaagagctaccagcttgcaaacatcagcagcccaagccttgtggtggaatgcggcggtcagaccgtgcaatcatgcgttattcggaacctcagaaagaacccaaactttgatatttgtactctgtttatggaggtgatgcttcccagagaagagctctactgcccccctattactgtgaaggtgatagacaacaggcagtttggccgacgtcccgtggtgggtcaatgtacgatccggtccctcgaatcctttctgtgtgatccctactctgcagaatcaccttcccctcagggtgggccagatgacgtaagcctcttgtcccctggagaagatgtgctgattgatattgatgataaggaaccgctgattccgatacaagaagaagaattcattgattggtggtcgaagttttttgcaagcatcggagaaagagagaaatgtggctcctaccttgagaaggactttgatacccttaaagtctacgacacccagctcgaaaacgttgaagcatttgaaggactgtctgatttttgtaacacctttaaactttacagaggaaaaacccaggaggagactgaagatccttccgtgataggtgagttcaagggcctgtttaagatttatcctctgccggaagatcctgcaattccgatgccgcctagacaatttcaccaactcgcagcccagggaccgcaggaatgcctggtgcgcatatacatcgtgagagcctttggcttgcaacctaaagacccaaacgggaagtgcgatccttacatcaagatctcgatcggcaagaaaagcgtgtcggaccaagataactacatcccctgtaccctggagcctgtgttcggtaaaatgtttgagctcacctgcactctgcctctggaaaaggacctgaaaatcactctttacgactacgatctgctgtcaaaggatgaaaagattggagaaactgtggtggacctggaaaacagactgctgtcgaaatttggtgcaagatgtggcttgcctcagacctattgtgtgtcaggaccaaaccagtggagagatcaactgcgcccctctcagctgcttcacctcttttgtcagcagcatcgcgtgaaggcacctgtgtacaggaccgatcgcgtgatgtttcaagacaaggagtacagcatagaggagattgaagcaggtagaattccaaacccacacctgggacccgtggaggaaagacttgcactgcatgtgttgcagcaacaaggcctggtcccagaacatgtcgaatcgcgacctctgtactcgcccctgcaaccggatatcgaacaaggtaagctccagatgtgggtcgatctttttcctaaggcactcggtaggccaggacccccctttaacataactccaaggagagcaaggcgtttcttcctgagatgcataatctggaatactagagatgtgattctcgatgatctcagcctcactggagaaaagatgtccgacatatatgttaaaggatggatgatcggatttgaagaacataagcaaaagactgatgtgcattacaggtcgctggggggtgaaggaaactttaactggcgattcatttttccttttgactacctccccgcagaacaggtgtgtaccattgcgaagaaggatgcattctggagactggataagactgaatcaaagattcctgcaagagttgtgtttcagatctgggacaatgacaagtttagctttgatgatttcctcggttcgctgcaactcgaccttaaccgtatgcctaaaccagcgaaaactgccaagaaatgtagccttgaccaacttgatgatgcatttcacccggaatggtttgtgtccctttttgaacaaaaaactgtgaagggttggtggccctgcgtggcggaagaaggtgaaaagaagattttggccgggaaacttgaaatgactcttgagattgtggcagagtcagagcatgaagagcgtccagccggccaaggtcgcgacgaacctaacatgaatccaaagctcgaagatccccggcgacccgatactagcttcctctggtttacgagcccatacaaaacgatgaagttcattctgtggagacggtttcgatgggctatcattctgttcataattctgttcatcctcctgcttttcctggcgattttcatttacgccttccctaactacgccgcaatgaagctcgtgaagccgttttct

SEQ ID NO: 10683 - DNA, 6243 bp, synthetic construct
  misc_feature 1..6243: note = source = /note="Description of Artificial Sequence: Synthetic coding sequence"
  source 1..6243: mol_type = other DNA
atgttatgttgcctcctggtcagggcctcaaacctcccctctgcaaaaaaggataggcggagtgatcctgtagcctctcttacatttaggggggtcaaaaaaagaacaaaagtgatcaaaaacagtgtgaaccccgtgtggaacgaaggatttgaatgggatttaaaagggatccctctggatcagggaagtgaactccatgtggtagtaaaagatcatgaaactatgggacgcaaccggtttctgggggaagctaaagtcccactacgagaagtgctggcaactccctcactgtctgcttcatttaacgcacctctgcttgatacaaaaaaacagcccacaggggcgtcactcgtactgcaggtgtcctatacaccactgcctggggctgtccctttattcccacctcctacacccctggaaccctctcccacacttcccgatctagatgtcgttgccgatacagggggagaagaagatactgaagatcaggggcttacaggagatgaagccgagcccttcctggatcagtctggagggcctggagccccaactactccacgcaaactcccctccagacctccacctcactatcctggaataaaacgaaaaaggtctgctcccacttccaggaaacttctctcagataaaccccaggattttcagatcagggtccaggtgatcgaagggagacaattaccaggggtgaatataaagcctgttgtaaaagtcactgccgccggacaaacaaaacggacacggatccacaaggggaattctccattatttaatgaaactctattcttcaacctctttgattcccctggagaactctttgatgaacctatcttcataacggttgtagattctcgctcgctccgcacggatgctctactgggagaatttcggatggatgttggaacgatctatagagaacccaggcacgcataccttagaaagtggcttctgctatcagatccagatgatttttccgcaggagcccggggatatctcaaaacatccctctgtgtactcggacccggggatgaagcacctttagaaagaaaagacccatccgaagataaagaggatattgaatctaacctactcagacctactggagttgcgctaaggggggcgcatttttgcctaaaagtgttccgggctgaagatctgcctcagatggatgatgctgtgatggataatgtaaaacagatttttgggtttgaatcaaataaaaaaaatttagtggatccatttgttgaggtatcttttgcaggaaaaatgttgtgttctaaaatcttagaaaagactgctaacccacagtggaatcagaacataactctgccagcaatgttccctagtatgtgtgagaaaatgagaatacgaatcatcgattgggatcggctcacacacaacgatatcgtggccacaacatatttgtcaatgtctaagatctccgctcccgggggggagatagaggaggaacccgcaggggcagtcaaaccctccaaagcctctgatctcgatgattatctggggttcttgccaacattcgggccttgttatataaatctctatgggtcccctagggagttcactgggttccccgatccctatacagaattgaatactgggaaaggggaaggagtggcataccgcggacgattgcttctatctctcgaaacaaaactagttgagcatagtgaacagaaggtggaggatttacccgccgatgatatcctacgcgtggagaaatacctgcggagaaggaaatattccctctttgcagctttttattctgctacaatgctccaagatgtagatgatgccatacagtttgaagtatctattgggaattatgggaacaaatttgacatgacatgtcttccactggcctctacaacacagtattctcgagccgtgttcgatgggtgtcactattattatctaccatggggaaacgtgaagcctgtcgtggtgctgagttcttattgggaagatattagtcatcggatagaaactcagaaccagctcctggggatagcagatcggcttgaagcaggactcgaacaggtgcatttagcactcaaagcccagtgctctacagaagacgtggattcactggtagctcagctaacagatgaacttatcgcaggatgtagtcagcctttaggagatatacatgaaactccatcagccacacacctggaccagtacttgtatcaattgcgcactcaccatctgtctcagattacagaagccgcactcgccctcaaactagggcactccgaattacccgctgccctggaacaggccgaagattggcttttgaggttgagggccctcgccgaagagccacagaactccttacccgatattgtgatttggatgctccagggggataaacgggtagcctatcagcgcgttcctgctcaccaggtgctgttttcgagaagaggggctaattactgtgggaagaattgcggaaaacttcagactatttttctaaaatacccaatggaaaaagttcctggagctagaatgcctgtacaaatccgggttaaactttggttcggactctctgtggatgaaaaagaattcaatcagttcgcagaggggaaactctcagtctttgctgagacatatgaaaatgagactaaattagcactagtgggaaactgggggacaactggactcacttaccctaaattctcagatgtaacaggaaagatcaagctgcccaaagatagtttcagaccttccgccgggtggacatgggctggagattggtttgtgtgccccgaaaaaacactcttacacgatatggatgcagggcatctctccttcgtggaagaggtttttgagaatcagactagacttcccggaggacagtggatatacatgtctgataactatactgatgtgaatggagaaaaggttctcccaaaggacgatatagagtgccctcttgggtggaaatgggaagatgaggaatggtcaacagatctcaatagagctgttgatgaacaggggtgggaatattccattacaatcccaccagagcgaaaaccaaaacactgggtccccgccgaaaaaatgtactacactcacaggcggcgcaggtgggtgcgattaagacggcgggatctgtcccagatggaagctctcaaacgacatagacaggctgaagccgaaggagaagggtgggaatatgcatccctgtttggatggaaatttcacttggaataccggaagacagatgccttcaggcggaggagatggcggcggagaatggaacccctagaaaagacagggcctgctgccgttttcgcactagagggagccctgggaggagtaatggatgataagtctgaagactctatgtcagtctccacgctctctttcggggtgaatcggcctactatttcctgtatcttcgattatggaaaccgatatcatctccggtgttatatgtaccaggctagggatcttgcagccatggataaagattcctttagtgatccatatgcgatagtctccttcctacaccagtcccagaagactgtagtcgtgaaaaatacactcaatcctacttgggatcagactctaatattttatgaaatagaaatattcggggaacctgctacagtggctgagcagcctccttcaatcgtagtggaactctatgatcatgacacatatggagctgatgaatttatggggcggtgtatatgtcaaccttcattagaacgaatgcctcgcctcgcatggtttcctctaactcgcggaagtcagcccagtggggaacttcttgcatctttcgaactcatacaacgagaaaaacccgcaattcaccacattcctggattcgaggtccaggagacttctaggatcctggatgaatctgaagatacagatctcccctatcccccaccccagagagaggctaatatatatatggtccctcagaatatcaagccagcactgcagagaactgctatcgaaatactagcatgggggctacggaatatgaaatcctatcagcttgccaacatatcatccccaagtctcgtggttgaatgtgggggacagacagtccagagttgtgtcatccgcaatctacggaagaatcctaactttgatatatgtacactttttatggaggtgatgctccccagagaagagttatattgcccccccatcacagtgaaagttatcgacaatcgtcagttcgggagacggccagttgtaggacaatgtactatacgtagtctggaatcctttctctgtgatccctacagtgcagaaagtccttctccccaaggaggacccgatgacgtgtcgctgctcagtcctggggaggacgtgctaatcgatatcgacgacaaagaacccctcatccctatccaggaagaagaattcatagactggtggtccaaattctttgccagtattggagaacgagaaaaatgtgggtcatatctcgaaaaagatttcgatacactcaaagtatatgatactcagctcgagaacgtggaagcttttgaaggactgagtgatttctgtaatactttcaaactctatcgggggaaaactcaggaggaaactgaggatccctccgtgataggggagttcaaagggctctttaaaatctacccactgcccgaagatcccgcaatcccaatgccaccaaggcagttccaccagctcgccgcacagggaccccaagaatgtctggtgcgaatctacatcgtgcgcgctttcggactccagccaaaagatcctaacggaaaatgcgatccttatatcaagatttctatcggaaagaaatcagtctccgaccaggataattatataccctgcacactggaacctgtcttcggaaaaatgtttgaactcacttgtacattgcctctcgaaaaagatcttaagatcacattatatgattacgatctcctaagtaaagatgagaaaataggagagacagtcgtcgatctcgaaaaccggctgttatccaaatttggagcaaggtgcgggcttccacagacatattgcgtctctggacccaaccagtggcgggaccaactcagaccttcccagctattacacttattttgccagcagcatcgggtcaaagcacccgtgtatcggactgatagagttatgttccaggacaaggaatattctattgaagaaatcgaagctgggagaatacccaatcctcacctagggcctgtcgaggagagactcgcattacatgtgcttcaacagcaggggctcgtgccagaacatgtcgaatctcggcccctatattctcctttgcagcccgatatcgaacagggaaaactgcagatgtgggtagatctattccccaaggccttgggaaggccagggcctccatttaacattactcctcgtcgggccagacgattctttctccggtgcattatctggaatactagggatgtgatcctggatgatcttagtctaactggggagaaaatgagtgatatctacgtaaaggggtggatgatagggttcgaagaacacaaacaaaaaacagatgttcattatcggtctctgggaggggaaggaaatttcaattggagattcatctttccattcgattatctaccagccgaacaagtgtgtacaatagcaaaaaaggatgcgttctggcggcttgataaaacagaatctaaaatccctgcccgcgtggtgtttcagatctgggataacgataagtttagtttcgatgattttctcgggtcacttcagttggatctgaatcgcatgcctaaacccgcaaaaacagcaaaaaagtgttcccttgatcagctggatgatgcctttcatcccgagtggtttgtgtccctgttcgaacagaaaacagttaaaggatggtggccctgtgtagcagaagagggggaaaaaaagatccttgctggaaaacttgaaatgacactcgaaatcgtggcagaatctgaacacgaggaaaggcccgctgggcagggaagagatgaacccaacatgaatccaaaattagaggatccaaggcgacccgatacaagttttttatggtttactagtccatataagactatgaaatttatcctatggcgaagatttaggtgggcaattatcctcttcataatactatttatccttctgcttttcctagccatcttcatatatgccttccccaattatgccgcaatgaaactcgtaaagccttttagt

SEQ ID NO: 10684 - DNA, 6243 bp, synthetic construct
  misc_feature 1..6243: note = source = /note="Description of Artificial Sequence: Synthetic coding sequence"
  source 1..6243: mol_type = other DNA
atgctgtgctgtctgttggtccgcgcatctaacctgccttctgcaaagaaagaccgtcgttcagatccagtggcttcacttacctttcgcggcgtaaagaagcgtactaaggttattaagaacagtgttaacccagtatggaatgagggatttgaatgggatctcaaaggaatccccctggatcaaggttcagagttgcacgtagttgtgaaagaccacgagacaatgggccgcaaccgtttcctgggtgaggctaaggtgcctctccgtgaagtgctggcaacaccatcattgagcgcttcttttaatgcccccttgcttgatacaaaaaaacagcccacaggtgcaagtctcgtgctccaggttagttatacacctctccccggagcagtcccactgtttcccccccctacccctctggaaccatcccccaccttgcccgatcttgatgttgtcgcagacactggtggcgaagaggacaccgaagaccagggactgacaggtgacgaggctgagcctttcctggaccagagcggaggtcccggcgctcccaccacacccaggaagctgccttcccgtccccctccccactaccctggaattaaaagaaaacgttccgctccaacaagtcgcaaactgcttagtgataaaccacaggatttccagatcagagtgcaggtgatcgaaggccgccagttgcccggcgtgaatatcaagccagtggtgaaggtaacagccgctggacagacaaagaggacacgcattcataagggcaactcccctctctttaacgagacactgttttttaacctgtttgactctcccggagagcttttcgacgaaccaatcttcataaccgtcgtggattcacgttccctgagaactgatgcactgttgggcgagttccgtatggatgtgggcactatctacagagaaccccgccacgcctatctccgcaagtggctcctcctgagtgatcctgacgacttctccgcaggtgcccgcggatatcttaagacttcattgtgcgtgctcggccccggcgacgaggcccccctggagcgcaaggatcccagcgaggataaggaagacatcgagtctaacctgctgagaccaactggagtggccctgcgcggagcacacttctgcctcaaggtcttccgcgccgaggatttgccacagatggacgatgccgtgatggacaatgtcaagcagattttcggatttgagagcaacaaaaaaaaccttgttgacccttttgtcgaggtgtcattcgccggcaagatgctttgttccaaaatcctggaaaagacagccaaccctcagtggaaccagaacatcacactgcccgccatgtttccttctatgtgcgaaaagatgcgcatccgtattatcgattgggatagacttactcataatgatatagtggccacaacctatctgtctatgtctaaaatatcagccccaggaggagaaattgaagaggagcctgccggtgccgtgaaaccaagcaaggcaagcgacctcgacgactacctgggctttctccccaccttcggcccatgctacattaatctgtacggatcaccaagagaattcacaggatttccagacccctatacagagctgaacacaggcaagggtgagggagtggcataccgtggaaggctgctgctcagtctggaaaccaagctggtagaacattctgagcagaaggtggaggatctgccagccgatgatattttgagggtggagaagtacttgcgtagacgcaaatactctctgtttgctgccttctattccgctaccatgcttcaggacgttgacgatgctatccagttcgaggtgtctatcggaaattatggtaacaagttcgacatgacctgcttgcctctcgccagcaccacacagtatagtcgcgccgtgttcgacggttgccattactactatctgccttggggaaacgtgaagcccgtggtggtgttgtcttcctactgggaggatatttcacaccgcatcgagacccagaatcagctgctcggaatcgctgatcgtctcgaggccggtctcgaacaggtgcatcttgcactgaaggcccagtgttctaccgaagatgttgacagcttggtggctcaacttactgatgaattgatcgctggttgctcccagcctcttggagatatccatgagactccatccgctacccatttggaccagtacttgtaccagctgcgtacacaccacctgagtcagattaccgaagcagccctcgctcttaagctgggtcacagtgaactgcctgccgccctggagcaggctgaggattggctgctccgcctccgtgctctcgcagaagagccccagaattcactccctgatatcgtcatctggatgcttcaaggcgataaacgtgtcgcctatcagcgcgtgcctgctcatcaagtcctcttctcacgtaggggagcaaattactgcggtaagaattgtggtaaattgcaaactattttcctcaagtatcctatggaaaaggtgcctggagccaggatgcccgtccagatccgcgtgaaactctggttcggactgtccgttgacgaaaaggagttcaaccagtttgccgagggtaaactgtccgtttttgccgagacctatgaaaacgagacaaaactcgctctggttggcaactggggcaccactggactgacttaccctaagttcagcgacgtgactggtaagatcaagctcccaaaagacagctttaggccttcagccggctggacttgggccggtgactggttcgtatgccccgagaaaacactccttcatgacatggacgctggacacctgtctttcgttgaagaggtgttcgagaaccagactaggctgcctggcggccagtggatctatatgtccgacaattatactgatgtgaacggagagaaggtcctccccaaggatgacattgaatgccccctgggctggaagtgggaagacgaggagtggtctacagacctcaatagggctgtggatgagcagggatgggagtacagtatcaccatccctcccgaacgtaagcctaaacactgggttcccgccgagaagatgtattatactcaccgccgtagaaggtgggtgagacttcgtaggcgtgatttgagccagatggaagcactgaaaaggcaccgtcaggcagaggccgagggcgagggttgggagtatgcatccttgttcggctggaagttccacctggaataccgtaaaactgacgctttccgccgtagaaggtggagaaggcgtatggagccactggaaaagactggtccagccgctgttttcgcactcgaaggcgctctgggaggtgtgatggacgacaagagcgaagactcaatgtcagtgagcaccttgtctttcggcgtaaaccgcccaacaatttcttgtatctttgactacggcaacagatatcacctgcgctgctatatgtaccaggcaagggacctggccgccatggacaaagacagctttagtgatccttacgctatcgtgtcatttttgcaccaaagtcaaaagaccgttgtagttaaaaacacccttaaccccacttgggatcagaccctcattttctacgagatagagattttcggcgaacctgctaccgtcgctgagcagccccccagcatcgttgtcgagctgtacgaccacgacacctacggtgccgacgagttcatgggccgttgcatttgccaaccatccctcgagagaatgcccaggctggcatggttccccttgacaaggggaagtcagcctagcggcgagctgctcgccagtttcgaactcattcagagggaaaaacctgccatacatcacattcctggttttgaggtgcaggagacaagccgtatcctggacgaatcagaggatacagatctcccctatccacccccccagcgcgaggccaatatctatatggtgcctcaaaacattaagccagctctccaacgtaccgctattgaaattctcgcctggggcctgcgcaacatgaagagctaccaactggcaaacataagttcaccctcactcgtcgtggagtgtggaggccaaaccgttcagtcctgcgtcataagaaatctgagaaagaacccaaactttgacatctgtaccttgtttatggaggttatgctcccccgcgaggaactctattgtccccccatcaccgtcaaggttatcgataatcgtcagttcggcaggaggcccgtggtgggtcagtgcaccataaggtccctggagtcattcttgtgtgacccctactccgctgagtccccttctcctcagggtggtccagacgacgtgagtctcctttccccaggagaagacgttctgatcgatattgatgacaaagagcccctgatccctattcaggaggaagagttcattgactggtggtccaagttctttgcttcaatcggtgagcgtgaaaagtgtggatcctacctggagaaagacttcgacacattgaaggtatacgacacccagttggaaaatgttgaagcctttgaaggcttgtcagatttctgtaataccttcaagttgtacaggggcaagacccaggaggagacagaggacccctcagtgatcggagagttcaagggtctcttcaagatctatccacttcctgaggaccctgccatccctatgcctccacgccagttccaccagcttgctgcccagggtcctcaggaatgcctggtgaggatttacatcgtgcgtgcattcggcctgcaacccaaggaccctaacggaaaatgcgacccctacatcaaaatcagcatcggtaagaaatctgtctctgaccaagacaactacatcccctgcactctggaacccgtgttcggaaaaatgtttgagcttacttgcacacttcctttggagaaggatctgaagattaccctctacgattacgacttgctgagcaaggacgagaaaattggcgagacagtggttgacctggaaaacagactgcttagtaagtttggtgccagatgcggtctcccacaaacctactgcgtcagcggacccaaccagtggagagatcagctgcgtccctcacagttgctccacctgttctgtcagcagcacagagtcaaggcccctgtgtaccgcaccgatcgcgtaatgttccaagacaaggaatatagtatcgaggaaattgaggcaggaaggattcctaaccctcatcttggccccgtggaagagcgcctcgcactccacgtgctgcagcagcaaggcctggtgccagaacacgtagagtctaggccactttactctcctctccagcccgatatcgaacagggcaagctgcagatgtgggtggacctctttcctaaagccctgggcaggccaggacctccctttaacataaccccaagacgcgctagacgctttttcttgcgttgcatcatatggaacactcgcgatgttatcttggatgatctgagccttactggtgagaagatgtctgatatttacgtaaagggttggatgattggattcgaggagcacaagcaaaaaaccgatgtgcattataggtccttgggaggcgagggaaatttcaactggcgtttcatcttccccttcgactaccttccagccgaacaagtgtgcaccatcgctaaaaaggatgccttctggcgtctcgacaaaactgaatcaaagatacctgcccgcgtagtgtttcagatctgggacaatgacaagttttcttttgatgacttccttggcagcctgcaacttgatcttaaccgtatgccaaagcctgcaaagactgctaagaagtgctcactcgatcagttggatgacgcattccaccccgaatggttcgtttctcttttcgagcagaaaacagtcaagggttggtggccatgtgtggctgaggagggcgagaaaaagattctcgccggtaagctggagatgaccttggaaatcgtggccgagagcgaacacgaggaacgcccagccggccagggaagggacgagcctaacatgaacccaaagcttgaggacccaaggaggcccgacacatctttcctgtggtttacatccccatacaaaacaatgaagtttatactgtggagacgctttcgctgggccataatcctctttatcatcctcttcatcttgcttttgtttcttgctattttcatttacgctttccccaactatgcagccatgaagctggtgaagccttttagc

SEQ ID NO: 10685 - DNA, 6243 bp, synthetic construct
  misc_feature 1..6243: note = source = /note="Description of Artificial Sequence: Synthetic coding sequence"
  source 1..6243: mol_type = other DNA
atgctttgctgtctccttgtgcgggcctcgaatcttccttccgccaagaaggatcgcagatcggatccagtggcatccctgactttcagaggtgtgaagaaacgcacgaaagtcatcaagaattccgtgaacccagtgtggaacgaaggatttgagtgggacctgaaaggaattccactcgatcagggttcagagttgcacgtcgtcgtgaaagatcatgaaacgatgggacgcaacagatttctcggtgaagccaaggtccctctccgggaagtgctggctactccgtcactctcggcctcctttaacgccccacttcttgatactaagaaacaacccacgggagcctccctggtgctgcaagtctcgtacacccccctcccaggtgcagtgcctctgtttcccccgcccactccactggaaccgtcaccgactctccccgatttggatgtggtggcagacaccggcggagaggaagataccgaagatcaaggacttactggtgatgaagcagaaccgttcctcgatcagtctggtggtcctggagcaccgactaccccccggaaactgcccagcaggcctccccctcattaccccggtattaagaggaagcggagcgcaccaacttcaaggaagctgctgtcagacaaaccacaagatttccaaattagagtccaggtgatagaggggcgccaactccctggtgtgaacataaagccagtggtgaaggtgactgccgccgggcaaactaaaagaactcgaatacataaaggtaactcgcccttgtttaacgagacgcttttcttcaacctgtttgattcccccggagaactctttgacgagcccatctttatcactgtggtggattcccgatccttgaggaccgacgcccttcttggtgaattccgaatggatgtggggaccatatatcgggaaccacgacacgcataccttcgaaaatggcttttgctctcggatcctgatgatttttcggccggtgccaggggataccttaagacctccctttgtgtcctcggtcctggagatgaagccccacttgagagaaaggatccttccgaggacaaagaggatatcgaatcgaacctgctgcggccaaccggggtggcacttcgcggagcacatttttgtctgaaagtgttcagagcagaagatttgccacaaatggatgatgcggtgatggataacgtgaagcagatcttcggttttgagtccaataagaaaaacctcgtcgatccatttgtcgaagtgtcctttgctgggaagatgctctgtagcaaaatccttgaaaagacggcaaacccacagtggaatcagaacattaccctcccagcaatgtttcctagcatgtgcgagaagatgagaatacgcataatcgattgggatagacttacccataatgatatcgtcgcaactacttacctctccatgtcgaagatttccgcaccaggtggagaaattgaagaagaacccgcgggagcagtgaaaccaagtaaggcttcggacctcgatgactacctcggatttctgcccacctttgggccctgttacataaacctttacggaagccctagagaatttactggattcccagatccatacaccgaacttaacactgggaaaggagaaggtgtggcatacaggggtaggctgctcttgtccctcgagactaagctggtggaacactccgaacagaaggtcgaggatcttccagcggatgatattcttcgtgtagaaaagtacctgagacggcggaaatactccttgttcgcagcattttactccgcaacgatgctgcaagatgtggacgatgccattcaatttgaagtctccatcgggaattatggcaacaagttcgatatgacttgcctgcccttggcatccactactcaatactcccgagcagtgtttgacggatgtcattactactatctgccatggggtaacgttaagccagttgtggtcttgagctcgtactgggaagatatttcgcataggattgaaactcaaaaccaactgcttggtattgcggataggcttgaagcggggcttgaacaggtacacctggcattgaaggcgcaatgctcgaccgaggatgtcgattccctcgtcgctcagctgaccgatgaacttatcgcaggttgttcgcagcctctgggcgatatacacgaaactccttcagcaactcatctggatcaatacctttaccagcttagaacccatcacctgagccagatcactgaagctgcacttgccctgaagctgggccacagcgaactgcctgccgctcttgaacaagccgaagattggctgctgcgacttcgggccctggcagaggaacctcaaaatagcttgcctgacatagtcatttggatgctgcagggagataagcgcgtggcgtaccaaagggtgccagcacatcaagtgctgttttcgagacgaggtgccaactattgcgggaagaattgcggtaagctgcaaacgatatttctgaaataccctatggagaaggtgccaggtgcgcgcatgcctgtgcagatccgcgtgaagctgtggtttggactgagcgtggacgaaaaggagtttaaccagttcgcagaaggtaagctgtccgtgttcgcagaaacctacgaaaacgaaaccaagctggcacttgtgggtaactgggggactaccggactcacctaccctaagttctccgacgtgaccggtaaaatcaaacttcccaaggattcgtttcgcccaagcgcaggctggacttgggctggagactggttcgtgtgtcctgaaaaaacgctccttcatgacatggatgccgggcacctgtcgtttgtggaggaggtgtttgagaaccagactaggctgcctggaggacagtggatttacatgtccgacaactacacggacgtgaacggagaaaaggtgctgcctaaagatgatattgagtgtccactgggctggaagtgggaagatgaagagtggtcgaccgaccttaacagagccgttgatgagcaaggttgggagtactcgatcactattccgccagaacgcaagccaaagcattgggtgcctgcagaaaagatgtactacacccatagaaggcggcggtgggtcagacttaggaggcgggatctgtctcaaatggaagcactcaaacgccatcggcaggccgaagcggaaggagagggttgggaatacgcgtccctttttggatggaagtttcatctggaatacagaaaaactgatgcctttagacgcaggcgatggcgtcgtcgaatggagcctctcgagaaaaccgggccggctgctgtatttgccttggaaggtgcccttggaggagtgatggatgataaatcagaagattcaatgagcgtgtcgactctgtcgttcggcgtgaacagacccactatctcatgtattttcgactatggaaatcggtaccatcttagatgttacatgtaccaggccagggacctggcagcgatggacaaagattcattttcagatccgtacgcaatcgtcagctttttgcatcagtcccagaaaactgtcgtggtcaaaaacaccctcaacccaacctgggatcaaaccctgatcttctatgagattgagatcttcggggaacctgctacggtggcagaacaacctccctcgatagtggtggaattgtacgatcatgatacctacggagccgatgagttcatggggcggtgcatctgccaaccctcgctcgaacgaatgcctagacttgcatggttcccactgaccagaggatctcagcctagcggagagctgcttgcctcgtttgaactcatccagagagaaaagcctgccatacatcacatacctggattcgaagtgcaagagacttccagaatcctggacgagtctgaagataccgaccttccctacccaccccctcaacgagaagcgaacatctacatggtcccacagaatatcaaaccagcactgcaacggactgcaattgagattctggcatggggtctgagaaacatgaagtcataccaattggcaaatatctcatcccctagcctggtcgtcgagtgtggtggccaaaccgtgcaatcctgtgttatccgaaatctcagaaagaatcccaacttcgatatctgtacgctctttatggaagtgatgctgccccgggaagagttgtactgcccaccaatcactgtgaaggtgatcgacaatcgccagtttggtcgtagaccagtggtcgggcaatgcacgataagatcactggaatcatttctttgcgacccttactccgccgaatctccatccccccaaggcggacctgatgacgtgtcgctgcttagcccgggagaggatgtcctgatcgatatagatgataaagaaccactgatcccgatccaggaggaagagttcatcgattggtggtcaaagttttttgcatccatcggagaacgagaaaagtgtgggtcctacctcgagaaagactttgatactctgaaggtgtacgatacgcagctggaaaatgttgaagcctttgaaggcctgagcgacttctgtaacaccttcaaactctatcgtggcaaaactcaagaagaaaccgaggacccaagcgtcattggagagtttaaaggccttttcaagatctacccacttcctgaagatcccgcaatcccaatgccccccagacagttccatcagcttgcagcccaggggcctcaggaatgccttgtccgtatttacatcgtgcgggcattcggactccagcctaaagatcccaatgggaagtgcgacccatacatcaagatatcaattggaaaaaagtcggtgagcgaccaagataactacatcccttgtactcttgagcctgtgtttggaaagatgtttgagcttacttgtacgctcccccttgaaaaagatctgaagattactctgtacgattacgatttgctgagcaaggatgagaagattggtgaaaccgtcgtggacttggaaaataggctcctgtcaaagtttggcgcaagatgtggcttgccgcagacttactgcgtgtcaggacctaatcaatggcgagatcaactgaggccgtcccaacttcttcatctcttctgtcagcaacaccgcgtgaaggccccagtctaccgcactgaccgtgtgatgtttcaggacaaggaatatagcattgaggagatcgaagcagggcgtattcctaacccgcatctgggacctgttgaggagcggctggctctccatgttctgcaacagcaggggcttgtgcccgaacatgtggaatcgcgccctctctattcccctcttcaacctgatatagaacaaggaaaacttcagatgtgggttgaccttttccccaaagcactcggaaggccaggaccaccttttaacattactcccagacgggcacgccgcttttttcttcgctgtatcatttggaataccagagatgttatactggatgacctctctcttaccggagaaaagatgagcgacatctacgtcaagggttggatgattgggtttgaggaacacaagcaaaagactgacgtgcactacaggagcctgggaggcgagggaaatttcaattggcgctttatctttccattcgactaccttccagctgagcaggtttgtactattgcaaaaaaggacgcgttttggagattggataagactgaaagcaagattcctgctagggtggtgtttcaaatttgggacaatgataagttctcctttgatgatttcctcggttcgcttcagctcgatcttaacaggatgccaaaaccagctaagactgcgaagaaatgttcccttgaccagctggatgacgcgttccatcccgagtggtttgtgtcgctttttgagcaaaaaactgtgaagggatggtggccttgtgtggcagaggaaggcgagaaaaagattcttgcgggtaagctggagatgactctggagattgtggcagaatcggagcatgaggaacggccagcaggccaaggaagagacgaacctaacatgaatcctaaacttgaggaccctcgacggccagacacctccttcctctggtttacttccccctacaagactatgaagtttatcctttggagacgttttcgatgggcgattattctctttatcatccttttcattctcctcctctttcttgccatctttatctacgcgtttcctaactacgcagcaatgaaacttgtgaagcctttttca

SEQ ID NO: 10686 - DNA, 6243 bp, synthetic construct
  misc_feature 1..6243: note = source = /note="Description of Artificial Sequence: Synthetic coding sequence"
  source 1..6243: mol_type = other DNA
atgttgtgttgcttgctggtccgtgcctcgaacctgccctcggcaaagaaggataggaggtccgatcctgtggccagtcttaccttccggggggtgaaaaagcggacgaaggtgattaaaaatagcgtcaatcccgtatggaacgaagggttcgaatgggacttaaagggcatcccactggatcaaggttcagagttacacgtggtcgtgaaggatcacgaaactatgggacggaaccgattcttgggcgaagccaaagttccactccgggaagtacttgctacacccagcctcagcgcaagctttaatgctcccttgctcgatactaaaaagcagccgacaggcgccagccttgtcctgcaagttagctacactcccctacctggggctgtcccactatttcccccccccacgcctctcgagccgtcaccgacgttgccagacctagacgtagtggccgataccgggggagaggaggacactgaggaccagggcttgactggtgacgaagccgaacccttcctcgaccagtccgggggtccaggagcccctacaacacccagaaagctccccagccgacctccccctcattacccaggcatcaagcggaagcggagtgcccctacctcgagaaaactgctgtctgataaaccgcaggattttcagatacgtgttcaggtgattgaggggcgccagttacccggtgtgaatatcaaacctgtggttaaggtcacggccgccgggcaaactaagcgaaccaggatccataagggaaactcaccactgtttaacgagacactgttcttcaacctgttcgactcacctggcgagcttttcgacgagccaatttttatcaccgtggtcgatagcagatcactgcgcaccgacgctcttctgggcgaatttcgcatggacgtggggacgatttacagagagcctcggcatgcatatctacgaaagtggttgctgctgagcgatccggacgatttcagcgccggagcccggggttacctgaaaaccagtctttgtgtgttaggaccaggcgatgaggccccactggagaggaaagatccctcagaggataaggaagacatcgaatccaatctgctacgacccaccggcgtggcccttcgaggcgcccacttctgcctcaaagtgtttcgcgcggaagacttgcctcaaatggacgatgccgtcatggataacgtcaagcagatctttggcttcgaaagtaataaaaagaatctggtggatccttttgttgaagtctcatttgccgggaagatgctgtgctctaagatattggagaagaccgccaaccctcagtggaatcagaatattacgcttccagccatgttccctagcatgtgtgagaaaatgcgaatcagaatcattgactgggacagacttacccataacgatattgttgcaactacctacctgtcaatgagcaaaatatcagccccaggcggggaaatcgaggaggagccagctggggccgtcaaaccttccaaggcaagcgacctggatgactacctcggctttctgcctacttttggaccatgctacataaatctctacgggtccccaagggagtttactggatttcctgacccatatacggagctgaacaccggaaaaggcgagggagttgcataccgaggacgcttgttgctctctctcgagacaaaactcgtagaacactctgaacagaaggtagaggatctgccggccgatgatattctgagggttgaaaaatatctgcgccgccggaagtatagtctgttcgccgccttttacagtgctacaatgttgcaggatgtagatgatgcaattcaatttgaggtttccatagggaactacggcaataaatttgacatgacgtgcctccctctagcttctaccactcagtattctcgagctgtcttcgatgggtgccactattactatctgccctgggggaacgtcaaaccagttgtggttctgtcctcctactgggaagacattagccatagaattgaaacccaaaaccagctgcttgggatcgctgaccgactggaggccgggttggagcaagtgcacttagcccttaaagcacagtgttccacagaggatgtggactcactagtagcacagctgactgacgagttaatcgccggctgcagtcagccactgggcgatattcacgagacaccctcagctactcatctggatcagtacttataccaattgagaacccaccatctctcccagataacagaggctgccctggctcttaagttgggacacagtgagctgcccgccgcccttgagcaggcagaggactggttattgcgacttcgtgcccttgccgaggaacctcagaattctctgcctgatatcgttatttggatgctgcagggtgacaagcgtgtggcctatcagcgcgtacccgcacaccaggtcttgttttcacgacggggagctaattattgtgggaaaaactgcggtaagttgcaaactatttttcttaagtacccaatggagaaagtgccgggcgctaggatgcctgtccagattagagttaaactgtggtttggacttagtgtggatgagaaggagtttaatcagtttgcagaggggaagttatccgtgttcgccgagacatatgagaacgagaccaagttagctctggtggggaattgggggactacaggcctgacttaccccaaattctctgatgtgaccggaaagataaagcttcctaaggattcctttagaccatccgcgggctggacctgggcgggcgattggtttgtctgccctgagaaaactctgctccatgacatggacgccggacacctgtcattcgtcgaggaagtttttgagaaccagacacgactccctggaggccagtggatctatatgtcggacaactacacggacgtcaacggcgagaaagtgctgccaaaggatgacatagaatgtccgctggggtggaagtgggaagatgaagagtggtcgaccgacctgaatagagccgtagatgagcaggggtgggagtacagcattaccatcccacccgaacggaagccgaagcattgggtgccagcagaaaaaatgtattatacacaccggcggcggagatgggttaggctgcgtcgcagggacctgtcacagatggaggctctgaaacgccaccgccaggctgaagctgaaggtgagggctgggaatatgctagcctgtttggctggaaattccatctggaataccgcaaaaccgatgcattccggagacggcgctggcgcagaaggatggagcccctagaaaagaccgggcctgccgctgtgttcgctctggagggggctctgggcggcgtgatggatgataagtcggaggactccatgtccgtgagtacactgtctttcggcgtcaataggcccacaattagctgtatctttgattatggtaatcgctaccaccttagatgctacatgtaccaggccagggatctggccgctatggacaaagacagtttctctgacccatatgctattgtttcatttttacatcagtctcagaaaaccgtggtggtgaaaaatacgctcaaccccacctgggatcaaaccctgatcttttacgaaatagagattttcggtgaacccgccactgtggcagagcaaccacccagcattgtggttgaactgtacgaccatgacacatacggcgccgacgagttcatgggccgttgtatctgccagccctcattggaacggatgcctagactcgcttggtttcccttgacccggggatctcagcctagtggggaactcctcgcctcgttcgaactcatccagagggaaaagcctgctatccaccatatccccggttttgaagttcaggagacgagccgaattctggacgagtcagaggacactgatttaccctacccccccccccagcgcgaagctaatatctacatggtgcctcagaacattaaacctgctctacagagaacagctatcgaaattctggcatggggactacgaaacatgaagtcctatcagctcgctaacatttcaagccctagcctcgtagtggaatgcggtggccagacagtgcagtcctgcgtgattagaaacctgaggaagaatcccaacttcgatatctgtactctctttatggaggtcatgctacccagggaagagctctattgccccccaattacagttaaggtgattgacaaccggcagtttgggagaaggccagtggttggacagtgcactattcgcagtctcgaatcatttctgtgcgacccctatagcgccgagtccccctctcctcagggaggcccagatgacgtgagcctcctgtcccccggcgaggatgtacttatagatattgatgacaaggaacctcttatccctattcaggaagaggagttcattgattggtggtccaaattcttcgcatccattggtgagcgagagaaatgcgggtcatatctagagaaggatttcgacactctgaaagtgtatgatacgcaattggaaaatgtggaagcttttgagggtctcagcgatttttgtaacacatttaaactgtataggggaaagacacaggaagagacggaggacccctcagtcatcggagagttcaaggggctctttaagatatatcccctgcccgaggaccctgcaatacctatgcccccaagacaatttcaccaactggctgcccaggggccccaggaatgcctggtgaggatatatatagtgcgcgccttcggactgcaaccgaaggatcctaatggcaaatgcgatccgtacattaaaatttcaataggtaagaagagcgtgtcagaccaggataactacataccatgtaccctcgaacccgtgttcggaaagatgttcgagctgacctgtaccctgcccctggagaaagatctcaaaatcaccttatacgactacgaccttttaagtaaggatgaaaaaattggcgaaaccgttgtagacctggaaaataggctgttgagtaagttcggggccaggtgcggcctaccgcagacttactgcgtcagcggcccgaatcagtggagagatcagctcagaccatcgcagctgcttcacttattctgtcagcaacaccgggtcaaggctcctgtctacagaacggatagagtaatgtttcaggacaaagagtactctatcgaggagatcgaggcgggccgtattcctaacccacaccttggccctgtggaggaaaggctggctctgcatgttctgcaacagcagggcctcgtgcctgagcatgtggaatccaggcctctgtatagccccttgcaaccagatattgagcaaggtaagctacagatgtgggtcgacctgtttccaaaggctcttggtaggccagggccgccatttaatataacacccagacgagccaggagatttttcctgagatgcattatttggaacaccagagacgtgatactcgacgatctttccttgactggggagaaaatgtcggacatctacgtcaaggggtggatgatcggttttgaggagcataagcagaaaacagatgtgcactaccggtctctggggggagaagggaatttcaattggcggtttatatttcccttcgattatctacctgccgagcaagtgtgtaccatcgccaagaaagacgctttttggaggttggataagaccgagagcaaaatacccgctcgagtcgtcttccagatttgggataacgacaaattctcctttgatgactttctggggtccctgcagctggacctgaatcggatgcccaaacctgcaaaaacagctaagaagtgcagtttggatcaactggacgatgcctttcacccggagtggtttgtttccctgtttgaacagaaaacggtcaaagggtggtggccctgtgtagcagaggagggagaaaaaaagatactggctggaaagctcgagatgaccctggagattgttgcagagtctgagcacgaggagcgccctgccgggcagggacgcgatgagcccaacatgaatcccaaactcgaggatccccgccgccccgatacaagcttcctctggttcacaagtccttacaagacaatgaagtttatcctctggcgccgatttaggtgggcaattatcctgttcatcattctgtttatcctgctgctgttcctcgctatctttatatatgcatttccaaactatgccgcaatgaagttggtcaaacctttctca

SEQ ID NO: 10687 - DNA, 6243 bp, synthetic construct
  misc_feature 1..6243: note = source = /note="Description of Artificial Sequence: Synthetic coding sequence"
  source 1..6243: mol_type = other DNA
atgctatgttgtcttctggtccgtgcatcaaatttgccgagcgcaaaaaaagatcgtagaagcgatcccgtcgcgagtctgactttccgcggggtcaaaaagcgaaccaaagttattaaaaactcagtgaatccagtctggaatgaaggattcgagtgggacctcaagggaatcccgctcgatcaaggttcggagttacacgttgttgttaaagatcacgagacaatgggacgtaataggtttttgggtgaagctaaggttccccttagagaggtcttggccacgccatcgctttcagcgtcgtttaacgcaccactgcttgatacaaagaaacaaccgacgggagcttcactcgtgttacaagtgagttatactcccctaccgggagccgtgcctttgtttccacctcctacaccactagagccttctccaacgctcccagatttggatgttgttgctgatactggaggagaggaggacacagaagaccaaggactaactggcgacgaagcagaaccttttctcgaccaaagtggaggaccaggagctcctacaactccgagaaagcttccatcacgaccaccgccacattatccaggaatcaagagaaaacgttccgccccgacatcccgaaagctcttgagcgataaacctcaagactttcagatccgtgttcaagtgatcgaaggccgtcaattgccgggtgtgaacattaaaccagtggtaaaagtgactgctgctggccagacaaaacggaccagaattcataaggggaacagcccgcttttcaatgaaaccctgttctttaatttgtttgattcaccgggtgaacttttcgatgaacctattttcattaccgtcgttgattcccgttctctgcgaactgacgcgctactgggcgaattcagaatggacgtcggaacaatatatagagaaccacgacacgcctatcttcgtaaatggctcctcttgtctgatccagacgatttctcagctggagcccgcggttacctcaaaacctctctgtgtgttttgggacctggtgacgaggcgccgctcgaacgcaaagatccatcagaggacaaggaggatattgaatcaaacttgcttaggccaacaggagtggcattgcgtggagctcatttttgtctaaaagtgtttcgtgctgaagatctaccacagatggacgatgctgtcatggataacgtaaagcaaatcttcggatttgagtccaacaagaaaaaccttgttgatcccttcgtcgaagtgtcatttgcgggaaagatgctttgctcgaaaatcctagagaagactgctaatccgcaatggaatcagaatataacacttccggcgatgtttccgagcatgtgtgagaagatgcgtatcagaattattgattgggaccgactcacccataatgatattgttgcaacgacttatctcagcatgtcaaaaatatcagcaccaggcggagaaattgaagaagagccggcaggtgcagttaagccttccaaggcctccgatctcgatgattatctgggattcttgcctacttttggaccatgttacattaatttgtatggatccccgcgtgaatttacaggattccccgacccatatacagagttaaacactggaaaaggggagggagtggcttaccgggggcgtttactgctcagcctggaaaccaaattggttgaacactctgaacaaaaagtagaggacctaccggcagatgacatcttgagagtggaaaagtacctccgtagaagaaaatactccctttttgccgctttctattcagctactatgttgcaggatgtggatgatgcaattcaattcgaagtgtcaattggaaattatgggaataaatttgatatgacttgcttacccctagcttcgactacccaatactcgcgggctgtgtttgatggttgccactattattacctgccatggggaaatgttaaaccggtcgtggttctgtcctcctattgggaagatatttctcaccggatcgagacgcaaaatcaacttttaggaatcgcagataggctggaggcaggattggaacaggtacatctagcattgaaagcgcaatgttctaccgaggatgtagattctcttgttgcgcagctcacagatgagctgattgcaggttgcagccagccattgggagatattcatgagactccgagtgccacacatctcgaccaatacctgtaccaactccgaacccaccatctgagtcaaattacggaggccgcgttggctctaaaactgggtcattccgagcttccagctgcactggaacaagcagaagactggcttctacgattacgggcgttggcagaagaacctcaaaacagtttaccggatatcgttatatggatgcttcaaggagataaaagagttgcttatcaacgggtgccagctcatcaggtgcttttttcaagacgcggagctaattattgtgggaaaaattgcggcaagctccagactattttcttgaaatatccaatggagaaggttccaggagctagaatgccggtgcaaatacgcgttaaattatggtttggattgtccgttgatgaaaaagaattcaatcagttcgcggaaggtaaattgtctgttttcgctgaaacttatgaaaatgaaacaaaactggctcttgtgggtaactggggaactactggactcacctacccaaagttttcagatgttacgggaaaaatcaaacttccaaaagatagtttcagaccaagtgctggatggacatgggcaggagattggtttgtctgtccagaaaagacgctgctgcacgatatggatgcaggccatctatcctttgtggaagaagtgttcgagaatcagactcgattgcccggtggacaatggatttatatgtctgacaattatacagatgttaacggagagaaggttttgccaaaggatgatattgaatgtccattgggatggaaatgggaagatgaggaatggtccactgacttgaatcgagctgtagatgaacaaggttgggaatacagtattactatcccaccagagagaaagccgaaacactgggttccggcagaaaaaatgtattacactcaccgacgtcgtagatgggttcgcctccgtcggcgtgacttaagccaaatggaggctttaaaacgacatagacaggctgaagccgagggagaagggtgggagtacgcaagtctctttggatggaaatttcacttagaataccgaaaaactgacgcttttcgacgcaggagatggagacgtcgtatggagcctttggaaaaaacgggccctgctgctgttttcgcccttgaaggagccctgggtggtgtgatggatgataagtctgaagattctatgtctgttagtaccctctctttcggtgtaaatcgaccaacaatttcgtgtattttcgattatggaaaccggtaccaccttcgctgctatatgtatcaggcacgtgatttagctgcaatggataaagattcgttctccgacccatacgccattgtatctttccttcatcaatcacaaaagactgtggttgtgaaaaacactttaaatccaacttgggaccagacactaattttctacgagatcgaaattttcggggaaccagctacggtcgcagagcaaccaccatcaatcgttgttgagctttacgatcatgacacttatggagcagacgaattcatgggacgctgcatatgtcaaccatccctagagcgtatgcctcgtctcgcttggtttccactcactaggggctcacaaccaagtggagaattgctggctagcttcgaattgatacagagagaaaagccagccatccatcacattccaggattcgaggtgcaagagaccagccgtatcctggacgaatctgaagacactgatcttccttacccgccgccacaacgggaagccaacatctatatggttcctcaaaatattaagccagctcttcagcgaactgccattgaaattctagcttggggactgcgtaatatgaagagctatcaacttgcgaatatttcatcaccaagccttgttgtggaatgcggaggtcagacagtccaatcctgcgttattaggaatctaagaaaaaatccaaattttgacatctgcaccttgttcatggaggtgatgcttccaagagaggaactttattgtccacccattactgttaaagttatagataacaggcagtttggccgaagacctgtagttggacaatgtacaatcagaagtctagaatctttcttgtgcgatccgtatagtgcagaaagtccatcgccacagggcggacctgatgatgtttccctactttcacctggtgaagatgtgttgattgatatcgatgacaaagagcctctcataccaatccaagaagaagaattcatagactggtggtcaaagttttttgcttcaattggagaacgagaaaaatgcggatcctatttggaaaaggatttcgatactttaaaagtgtacgacactcaactagagaacgtcgaagccttcgaagggctctctgatttctgcaatacttttaagctctataggggaaagacccaagaagaaactgaagatccaagcgtcatcggagaatttaaggggttgtttaaaatatatccactcccggaggatcccgcaattcctatgccgccacggcaattccaccaactcgctgcacaaggaccacaagaatgcttagttcgtatttacattgtccgggcatttggacttcaaccaaaggatccaaatggtaaatgtgatccatatatcaaaattagcattggaaagaaatccgtttcggaccaagataactatatcccatgcaccctcgaacctgtgttcggaaaaatgtttgaacttacatgtacattgccactcgagaaggatctgaagattactctctatgattatgatctcctttctaaagatgagaaaattggagagactgtggttgatttggagaatcgtcttctttcgaaatttggagctcggtgtggattacctcaaacatattgcgtaagcggacctaatcaatggcgtgatcaacttcgaccttcacagctactccaccttttctgtcaacaacatagagtcaaggccccagtatatcgtactgatcgagtgatgtttcaagataaagaatattcgattgaggaaattgaggctggacgaattcccaacccacatcttgggcctgttgaagagcggttagcattacatgttctccagcagcaaggtcttgtgccagaacacgttgaatccagaccactgtactcaccccttcagccagatattgaacagggtaaacttcagatgtgggttgatctcttccctaaagcactcggccgaccgggacctccattcaatatcacgccacgtcgtgctaggcgatttttcttgcgttgtatcatttggaacactcgtgacgtgatcttagatgacttatcactaactggagaaaagatgagcgatatctacgtgaagggttggatgataggatttgaagagcataaacaaaaaaccgatgttcattaccgatcactaggaggggagggtaattttaattggcggtttatcttcccgttcgattatctcccagctgagcaggtttgtactattgctaaaaaagatgctttttggcgacttgataagaccgaatcaaaaataccagcacgagtagtttttcaaatttgggacaacgataagttcagctttgatgattttcttggatctttgcaacttgatcttaaccggatgcctaagcccgctaagaccgctaaaaaatgttcactggatcagcttgatgacgcattccatcctgaatggtttgtttcactattcgaacaaaaaacagttaaaggatggtggccgtgcgttgcagaagaaggagaaaagaaaatacttgcaggaaaattggaaatgacgctcgaaattgttgctgagtcagaacacgaggagcgacctgccggacaaggacgagatgaaccgaatatgaaccctaaacttgaagatccacgtagaccagacacctcgtttctctggtttacttcgccatataaaactatgaaattcatcttgtggcgtcgattcagatgggcaattatattattcattatcttgttcatcttgttattgtttttagcgatttttatttatgcatttccgaactatgcggccatgaaattggttaagccattttcg

SEQ ID NO: 10688 - DNA, 6243 bp, synthetic construct
  misc_feature 1..6243: note = source = /note="Description of Artificial Sequence: Synthetic coding sequence"
  source 1..6243: mol_type = other DNA
atgctgtgctgcctgctcgtgcgggcgtctaatctgccgtcagcgaagaaagacaggcgctccgacccggtcgcctcgctcaccttccgaggcgtgaagaagaggaccaaagtgattaagaactcggtcaacccagtgtggaatgagggcttcgagtgggacctcaagggaatcccactggatcaaggatcggaacttcatgtggtcgtgaaagaccatgaaactatgggacgtaaccgcttcctcggcgaggctaaggtcccccttcgtgaagttcttgccactccgtcactctcggcctccttcaacgcgccactgctggacactaaaaagcagcctaccggggcatccctggtgttgcaggtgagctacactccgctgccgggcgcggtaccacttttcccacctccaactccgctggaaccgagcccaaccctccccgacctggatgtggtcgctgacactggcggagaggaggataccgaggaccagggactcaccggggatgaagcggagccttttcttgaccagtcgggaggacctggagcccctacgactccgcgcaaactcccgtcgcggccgcccccgcactacccgggtatcaaaaggaagcgctccgctccaacgtcgcgcaaactgctctcggacaaaccgcaggactttcaaattagggttcaggtcatcgagggtcggcagctgcccggagtgaacatcaaaccggtggtcaaggtcaccgctgctggacaaaccaagagaaccagaatccacaagggtaattcaccattgtttaacgagactttgttcttcaacttgtttgattccccgggcgaactgtttgatgaaccgatcttcatcaccgtcgtggactcacggtccctccggacggatgcgctcctcggagagttccggatggacgtgggcacgatctaccgcgagccccgccacgcatacctccgaaagtggctcctgctgtccgacccggatgactttagcgcaggagcccgcggttacttgaaaacgtcgctgtgcgtgcttggtccaggtgatgaggctccactggaacgcaaggacccctctgaggacaaagaggacatcgagagtaacctcctgcggcccaccggcgtggcacttcggggggcgcatttctgcctcaaagtctttagagccgaagatctgccacaaatggacgatgccgtcatggacaacgtgaaacagatcttcgggttcgaatcaaataagaaaaaccttgtggatcctttcgtggaagtgtcgtttgcgggcaaaatgctgtgtagcaagattcttgaaaaaacggccaatccacagtggaatcagaatatcactcttcctgcgatgttcccttcgatgtgcgagaagatgcgcattaggataatcgattgggaccggttgacccacaacgatattgtcgcaaccacctacctctccatgagtaaaatctcagctccagggggagagatcgaagaggaaccggccggagcagtgaaaccttcgaaggcctctgatctggacgactaccttgggttcctccccacgttcggcccctgctacatcaacctctatggaagcccacgagaatttactggttttccggacccttacaccgagctgaacaccggaaaaggagaaggtgtggcgtatcgcggtcgcctcctcctctctttggaaaccaaactggtggagcattccgagcagaaggtggaggacctgccggcggatgatatcctgcgcgtggagaagtacctgcgcagacggaagtattcgctgttcgcggccttctactcagcgactatgctgcaggatgtggatgacgccatccaattcgaagtgtccattggtaattacggcaataagttcgacatgacctgccttccgttggcctcgaccactcagtactcccgagcagttttcgacggttgtcactactattaccttccctggggcaacgtgaagccagtcgtcgtcctcagcagctattgggaggacatctcccatcggatcgagactcaaaaccagctgctgggcatcgcagaccgcctggaagcgggactggaacaagtccatctggcactcaaggctcagtgttcgaccgaggacgtggattcattggtcgcccagctgaccgacgaactcatcgccggctgctcccaacctttgggtgatatccatgagactcctagcgccactcatctcgatcagtacctttaccagctgaggacgcaccatttgagccaaatcacggaagccgccctcgccctgaaactgggccactccgagttgcccgccgcgctggagcaagcggaggactggctgctgagactccgggcactcgctgaagagccacaaaattccttgccagacatcgtgatctggatgctgcagggagacaaacgcgtggcgtaccagcgggtcccggctcaccaagtgctgttctcccgcaggggagcgaactactgtggtaagaactgtggcaagctccaaactatcttccttaagtaccctatggagaaggtgccaggagccaggatgcccgtgcaaatcagagtgaagctgtggttcggactgtcagtggatgaaaaagaattcaaccagttcgccgagggtaaactgtcagtgtttgcggagacgtatgagaatgaaaccaagctcgcgcttgtgggcaattgggggaccaccggattgacttacccgaagttttctgacgtcactggcaagatcaaactgccgaaggatagcttcaggccttcggcaggatggacctgggcgggagactggttcgtgtgccctgaaaagaccctgctgcacgacatggatgccggtcacctgagcttcgtggaagaggtgtttgaaaaccagacccggctgcctggtggacagtggatctacatgtccgataactacactgacgtgaacggagaaaaggttctgcctaaggatgatatcgagtgtccgctgggatggaagtgggaagatgaagaatggtcgaccgacctcaaccgcgctgtcgacgaacagggttgggaatactcgattaccattccgcctgaacggaagccgaagcactgggtgccggccgaaaagatgtactacactcaccgacggcgacgctgggtccggctgcggcgccgggatctgtcgcagatggaggcccttaaacgccacaggcaggccgaagcagagggagaaggatgggagtatgctagcctgttcggctggaagttccatctggaatacagaaagactgacgcattccgccggcgccgctggcggcggcggatggagccactggaaaagaccggcccggccgcggtctttgcgctggaaggagctctgggcggcgtgatggacgataagtcagaagatagcatgtccgtgtccactctttcgtttggggtgaatcgcccaaccatctcctgcatcttcgattacggcaatcggtaccacctgcggtgctacatgtaccaggcacgcgacctcgccgccatggataaagactcattttcagacccatacgcaatcgtgagctttctccatcaatcgcaaaagactgtcgttgtgaaaaacactctcaatccgacctgggaccagaccctgatcttctacgagatcgaaatcttcggagaaccagctaccgtcgcagaacaacccccgtctatcgtggtcgagctgtacgatcacgatacctacggagccgatgaattcatggggagatgcatatgccagccaagcctcgaacggatgccgaggctggcctggttccctctgacccggggaagccagccgtctggcgagctcctggcctcattcgagctgatccagcgggagaagccggcaatacatcacatcccaggatttgaagtgcaggagacttcaaggatcctggacgagagcgaagatactgacctcccatacccaccaccgcaacgggaggccaacatctatatggtgcctcagaacattaagccagctctccaacgaacggcaattgagatccttgcctgggggctcaggaacatgaagagctaccagctcgcaaacatttcaagcccctctctggtggtcgaatgtggtggccagactgtgcagtcgtgcgtcattagaaatctgcggaaaaacccgaactttgacatctgcaccctcttcatggaagtcatgctcccacgggaggaactctactgtccaccgatcactgtgaaggtcatcgataatagacaattcggccggcgccctgtggtcggccagtgcactatccggtcgcttgaatcgttcctgtgtgacccctattcagccgaatcaccgtcacctcaaggcggacccgatgacgtctctctgttgtcgcctggggaggacgtcctgatcgatatcgacgataaggagccgctcattcccatccaagaggaagaattcattgattggtggtcgaaattcttcgcatccatcggagagcgggagaaatgcggaagctacctggagaaagatttcgataccctgaaggtctacgatacgcagctggaaaacgtggaggcttttgaggggctgtccgacttttgcaacacgttcaagctgtaccggggcaagactcaggaggaaaccgaagatcccagcgtgatcggagaattcaagggcctgttcaagatctacccgttgcccgaggacccggcgattccaatgcctccacggcagttccatcagctggcggcccaaggtccgcaggagtgtctcgtcaggatctacatagtccgggcattcggattgcagcctaaggacccaaatggaaaatgtgacccgtacatcaagatctcgatcgggaagaaatcggtcagtgaccaggacaactacatcccgtgcactctcgaacctgtgttcggaaagatgttcgagttgacctgcaccctgccgctggagaaggacctcaagatcactctttacgactacgacctcctgtcgaaggatgagaagattggtgaaactgtggtggatctcgagaacagacttctctccaagttcggggcacgttgtgggctgccgcaaacctactgcgtgtccggacccaatcagtggcgggaccaactcagaccatcccaactcttgcatctgttctgtcagcagcatcgcgtgaaggcaccggtgtaccgcactgatcgggtgatgttccaagacaaggaatactctatcgaggaaatcgaagcagggagaatcccgaatccgcacctggggcctgtcgaggagcgcctggcgctgcacgtcctgcaacagcaaggcctggtcccggaacacgtcgaaagcaggcccctgtacagcccgcttcagccggatattgagcagggtaagctgcagatgtgggtcgatctgttcccgaaggcattgggtagaccgggaccaccattcaatatcaccccacggcgcgcccgcagatttttcctgcgatgcattatctggaacactagggacgtcatcctggacgacctttccctcactggagaaaagatgtcagatatctatgtgaaaggatggatgattggcttcgaagaacacaagcaaaaaacggatgtgcactaccgctctctcggaggagaaggcaatttcaactggagatttatcttcccttttgattacttgcccgcggaacaggtctgcactatcgctaaaaaggacgctttttggagactggataagactgagtccaaaatccccgcacgcgtggtgtttcagatatgggacaacgacaaattctcctttgatgattttctcgggagcctccaactggacttgaataggatgccgaagccagccaagaccgccaaaaagtgtagcctcgaccaattggacgacgcctttcacccggaatggttcgtgagcttgttcgagcaaaagaccgtcaagggatggtggccttgcgtggcggaggagggcgaaaagaagatcctggccggaaagttggagatgactctggaaatcgtcgccgaatcagaacacgaagaacgaccggcgggccaaggacgggatgagcctaacatgaatcctaaactggaggacccgcggcgcccggacacctcgttcctctggttcacttccccctacaaaaccatgaagttcatcctgtggcggcgcttcagatgggcgatcatcctcttcatcatcctgttcatcctgctgctcttcctcgccatcttcatctacgccttccctaactacgcggcaatgaagttggtgaaaccgttctcc

SEQ ID NO: 10689 - DNA, 6243 bp, synthetic construct
  misc_feature 1..6243: note = source = /note="Description of Artificial Sequence: Synthetic coding sequence"
  source 1..6243: mol_type = other DNA
atgctctgttgtctactagttagggcctctaacctgcccagtgctaagaaggatcgtcgcagcgaccccgtcgcttccttgaccttccggggagttaagaagcgtaccaaggttatcaaaaattcagtaaatcctgtctggaacgagggcttcgagtgggatctaaagggaattccgctggaccaaggcagcgagctccacgtagtagtcaaggatcacgaaactatgggaagaaaccgtttccttggagaagccaaggtgccactgagggaggttcttgccacaccctcactgagtgcttcattcaacgctcccctgctggacaccaaaaagcagcccacaggagcctccttagtgctgcaggtgtcgtacacgcccctgcctggcgctgtgcccctgttcccccctcctactccactcgagccatcacctactctgcctgatctggatgtggtggctgatacggggggcgaggaggacaccgaggaccagggcctgaccggtgacgaggcagagccatttcttgatcagagtggaggcccaggtgcccctaccacccccagaaaattaccctcacggccaccaccacactacccggggattaaaagaaaaaggtcggccccaactagcagaaagctgttgtctgataagccgcaggattttcaaattcgggtccaggtgatcgagggcagacagctccccggggttaatatcaagccggtggtgaaagtgactgcagcaggtcagactaaacgcaccagaattcacaaaggaaattcccctttgttcaatgagacactgttctttaatttatttgacagccccggagagctattcgatgagcccattttcatcacagtcgtggacagccgctctctcaggacggatgctcttttaggggaatttcgcatggatgtcgggactatatatcgagaaccgcggcatgcctatctgagaaagtggctgctgttaagtgatcctgacgacttttctgccggggcgagaggctacctcaaaacatccctgtgcgttctcggcccgggcgatgaagctcccttggaaagaaaggacccgagcgaggacaaagaggacattgagtccaatcttctgcgacctacgggagttgccctgcgtggcgcacatttttgtctcaaagtgttcagggctgaggatttgcctcaaatggatgatgctgtgatggacaacgttaaacaaatattcggttttgagtctaacaagaaaaatcttgtggatcccttcgtagaagtcagctttgctggtaagatgttgtgttcgaagatcctcgaaaagacggccaacccccagtggaatcagaacatcacattgcccgccatgttcccgagcatgtgcgaaaagatgcggattcgtatcatagattgggataggcttacccacaatgacatagtggcgacaacttatctcagcatgtccaagatcagtgcacccgggggcgagattgaggaagagccagccggcgctgtgaaaccctctaaagcttctgacctggatgattacttgggcttcttgcctactttcggaccttgctatattaacctgtatgggtcccccagagagtttaccggtttccctgacccctacacagagctgaacactggaaagggggaaggtgtggcttaccggggccggctgctgctgtcacttgaaacgaaactggtagaacacagcgagcaaaaagtcgaagatttgcctgcagacgacatccttcgcgtcgaaaaatacttgcgtcgccgaaaatattctttgtttgccgcattttattccgccacaatgctccaggatgtggatgacgccatccagtttgaagtgtctatcggcaattacgggaacaagttcgatatgacctgcctgcccctcgcttccaccacccagtactctagggccgtattcgatgggtgtcattactactatctgccatggggaaacgttaagccggtggttgtactgagttcatactgggaggatattagccaccgcattgagacccagaaccaactgctgggcattgccgaccgacttgaggctggactcgaacaggtgcacctggcattgaaagctcagtgctccactgaagacgtcgacagcctggttgcccagttgacagatgaactcatcgccggctgcagccagcccctaggtgacatccatgagacaccttcggcaacgcacctggatcagtatctctatcaacttcgcacgcaccatttatcccaaatcacagaagcagctcttgctctcaagctgggacacagcgagctgcccgccgccctggaacaggctgaggattggttattgcggctgagggccctggctgaggagccccagaactccctgcctgacatcgtgatctggatgctacagggggacaagagggtggcatatcagcgcgtacccgctcaccaggtgctattcagtcggagaggcgcaaactactgcggaaagaattgtggcaagctccagacgatctttttgaagtacccaatggaaaaggtcccaggcgctcgaatgccggtgcagatccgcgttaagttgtggttcggcctctccgtcgatgaaaaggaatttaaccagtttgccgaaggaaagctctctgtgttcgccgagacgtacgaaaacgagactaagctcgcgctagtgggaaactggggaacaaccggattgacttacccaaagttctctgacgtgacaggtaagattaaacttcccaaagactccttccgtcctagcgcaggctggacatgggctggggattggttcgtgtgtccagagaagactctcctccatgacatggatgctggccacttgtccttcgtggaggaagtgtttgaaaatcagaccagactgccagggggccagtggatttatatgtccgacaattacaccgacgtgaacggcgagaaggttctgcccaaggacgacatagagtgtcctttgggatggaaatgggaggacgaggagtggtccacagacctcaatagggcggttgatgagcaaggctgggaatattctatcactattccgcctgagcggaaacccaagcattgggttcccgccgagaaaatgtactatacgcatcggcgtaggcgttgggtacgcttacggcggagagatttatcccagatggaggctctgaaacgccatcgccaggccgaagccgagggcgaaggatgggagtacgcgagtctgttcggctggaaattccacttagaatatcgtaaaacggacgcttttcgtcgtcgtaggtggcgacggaggatggaaccacttgagaagacaggtccagcagccgtattcgccctagaaggggcccttggaggggtgatggacgataaatccgaggattctatgagcgtgtcaaccctgagtttcggtgtgaaccgcccaacaatatcctgtatcttcgactacgggaatagataccatctacgttgttacatgtatcaggctcgcgatctggccgccatggacaaggacagctttagcgacccttacgctatcgttagcttcttgcaccagagccagaaaacagttgtggtgaaaaacacccttaatcccacctgggaccagactctcattttttatgagatagaaatatttggggagcctgcaactgtagccgaacagcctccttccatcgtagtcgaactgtatgaccacgatacctatggggcagatgaattcatggggcgatgtatttgtcagccctccctcgagaggatgccaaggctcgcttggtttcctctcactcgaggctctcagccaagcggcgagctcttggcctctttcgagctgatccagcgagagaagcccgcaatccaccatataccaggttttgaggttcaggaaacgtctagaatcctcgatgaaagtgaagacacagacctaccatatccgcccccgcagcgtgaggcaaatatctatatggtgcctcagaacatcaagccggcactgcagaggacggctatcgaaatcctggcctggggtctgcggaatatgaaaagttaccagttggccaatatatcttccccgtccctcgtggtagagtgcgggggtcagacagtgcaatcatgcgttatacggaatttgaggaaaaaccctaacttcgatatctgcactcttttcatggaggtcatgttgcctcgcgaagaactttattgcccacccattacagttaaggtgattgataatcgccaattcgggagacggcccgttgttggccagtgtacgatacgaagcctcgagagcttcctgtgcgatccatactctgcggagagcccttcccctcagggcggtccggatgatgtgtcacttctgtccccgggagaggacgtcttgatagacatcgatgacaaagagcctctcatcccaattcaggaagaggagttcattgattggtggagtaaatttttcgcgtcaatcggtgaacgcgaaaagtgcggaagttatctcgagaaggactttgacactctgaaagtgtatgatacccaactggaaaatgtggaggcatttgaaggtctgtctgatttttgtaatactttcaagctctatcggggcaagacccaggaggagaccgaagacccctccgtgattggagagttcaagggcttattcaagatttatcctctccccgaagatcctgcaatcccaatgccccccagacaattccatcagcttgccgcacagggaccgcaggaatgccttgtgcgcatctacatcgtgcgtgcttttggtttgcaacctaaggatcccaatggcaaatgtgatccctacatcaaaatatccattgggaagaagagtgtgagtgatcaagacaactacatcccatgcacactggagccagtcttcggtaaaatgttcgaacttacatgcacactgccactggagaaagatctgaaaatcaccttgtacgattacgatctgctgtctaaagatgagaagattggagagaccgtcgtcgatctcgaaaatcggctgcttagcaagtttggcgccaggtgtggcttaccgcaaacctattgtgtgtccggccctaaccagtggagagaccagctccgacccagccagctcctgcatctattctgtcaacagcatcgcgttaaagctcctgtgtacaggactgacagggtgatgttccaggataaagagtattccattgaagaaatcgaggccggccgcattccaaaccctcatctaggtccagttgaggaaagactggccctgcacgtactgcagcagcagggattagtccccgaacatgtggagagccgccccttgtatagtcctttgcagcccgatatcgagcaaggaaagttgcagatgtgggtggacttatttccaaaagccctcggaaggcctggacctcctttcaatataactccgagaagggcccggcggttcttccttcgttgtataatttggaacacccgcgacgtgattttagatgacctcagcctcacaggcgagaagatgtctgatatctatgttaagggatggatgattggtttcgaagaacacaagcagaagacagatgtccactaccgaagcctcgggggcgagggcaacttcaattggcggtttatctttccctttgattatcttcctgcggaacaggtgtgtactatcgcgaagaaggacgccttttggagactagataagactgagtccaaaattcccgctagagtggtgtttcagatttgggataacgacaaattctcgtttgacgattttctaggctcactgcagctggatcttaatcgcatgcctaaacccgccaaaactgctaagaagtgttctctggaccagcttgacgatgctttccacccggaatggtttgtgagtctgtttgaacaaaaaacggtgaagggctggtggccttgtgtggcggaggaaggcgaaaagaagattctcgctggtaaacttgaaatgaccctggagatcgtggcagaaagcgagcatgaagaaagacccgcagggcagggtagggacgaacctaacatgaaccctaagcttgaggatcctcggcgtccagacacctcattcctgtggttcacgtcaccgtacaagaccatgaaattcattctgtggcgaagattccgctgggctatcatcctgtttataattctgtttatactgcttctgtttcttgctatctttatttatgcctttccaaattacgccgctatgaagctggtgaagccattcagt

SEQ ID NO: 10690 - DNA, 6243 bp, synthetic construct
  misc_feature 1..6243: note = source = /note="Description of Artificial Sequence: Synthetic coding sequence"
  source 1..6243: mol_type = other DNA
atgctctgttgccttctcgttagagcgtctaatctgcccagtgccaagaaggaccggcggtctgatccggtagcatcgttgacattcaggggtgtcaaaaagcgaactaaagtgattaagaacagtgttaatcctgtctggaatgagggattcgaatgggatctgaaagggatacctctcgatcaaggcagtgagctgcacgtcgtggtgaaggatcacgaaacgatgggacggaatcgctttttgggcgaagccaaggttcctctgagggaggtgctggccaccccaagcctcagcgcatccttcaatgcccctcttcttgacaccaagaaacagcccacaggcgccagcctggtgctccaggtgtcttatacgccgctgccaggtgccgttccactgttcccgccaccaacacctcttgagccatccccaactctccccgatctggacgtcgtggccgatactggtggggaggaggataccgaggatcaggggctgaccggtgatgaggctgagccttttctcgatcagagtggtggccccggcgcccccactacccctaggaaactgccctctcgaccacccccacactaccccgggatcaaacggaagaggtctgccccgacctcccgcaaattgttgagcgataaaccacaggattttcagatccgggtgcaggtcatagaagggcgccaactgcctggcgttaatattaagcctgttgtgaaggttaccgccgctggccaaaccaagcgcacccgaatccataaagggaacagcccactgttcaacgaaacgctgttcttcaaccttttcgatagccccggcgagctattcgacgaacccattttcattacagtcgtcgactcacgcagtctgaggactgacgcgcttctgggagaattccgtatggacgtcggcacaatataccgagaaccgaggcatgcttatcttcggaaatggttgctcctcagtgatcctgacgacttctcagcaggcgccagaggctaccttaaaactagcctctgtgtgctaggaccaggagatgaagctccgcttgagcggaaggatccttctgaggataaggaagacattgagtctaatctcctacggcctacgggggtcgccctgcgtggagcccacttctgcctcaaagtgttccgggcagaagacttgccgcagatggacgacgccgtaatggataatgttaagcagattttcggttttgagagtaacaagaagaatttggtcgacccatttgtcgaagtttcgttcgctgggaagatgttgtgctcaaagatcctcgagaagaccgcaaatcctcagtggaaccagaatattactctgcccgcaatgttcccaagcatgtgtgaaaagatgagaatccgaatcatcgactgggatcgtctaactcacaacgatatcgtcgcaactacctacctgtccatgtccaagatttcagctccaggtggggagatagaggaggagcctgccggagcagttaaaccctcgaaggcgagtgatctggacgactacctaggatttctgcctacgttcggaccatgttatattaacctctacggcagccctcgcgaatttactggttttcccgatccgtataccgaattgaacacagggaagggagaaggcgtggcttaccgcggacggctactgctgtcccttgaaactaagctagtggaacacagcgagcaaaaggtagaggacttgcccgccgatgacatactacgggtcgagaagtatctgaggcgtagaaaatatagcctctttgccgcgttctattcagctactatgctccaggatgtggacgacgctattcagtttgaggtgagcattggtaactatggtaacaaatttgacatgacctgtctcccactcgccagtacaacacagtattctagagctgtgttcgacgggtgccattattattacttgccctggggcaacgtgaagccagtggtggtgctttcctcttactgggaggatatcagtcatcgcatagagacccagaatcagctcctcgggatagccgaccgcctggaggcaggtttggaacaagttcatctggctctgaaggcacagtgcagcacagaggacgtcgacagtttggtcgcccagttgacagacgagcttatcgcagggtgtagtcagccgctgggagacatccacgagacgccttccgcgactcatttagatcagtatctataccaattgaggacacatcaccttagccaaattacagaggctgccctggccctcaaactcggacacagtgagctcccagccgctttggagcaggcggaagattggttgctgaggctgagagccctggcagaagagccgcaaaattccttgcccgacatagtgatttggatgctgcagggggacaaaagggtggcatatcagagggttcctgcccaccaggttctcttctccaggcgcggcgcaaactattgcggcaagaactgtggtaagctacagacgatctttctgaaataccccatggaaaaggttcccggagctaggatgcctgttcagatacgggtgaaactgtggttcggattgtcagtggacgagaaggagtttaatcagtttgcggagggcaagttgagcgtgtttgcggagacatacgaaaatgagactaagcttgctctggtaggaaactggggcacaactggtctcacgtacccaaaattctctgatgtgacaggtaagataaaactccctaaggacagctttcgaccaagcgcagggtggacgtgggccggcgattggttcgtatgtcccgaaaagacacttctgcatgacatggatgccggacatctgtccttcgtcgaggaggtgttcgaaaatcagacccgccttccaggtggccaatggatctatatgagtgacaattacacagatgtgaatggagaaaaggtgctgcccaaggacgacatcgaatgcccacttgggtggaagtgggaggatgaggagtggtccacagatcttaatagagcagtggatgagcagggctgggaatatagcatcaccataccccctgaacgaaaaccaaaacattgggtacctgccgaaaaaatgtattatacccaccggcgcaggaggtgggtgcgcctgcggaggagggacctatctcagatggaggcgctgaagagacaccgacaggctgaggcagagggcgaaggttgggaatacgccagcctgttcggatggaaattccatctggagtatcgcaaaacagatgcctttcgccgcaggcggtggcgaagacggatggagcccctggagaagaccgggcccgcagccgtctttgccctggagggggccctcggaggtgtgatggatgacaaatctgaggacagcatgagtgtcagcaccttgagctttggagtcaatagaccaactatctcatgtatcttcgactacggcaatagataccacctgaggtgctacatgtaccaggcaagggatctggcggcgatggacaaggatagttttagcgacccgtatgccattgtttcatttcttcatcagtcacagaaaaccgtggtagtcaaaaataccttgaacccaacatgggaccagactctcatcttttacgagatcgaaatttttggcgaacccgcgaccgtagcagagcagccccccagcattgtcgtggaactctacgaccacgacacgtacggggccgacgagtttatgggccgatgtatctgccagccatcattagaaaggatgcctaggcttgcttggtttcctttaactcggggctcccagccctctggcgaactcctggccagcttcgaactcatccagcgggagaagcctgcgatccaccacattcccggatttgaagtacaggagacgagcaggattctggatgagagcgaggatactgacctaccctacccaccaccgcaacgggaagccaacatctacatggtgccacagaatattaagccagctctgcagcgcacagcgattgagatccttgcttggggtctgcgaaatatgaaatcctaccaactggcaaacataagctccccttctttggtagttgagtgcggcggccagaccgttcagtcttgcgtcatccgaaatctccgtaagaatcccaacttcgatatttgcacactttttatggaggtgatgctacctcgggaggagctctattgtcctcctattacagtgaaggtcatcgacaataggcagtttggtagaaggccagtggtcggacagtgtacaatccggagcctggaatctttcctatgtgacccctactccgcggagtctccatcaccacagggaggtccagatgacgtttcgctgctgtcaccaggagaagacgtgctcattgacatcgacgataaagagcccctgattcctatccaggaagaagagttcatcgattggtggagtaagtttttcgcaagtattggcgaacgagagaaatgcggctcttatctcgaaaaggatttcgatacactgaaagtgtacgatactcaactcgagaacgtcgaagcatttgaggggctaagcgacttctgtaatacttttaagctgtacaggggcaagactcaagaggagaccgaggatccttcggtcataggtgagtttaaaggactttttaaaatttacccactgcctgaggaccccgccatccctatgccccccaggcaattccatcagctggccgctcaggggccgcaggaatgtctggtccgcatctatattgtcagagctttcggcctccagccaaaagatcctaatgggaagtgcgatccatacatcaagatttccatcgggaagaaatctgtgtctgatcaggacaactatatcccatgcacactggagccagtatttggcaagatgttcgagctgacctgtaccctgcctctggagaaagacctgaaaataacactctatgactatgacctgctgagcaaggatgaaaagatcggagagacggttgtagacctggagaatcggctgctctccaagttcggcgctaggtgcgggttaccacagacctattgcgtaagtggccccaaccagtggcgggaccagctgagaccatcccaattactgcatttgttctgtcagcagcacagggtcaaagctcctgtgtaccgcaccgatcgcgttatgttccaggacaaagagtattcaatcgaagaaatcgaggctggccgcattcctaatccccatcttggccctgtggaagagcggctcgccttgcatgtgctccagcagcaggggctggtgcccgaacatgtggaaagccggcccctctacagccccctccagcccgacatagagcaggggaagctgcaaatgtgggttgacctgttcccaaaagctctgggccgtcctggcccaccgtttaacattaccccccgacgcgctcgccggttcttcctccggtgtatcatctggaatacacgtgacgtgatcttggatgatttatccctgaccggagagaagatgtccgatatctatgtgaaagggtggatgatcggattcgaggaacataagcagaagactgacgtccattatcgaagtttagggggggaaggaaattttaattggcggttcatatttcccttcgactatttgccggctgaacaggtgtgtacaattgcaaagaaggacgctttttggcgtttggacaaaaccgaatcgaagattcccgcacgtgtagtctttcaaatctgggataatgataagttctccttcgacgatttccttggctcactgcagctggacctcaaccgcatgccaaagcccgccaaaactgccaaaaagtgttccctggatcagttggacgacgctttccaccctgaatggttcgtatccttattcgaacagaagactgttaaaggctggtggccttgtgttgccgaggagggcgagaaaaagattctggctgggaagttggaaatgacattggagattgtagctgaatcagagcacgaggagcgccccgcaggacagggtcgggacgaacccaacatgaatcccaaactggaggaccctaggcgccccgatacatcgttcctctggttcactagtccctacaagactatgaaatttattctgtggcggaggtttcggtgggcgatcatactgtttatcattttgttcattctcctgctatttctggctattttcatctacgcatttccaaattatgccgctatgaagctggtgaagcccttttcc

SEQ ID NO: 10691 - DNA, 6243 bp, synthetic construct
  misc_feature 1..6243: note = source = /note="Description of Artificial Sequence: Synthetic coding sequence"
  source 1..6243: mol_type = other DNA
atgctctgctgcctcctggttcgggctagtaatctcccctccgctaagaaagaccgaaggagtgatccagttgccagtctcacctttcgaggcgtgaagaaacggacgaaggtgattaagaattccgtgaatcccgtgtggaatgagggatttgagtgggatctcaagggcattcccctggatcaaggaagtgaactccatgtcgtggtgaaggatcatgagaccatgggcagaaacaggttcttgggagaagccaaggtgccactgagggaagtgctggcaacaccctctctgagcgccagctttaatgcccctctccttgacactaagaagcagcccacaggcgcgtctctggtactccaggtgagttatactcctctccctggcgcagtccccttgttcccacccccaacccccctggagccctctcctacactgcctgacctggatgtagttgccgatactggaggcgaggaagacactgaggaccagggattgaccggggacgaggcggagccttttcttgaccagagcggcgggcccggggctcccacaacccccaggaagcttccctcaaggcctcccccccactaccccggcattaagcgaaagcggtctgccccaacttcaaggaagcttctcagtgacaagccacaggattttcagataagggtacaggtcatcgagggccggcagctgcctggcgtgaacatcaagcctgtcgtcaaggttaccgctgccggccagacaaagcgcactcgcattcataagggcaactctcccctgttcaacgagaccttgttcttcaaccttttcgattctcctggcgaactgttcgacgaaccgatattcataacagtggttgattcccggtccctccgaacagatgccctcctgggcgaatttaggatggacgtaggaactatttatcgggagcctcgccacgcctatcttcggaagtggctgctcctgtctgaccccgacgacttctccgccggggctcggggctacctgaagacatcactctgcgtgctcggccccggcgacgaagccccgctcgagcggaaggacccatcagaggacaaggaggatatagaaagtaaccttctcaggcctacaggggtggccctgaggggggcccatttctgtttgaaggtgtttagagctgaagatctgccgcagatggacgacgcggtgatggacaatgtgaaacaaatttttggtttcgaatcaaacaagaaaaatctggtggatcctttcgttgaggtcagttttgcgggcaagatgctgtgtagtaagatcctcgaaaagacagctaatccacagtggaatcaaaatattacgttgccagccatgttcccatccatgtgtgagaaaatgagaattcgcataattgattgggatcgcctcactcacaatgacattgttgctactacctatctgagcatgtccaagatctctgcaccaggaggggagatcgaagaggaacccgcgggcgccgtgaaaccatcaaaagcaagcgaccttgacgattatctgggctttttgcccactttcggaccttgttacatcaacttgtatgggtcccctcgggagttcaccggattccctgatccatacactgagttgaacactgggaaaggggaaggagtggcatataggggtcggctgctcctgtctctggaaacaaagctggtggaacactccgaacaaaaagtagaggacctccccgcagacgacattctgagagtggaaaagtacctcaggagaagaaagtacagcttgtttgccgccttctactcagctaccatgctgcaggacgttgacgatgctatccaattcgaggtgtcaataggaaactatggaaacaagtttgacatgacatgcctgccgcttgccagtacaactcaatactcccgagctgttttcgatggctgtcattactactatctcccctggggtaacgtaaagccagtggtagtccttagctcatactgggaggacatctctcacagaatcgagactcaaaaccagctcctggggatagccgacaggctggaggctgggttggagcaggtccacctggctctgaaggcacaatgtagcactgaagacgtggacagcttggtagcacaactgacggatgagctgattgccgggtgttctcagcccctgggcgacattcatgaaaccccctccgcaactcacttggaccaatacctgtatcagctccgcacgcatcacctttcccagatcaccgaggcagctctggctttgaaactgggccacagcgaattgcccgccgccctcgagcaggcagaggactggctgctgaggctgagagccctcgccgaggaacctcagaactcactccccgatatagtgatatggatgctccagggcgataaaagggtcgcttatcagagagtccccgctcaccaggtgctgttttccaggcgcggcgcaaactactgcgggaagaattgcggcaaactccagacaatcttcctcaaatatcctatggagaaggtgccgggagccaggatgccagtgcagattagggtgaagctttggttcggactgtccgtggacgagaaagagtttaatcagttcgcggaaggtaaactctccgtctttgccgaaacctacgagaatgagacaaagttggcactggttggtaactggggaactacaggcttgacctatcccaagttttcagacgtgacgggaaagatcaagctgccaaaagattcattcagacccagtgccggttggacatgggcaggtgactggtttgtatgcccggaaaagacgttgttgcacgatatggatgcgggtcaccttagctttgtggaggaagtctttgagaaccagacaagactgcctggcggccaatggatttatatgagcgacaactacacagacgtgaacggagaaaaagtactgcctaaggacgacatcgagtgtcccttgggctggaaatgggaagacgaggagtggtctactgatcttaacagggcagttgacgaacaagggtgggaatactctataaccatcccacccgagcggaagcctaagcactgggtgcctgccgagaagatgtattatacgcacaggagacgccgctgggtccgattgagacggagagacctgagtcagatggaggctctgaagcggcacaggcaggctgaggccgaaggtgagggatgggagtacgcgagtctgtttggatggaaatttcacctggagtacaggaagaccgacgcgtttcgaaggcgccgctggaggcgccggatggagcccttggaaaaaacaggacccgccgctgtcttcgcgctggaaggtgcgctgggaggagtgatggacgataagagtgaagactccatgtctgttagtaccctgagcttcggcgtaaacaggccaacaatttcctgcatcttcgactacggcaataggtatcatctgaggtgttacatgtaccaggcacgggatctggctgctatggacaaggactctttcagtgacccttacgcaatcgttagctttcttcatcagtctcagaagacagtcgtcgtgaaaaacacgctcaaccccacttgggatcaaacattgattttttatgaaattgagatctttggagagccagccactgtcgcagaacagcctccttctatcgtagtggaattgtatgaccatgacacctatggggccgacgaatttatgggccgctgcatctgtcagccatcactggagcggatgcctagattggcctggtttccgcttacacgcggttcccagccttccggcgagcttctggcctccttcgaactgatccaaagggagaagccggcaattcaccacatcccgggcttcgaagtgcaagaaacgtctaggattctggacgaaagcgaggatacagaccttccatatcccccccctcagcgagaggccaacatctacatggtgccccagaatataaagcctgcactccagcggactgcaatcgagattctcgcttgggggctgaggaatatgaaatcttaccagttggcaaatatctcttcccccagcttggtcgtcgaatgcggaggtcagaccgttcagagttgtgtaattagaaatcttaggaaaaacccgaacttcgacatctgcactctttttatggaggtgatgttgcctagagaagagttgtattgtccaccaataacggttaaagtaattgacaacagacagtttggtaggaggcccgtggtgggccagtgtactatacgcagtcttgaatctttcctctgtgacccctacagtgccgagagtccatctccacagggcggcccggatgacgtcagtttgctgtccccgggggaggatgtgctgatcgacattgatgataaggagccactgatacccattcaggaagaggagttcattgattggtggtctaaattcttcgcttctattggagagagagaaaaatgcggttcttacctggagaaagactttgatacattgaaggtctacgacacacagctcgagaacgttgaggcttttgaaggccttagtgacttctgcaacactttcaaactgtaccgggggaagacacaagaagaaaccgaagatcctagtgtcataggcgagtttaaaggcttgttcaagatctacccacttcctgaggacccggccatccctatgcctcctagacagtttcaccaactcgccgcccagggcccacaagagtgtctggttcggatttacatcgtcagggcctttggattgcagcccaaggaccccaatggtaagtgcgatccgtacattaaaatatctataggaaagaaatcagtgagcgatcaggacaactacataccctgcacgttggagccagtcttcgggaagatgttcgaactgacttgcaccctgccactggaaaaagaccttaaaatcactctctacgattacgacctgctctcaaaagacgagaagattggcgagaccgtggtcgatcttgaaaatcgccttctctccaagtttggcgctagatgcggtctgccgcaaacgtactgcgtgtccgggcccaatcagtggagagaccagctgagaccatcacagctgttgcacctgttttgccagcagcatcgcgtgaaagctcccgtataccgcaccgacagagtaatgttccaggataaagaatacagcatcgaggaaatcgaggcaggacggattcccaacccacatctgggtccagtagaggagagattggctcttcatgtcctgcagcagcagggactcgtgccggaacacgtggaatccaggccgctgtacagcccgttgcagcctgatatagaacaaggaaaattgcaaatgtgggtggacctgttccccaaagccttgggacggcccggacctcctttcaacatcacaccacggcgagctcggaggttttttctgcggtgcatcatctggaatacacgagatgtgatcctcgacgacctgagtttgactggcgaaaagatgagcgacatctatgtaaagggatggatgattggttttgaggaacacaagcagaagacagacgtgcactatagaagtcttggtggcgaaggaaacttcaattggcgattcatatttccattcgattacttgccagccgaacaggtatgtacaatagccaaaaaggatgcattctggcggctggataaaacagagagtaaaatccctgcacgggtcgtattccagatttgggacaacgacaaattcagttttgacgatttccttggcagtctgcagctcgatttgaaccgaatgcctaagcctgctaagacagcaaaaaagtgttctttggatcagttggatgatgcctttcaccccgagtggttcgtgagcctttttgagcagaagaccgtgaagggttggtggccttgtgtcgcagaagaaggcgagaagaagatcctcgctggcaaattggagatgactttggaaatcgtggccgagtcagagcacgaggagcgacccgccggtcaagggcgcgatgaacctaatatgaatccaaaactggaagaccccaggcgacctgatacaagcttcctgtggttcacttccccctacaagaccatgaaattcattctctggcgccgattccggtgggcaatcatcctgtttatcatcctgttcatcctgcttttgttcctggccatcttcatctacgccttcccgaactacgccgccatgaaactcgtgaagcccttttcc

SEQ ID NO: 10692 - DNA, 6243 bp, synthetic construct
  misc_feature 1..6243: note = source = /note="Description of Artificial Sequence: Synthetic coding sequence"
  source 1..6243: mol_type = other DNA
atgttatgctgcctgctcgtgcgggcaagcaatctgccgtctgccaagaaggatcgccggtcggacccagttgccagcttgaccttccggggcgttaagaagcgaacgaaagtaataaagaacagtgtgaacccggtgtggaatgaaggattcgaatgggatcttaagggaattcccctggatcagggatcggagctccacgtggtggtgaaagatcacgagactatggggaggaaccgattcttaggcgaagccaaggtccccctacgcgaggtcctagcgactcccagcctctctgctagcttcaatgcgcctctcctcgataccaagaagcagccaactggtgccagccttgttttgcaggtgtcttatactccccttcccggtgcagtccctctgttccccccgcctacgccactggaaccttcccctaccctacctgatctggatgtcgtggctgataccggaggggaggaagacactgaagaccagggactgacaggagacgaggcagaaccttttctggaccagtccgggggacccggagcccctacgacccctaggaagctcccatcccggccccccccccactaccctggcatcaaacgaaaacggagcgcaccaacaagccgcaagctgctgtccgataaaccacaggacttccagattcgggttcaggtgatagagggtcgtcagcttcctggagtaaatatcaaacccgttgtcaaagtgaccgccgcggggcaaactaagagaacacgtatccacaagggcaattctcctttatttaatgaaacccttttctttaacctgttcgattccccaggggagctgtttgacgaaccgatctttattactgttgtcgatagccggtcactgcggacagacgcattactgggggagtttcgcatggacgtgggcaccatctaccgcgagccgcggcacgcctatctgcgaaaatggctcctcttgagtgatcctgacgacttcagcgccggtgctaggggttacttaaagacttctttgtgcgttctgggcccaggagatgaggctcccctggagcggaaggaccccagcgaagacaaggaagacattgagagtaacctcctgcgacctacaggggtcgcattgagaggtgctcacttttgcctgaaagtttttagagccgaggaccttccccagatggatgacgcggtgatggacaacgttaagcagatcttcggattcgagagtaataaaaagaacctcgtcgatccattcgttgaggtttcctttgccggcaagatgttatgctccaaaatattggaaaagaccgctaatccccagtggaaccagaacataaccctcccagctatgtttccctctatgtgcgaaaaaatgcgcatcaggattatagattgggaccggctgacgcacaatgacatcgttgccacaacttatctgtcaatgtccaaaatcagcgcccctggaggcgagatcgaagaggaacctgcgggcgcagtgaaaccatcaaaagcttccgacctagacgactacttagggttcctacctacatttggaccttgctacatcaacctgtacggctcgccacgagaattcacgggattcccagacccgtacacagaacttaatacgggcaagggagaaggagttgcttatcgaggccggctgctgctatctcttgaaaccaagcttgtggagcattcggaacagaaagttgaagacctgcctgcggacgatattctgagggtggagaaatacttgagacgccggaagtactctttgttcgccgcgttttattctgcgacaatgctgcaagacgttgacgatgccatccagtttgaagtttctatagggaactatggcaataaattcgatatgacttgtttgcccctcgcttcaactactcagtattctcgggctgtattcgatggttgccattactactacttgccatggggaaacgtgaaacctgtggtggtgttgtcaagctactgggaggatatctctcacagaattgagacccagaatcaactgctgggcatcgccgaccgactggaggcaggtctggagcaggtgcatttagctttgaaagcgcagtgctcaactgaagatgtggattcactggtggctcagttgacggatgaattaattgccgggtgcagccagccactcggagatattcatgagacaccaagcgccacccacttggaccaatacctgtatcagctgcgaacccatcacctcagccagatcaccgaggccgcacttgctttgaagctgggacacagcgaacttcccgcagcactggaacaggccgaggattggctgctgcggctccgagccctcgcagaagagccccagaattctctgccagacattgtgatctggatgttgcagggtgataaaagagtggcatatcagcgcgtgcccgctcaccaggtcctcttctccagaagaggtgcgaactactgtgggaagaattgtggtaaactccagaccatatttctgaagtaccctatggagaaagtgcctggggcccgtatgccagttcagatccgcgtcaagctctggttcgggctctccgtggatgaaaaggaattcaatcagttcgcagaggggaagttgtccgtcttcgccgagacctacgaaaacgaaactaagctcgcactggtggggaattggggcacaacaggcctgacctatcccaagttcagcgacgttactggtaagatcaaactcccgaaggattcttttcggcctagtgccggttggacatgggccggggactggttcgtttgccccgagaaaacattactgcatgatatggatgcgggccacttatcattcgtggaagaagtattcgagaaccagactcggctgcccggaggtcaatggatatatatgtccgacaattataccgacgtaaatggtgaaaaggtgttgcctaaggacgacatagagtgtcctctgggctggaagtgggaggatgaggagtggagcacagacctcaatagagccgtggacgaacaaggctgggagtactctatcaccataccacctgaaaggaaacccaagcattgggtgcctgcagagaagatgtactacactcatagacggcgtagatgggtgagacttcggagaagggatctatcacagatggaagcgctgaagaggcatcgacaggcagaagctgagggtgagggctgggagtatgcctccctattcggttggaagttccatctggagtaccggaagactgacgcttttcgaagacggcggtggcggcgccggatggaaccacttgaaaaaactgggccagccgctgtcttcgctttggagggagccctgggtggggttatggatgacaagtcagaagacagcatgagcgtctcaaccttgagtttcggggtgaataggccgactattagctgcatttttgactatggaaaccgataccatctgaggtgttacatgtatcaagctagagatttggcagccatggataaggattcttttagtgacccatatgcaatcgtgtcattcctgcaccaatcccaaaagaccgtggtggtgaaaaatacccttaatccaacctgggatcaaaccctgattttctacgagatcgaaatcttcggtgaacctgccaccgtggccgagcagcctccttcaattgttgtggagctgtatgatcacgacacttatggcgcagacgaatttatgggccggtgcatctgccagccatctcttgagcgtatgccacgtctggcgtggttccccctgactaggggatcccagcccagcggagagctgctggcctctttcgagctgatccaaagagagaaaccagcgatccaccacattcctggcttcgaggtccaagaaacttctcgaatcctggacgagagcgaggatacagacctgccatatccacccccacaaagagaggccaatatctatatggttccacagaatatcaagcctgctctacagaggaccgcgatcgaaattctcgcctggggactgcggaacatgaagtcttatcagctggccaatatcagcagtccaagtttggtggttgagtgtggcggccaaaccgtgcagagctgcgtgatccgaaacctcaggaagaaccccaactttgatatctgcacccttttcatggaggtgatgttaccaagggaggagctgtactgtcccccaatcacagtcaaggtcatcgacaaccgacagtttggaagaaggccggtcgtgggccagtgtactatcaggtcactggaaagcttcttgtgtgatccttacagcgcagagtcacctagccctcagggcggtcccgatgatgtttcactgctctctcccggggaagacgtcctaattgatattgatgacaaagagcccctcattcctatccaagaggaggagttcatcgattggtggagcaaattcttcgcctccattggtgagcgggaaaagtgcggtagctatctcgagaaggattttgacaccctgaaggtatacgatacacagttagagaacgttgaagcctttgagggtctctccgacttttgcaatacgttcaagctgtatcggggcaagacccaggaggaaaccgaggacccttcggtgataggggaatttaaaggtctatttaagatttacccgctgccagaggaccccgcaatccctatgccaccaagacagttccatcagctggcggcccagggacctcaggagtgcctggtgaggatatatattgtgcgggctttcggactgcagccgaaggatcctaatggtaagtgtgatccctatatcaagatctccattggaaaaaaatccgtcagtgaccaagataactatatcccgtgcaccctagagcccgtgtttggcaagatgttcgagctcacctgcacactgccgctggaaaaagaccttaaaattactttgtatgattacgacttgctgtctaaagatgaaaagataggagagaccgtggtggacctggaaaatcgccttctgtctaagttcggagcccgctgtggactcccacaaacatattgtgtgtccggccctaaccaatggagagaccagttgaggcccagtcaactcctgcacctgttttgtcagcagcaccgtgtcaaggctccggtgtatcggacagatagagttatgttccaggacaaagagtactccattgaagagattgaagccggcagaatcccaaatcctcacctgggcccggtagaagagcggcttgctttacatgtactgcagcagcagggactcgttccagaacacgtggagagcagacccctgtacagccctctgcaacccgacattgaacaggggaagctccagatgtgggtagatttatttccaaaagcactcggaaggccaggaccaccctttaacatcactccacgtcgggcccgccgtttcttcctgcgctgtatcatatggaacacgagagacgtgatcctagacgacctctccttaaccggagagaagatgtccgatatctacgttaaaggatggatgatcggcttcgaagaacacaagcagaagactgacgtgcactatcgctctctggggggcgaaggcaattttaactggcgcttcatctttcccttcgattacctaccggccgagcaggtgtgcacaattgcgaaaaaagacgctttttggagactggacaaaacggaaagcaagattcccgcgcgagtcgttttccagatctgggataacgacaaattcagcttcgatgatttccttgggtccctgcagctggatctgaatcgtatgccgaaaccggccaagacagctaagaaatgtagcctggatcaactggacgacgcctttcatccggaatggttcgtttcgttgttcgaacagaaaaccgtgaagggctggtggccctgtgtggcagaggaaggcgaaaagaaaatactggctgggaagctggaaatgacgctggagattgtggctgaatcagagcacgaggaacgacccgcaggccaaggtcgagacgagccaaacatgaacccaaaactcgaggaccctcggaggcccgacacaagcttcctgtggtttacaagcccctataaaaccatgaaatttatcctgtggcgccgattcagatgggccataatcctgttcatcattctcttcatcctgctactgtttttggccatcttcatctacgcgtttccaaactacgctgcgatgaagcttgtcaaaccctttagc

SEQ ID NO: 10693 - DNA, 6243 bp, synthetic construct
  misc_feature 1..6243: note = source = /note="Description of Artificial Sequence: Synthetic coding sequence"
  source 1..6243: mol_type = other DNA
atgctctgctgcctgctggtgcgggcctcaaatctcccttctgcaaagaaggatcggcggtcagaccctgtggcctccctcaccttccgcggtgtcaagaagcgcaccaaggtgatcaaaaactcagtgaaccccgtttggaatgaaggctttgagtgggacctgaaaggcatcccgctggatcagggctcggaattgcacgtggtggtcaaggaccacgagacgatgggacggaacagatttctgggcgaagcgaaagtgccactgcgcgaggtgctcgccactccatccctgtcagcatccttcaacgcgcctctgctggacactaagaagcagccgactggagcttcgctggtgctccaggtgtcctacacgccattgcctggagcagtcccactctttcccccgcctacccctctggaaccatcgccaaccctgccggatctggatgttgtggccgataccggtggagaggaagataccgaggaccagggcctgaccggagatgaagccgagccgttcctcgatcagtccggcgggccaggcgccccgactactccgcgcaagctccctagccggcctccgccgcactacccgggaataaagcgcaagagatcagccccgacctcccgcaagctcctctcggacaaaccgcaggacttccaaatccgcgtgcaggtgatagaaggtcgacaactcccaggagtgaatatcaagccagtagtgaaggtcacggctgccggacaaaccaaacgcactagaatccacaagggtaactccccgctcttcaacgaaaccctgtttttcaatctgtttgacagcccgggggaattgttcgacgagccgattttcataactgtcgtcgactcgcggtccctgcgcactgacgccctgctcggagaatttcggatggatgtaggaaccatctaccgggaaccgcgccacgcctacctccggaaatggctcctgctgtccgatcctgatgacttctccgcgggagccagagggtatcttaagacctctctctgcgtgctgggacccggcgacgaggcgccactggaaaggaaagatccatcggaagataaggaagatatcgaatcaaatctgcttcggccgaccggcgtggcgctcagaggagcccacttctgcctgaaggtgtttagggccgaggacctcccacagatggacgacgccgtcatggacaatgtgaaacagatttttgggttcgagtctaacaagaagaatctggtggatcctttcgtggaagtgagcttcgccggaaagatgctgtgctcgaagattctggaaaagacggccaacccgcagtggaaccagaacatcaccctgccggcaatgttcccttcgatgtgtgagaagatgcgcatccgcatcattgattgggaccggctgactcataacgacatcgtggcgaccacgtacctgtccatgtcgaagatctcagctccgggaggagaaatcgaggaggagccggcaggagctgtcaagccttcaaaagcctcggacctcgatgattacttgggttttctgccgacttttgggccttgttacatcaatctgtacgggagcccgcgggaatttaccgggttccccgacccgtacaccgaactcaatactgggaagggggagggagtcgcgtacaggggtcgcctgctgctgtcacttgagactaagctggtggagcattcggagcagaaggtcgaagatcttccggcagatgacatcttgcgtgtcgagaagtacctgagacggcgcaagtactcgctgttcgcagccttttactcggccactatgctgcaggacgtcgacgacgcgatccagttcgaagtgtcaatcggaaactacggaaacaagttcgacatgacctgcctcccactcgcatccaccacccagtactcccgcgccgtgttcgacggatgccattactactatctgccctggggaaatgtcaagccggtggtggtgctgtcatcatactgggaggatatctcacatcggatcgaaacccagaaccagctgctgggaatcgccgatcgcttggaagccggcctggagcaagtgcacctggcgctgaaagctcagtgttcaactgaagatgtggacagcttggtcgcgcagctcaccgatgaacttatagcagggtgttcgcagccgctgggagacatccacgagactccatcggccactcatctggaccaatatctctatcagcttcgcacccaccatctctcccagattaccgaagccgcgctcgcgctgaaactgggacactcggagctgcccgcagcgctcgagcaagccgaggattggctgttgcgcctgagggccctcgccgaagaaccacaaaattcgctgccggatatcgtcatctggatgctgcaaggtgataagcgtgtcgcgtaccagcgggtcccagcccatcaggtgctgttttcaagacgaggggcaaattactgtggcaagaactgcggaaaattgcagaccatcttcctgaagtacccgatggaaaaggtccccggcgcacggatgccggtgcagatccgggtcaagctgtggttcggcctgtccgtggacgagaaggaattcaatcagttcgctgaagggaaactgtcagtctttgcggaaacttacgaaaatgagacgaaactggcgctggttggcaactggggtactaccggactcacgtaccctaagttctcagacgttactggaaaaatcaaactgcccaaggactccttccggccctcggccggttggacttgggcaggggactggtttgtctgcccagagaaaaccctgttgcatgatatggatgcaggacacttgtcgttcgtggaagaagtctttgagaaccagaccaggcttccgggcggacagtggatctacatgtctgacaactacaccgacgtgaatggcgagaaggtcctgcccaaggatgacattgaatgcccgctcggctggaaatgggaggacgaagaatggtcaactgacctgaaccgggctgtcgacgagcagggatgggaatatagtattaccattccaccggaacgcaaaccgaaacactgggtgccagccgagaagatgtactacactcatcggcggcgccggtgggtgcgcctcagacggagggacctgagccagatggaagcacttaagcggcatcggcaggcggaggccgagggagagggttgggaatacgcgtcgctgttcggatggaagttccacctggaataccgcaagactgacgcgttcagacgccgccggtggcgcagacggatggaacccctcgaaaagaccggccccgctgccgtctttgccttggagggtgccctgggaggagtgatggatgacaaatcggaggactcgatgtccgtctctaccctgtcgttcggcgtgaacagaccaaccatctcatgcatctttgactacggtaaccggtaccaccttcggtgctacatgtaccaggcacgcgatctcgccgcgatggataaggatagcttcagcgatccgtacgcaatcgtgtccttcttgcatcagtcacagaaaactgtcgtggtcaagaacactctgaatccaacgtgggaccagactctgatcttttacgagatcgaaatctttggtgaacccgccactgtggcggaacaaccaccaagcatcgtcgtcgaactctatgaccacgacacctacggtgcggatgagtttatgggcagatgtatctgccaaccgtcgctcgaacgaatgccgagattggcctggttcccgctgacccggggatcacaaccgtcgggcgaattgctcgcctcgttcgaattgatccaacgggaaaagccagcgattcaccacatcccgggattcgaggtgcaagaaacttcgagaatcctcgatgaatccgaagataccgacctcccgtaccctccaccgcagcgggaggctaacatctatatggttccgcagaacatcaaaccagcgctccaaaggactgccatcgaaatcctggcttggggcctccggaatatgaagagctaccaactcgcaaacatctcctcgccttctctcgtggtggagtgcggaggccagaccgtgcaatcgtgcgtgatcaggaacctgcggaaaaatcctaacttcgacatctgcaccctgttcatggaagtcatgcttcctagggaggagctctactgccccccgatcacggtgaaggtgatcgacaacaggcaattcgggcggcggccggtggtgggtcaatgcacgatcagatccctggagtccttcctgtgcgacccatactccgccgagtccccgtccccacaaggcggccctgacgacgtgtcactgctgtcccccggggaggatgtgctgattgacatcgatgacaaagagccactgatcccgatccaggaagaagaattcatagattggtggtccaaattcttcgcgagcatcggagaaagagagaagtgcggatcgtatctggaaaaagactttgacaccctgaaggtgtacgatacccagctggagaacgtggaagcattcgagggcctgtcggatttctgcaatacctttaagctgtaccgcggaaagactcaagaggaaaccgaagatccgtccgtcatcggagaattcaaggggcttttcaagatttacccactccctgaggacccagccatcccgatgccaccaaggcagttccatcaactggccgcgcaaggaccgcaggagtgtctggtgagaatctacatcgtgagggccttcggactgcagccaaaggacccaaacggaaaatgtgacccctacattaagatctcaattggcaagaagagtgtttcagaccaggacaactacatcccatgcactctggagccggtgttcggcaagatgttcgaactgacttgcaccctgcccctggaaaaagatttgaagatcaccttgtacgactatgatctgctgtcaaaggatgagaaaatcggagagactgtggtggaccttgagaacagactcctgtcgaagtttggagcgagatgcggcctgccgcagacgtactgcgtgagcggaccaaaccagtggcgcgatcaactcagaccatcgcaactgcttcatctcttttgtcaacagcacagagtgaaggcgcccgtgtaccgcaccgatcgggtgatgtttcaggacaaggagtactcaatagaggaaatcgaagccgggagaattcctaacccccacctcggaccggttgaagaacggcttgcgcttcatgtgctgcaacagcaaggactcgtgccggaacacgtggagtcacgtccgctgtacagcccgctgcaaccagatatcgaacaaggcaagctgcaaatgtgggtggacctctttccaaaggcgctgggtcgcccaggcccacctttcaacatcactccgcggagggcgagaagattctttctcaggtgcatcatctggaatacccgggatgtcatcctcgacgatctttcactgacgggagagaaaatgtccgacatctacgtcaaaggatggatgattgggtttgaggagcacaaacaaaaaactgacgtgcactacagatcgttgggaggagaaggtaatttcaactggagattcatctttccattcgactacctgcctgcggaacaggtgtgcaccatcgcaaaaaaggatgcgttctggagactcgacaagactgaaagcaaaatcccggcacgcgtcgtgttccagatttgggacaatgacaagttctccttcgatgacttccttggttcgctgcaactggaccttaaccggatgccgaagccagccaagactgctaagaaatgctcgttggaccagcttgatgatgcattccatcctgaatggttcgtctccctcttcgaacagaaaacggtcaaggggtggtggccttgtgtcgccgaagaaggagaaaagaagatcctcgcgggaaagctcgagatgactctggaaatagtcgccgaatcggaacatgaggagcgacccgccggtcagggccgggatgagcctaacatgaacccgaaactggaagatccgcgtcgcccggacacctccttcctctggttcacttccccgtacaagactatgaagttcatcctgtggcggcggtttcggtgggcgattatcctcttcattatcctgttcatcctccttctcttcctcgccatcttcatctacgccttcccgaactacgccgccatgaaactggtgaagcctttctct

SEQ ID NO: 10694 - DNA, 6243 bp, synthetic construct
  misc_feature 1..6243: note = source = /note="Description of Artificial Sequence: Synthetic coding sequence"
  source 1..6243: mol_type = other DNA
atgctgtgctgcctactggtgcgcgctagtaatctgcccagcgcaaagaaagaccgacggagtgacccagtggccagcctgacattccgtggggtgaagaagagaaccaaagttataaagaacagcgtcaaccccgtgtggaatgagggtttcgagtgggatctcaaagggatcccgctagaccaagggtccgaacttcacgtggtggtgaaagaccatgaaactatgggcagaaaccggttcctgggagaagcaaaggtcccacttcgcgaggtgctggccaccccatccctctcagcatcttttaatgcccctctgttggacaccaaaaaacagccaaccggggcatctctggtcctgcaagtgtcttacactccactccccggcgcagtgcccctcttccctccacctacccccctcgaacccagccccacgctaccagacttggacgtagtggccgacaccgggggcgaggaagacaccgaggatcagggcttgaccggcgacgaagccgagccctttctagatcagagcggaggccccggagccccaactacgcccaggaaactcccgtcacggccgcccccccactatccaggcatcaaaagaaagcggagtgcccccaccagccgcaagctgttgtccgataagccccaggatttccagattagggtgcaggtcattgaaggcaggcaactcccaggagtgaacatcaaaccagtggttaaggtgacagcagccgggcagaccaaaaggacgagaatacataagggaaattcaccgctctttaatgaaacactcttctttaacctgttcgacagtccgggggaattgttcgacgagcccatctttatcaccgtcgtcgatagcaggtcacttcgaactgatgcgctgttaggagaatttcggatggacgtgggcacgatctatagagagccccgccatgcatatctcaggaagtggcttctcctctctgaccccgacgattttagtgcaggtgcacgggggtacctaaaaacctctttgtgcgttctgggccctggagacgaagcccccctggagcgcaaggaccctagtgaggacaaggaggacattgaatccaatctcttgagacccactggtgtcgccctacgcggggcacacttctgcctaaaggtctttagagcggaagatctgccccagatggatgacgcagtcatggacaatgtcaaacagatcttcgggtttgaatccaataagaaaaatttagtggatccctttgtggaagtctccttcgctgggaagatgctctgtagcaagattctagagaagacagccaatccacagtggaaccaaaatattaccttgccggcaatgttcccttccatgtgcgaaaaaatgcggattcgaataatcgactgggacagactgacccataacgatatcgtcgcgaccacttacctgtctatgtccaaaatatctgcccctggcggcgagatcgaggaggagccggccggcgcggtgaagcctagtaaggctagtgatttagatgactacttgggctttctgcccacgttcgggccctgctacatcaatctttacggttctcctagggagttcacgggatttccagacccgtacacagaactgaacaccgggaaaggggaaggcgtggcctatcgagggagattgctgttgtctctggagaccaaattagtggaacatagcgagcaaaaggtcgaagatttaccagcagatgacatcctgagggtagagaaatacctgagacgaagaaaatattcactgttcgcagcgttctactcggcaacaatgctacaggacgtcgatgatgcaattcagtttgaggttagcattggaaattacggtaataagttcgacatgacatgcctgcccctggcctcaacgacacagtatagcagggccgtatttgatggctgtcactactactatctgccatgggggaatgttaagcccgtggtggtgctgtctagttattgggaagatataagtcatcggatagagacacagaatcagctcctggggatcgccgatcgactggaagccggcctggaacaagtccacctcgcgttaaaggctcagtgctcaactgaggacgtggactccctggttgcacagctgactgatgagttgatagccggctgcagccagcccttaggcgatatccacgaaactccatctgctacccacctggaccagtatctgtatcagctgaggactcatcacctgtcccagatcacggaggcagccttagctctaaagttgggtcattctgaactcccggccgccctggaacaggccgaggattggctgctaagactgcgcgctctagctgaagagcctcagaactcgctgcccgatattgtcatctggatgctgcagggggataaaagggttgcataccagcgcgtgcctgcccaccaggtgctgtttagtagacgtggagctaattactgtggaaaaaactgcgggaagctgcagaccatcttcctgaaataccctatggaaaaagtcccgggtgcacgcatgcccgtgcagatccgcgtaaagctttggttcgggctgagtgttgatgagaaggagtttaaccagttcgcagaggggaagctgagcgtctttgccgagacatatgagaacgaaacaaaactggccttggtcggaaattggggaaccaccggcctaacatatcctaaattctccgacgtgacgggaaagatcaagctgcctaaagactcctttcggccctctgccggctggacatgggccggcgactggtttgtttgcccagaaaagaccctgctgcacgatatggacgcaggccacctttcctttgtggaagaggtctttgaaaatcaaactagactgcccggcgggcagtggatttacatgagtgataactacacagacgtcaacggcgagaaggtactaccaaaagatgatattgagtgtcccttgggatggaagtgggaggatgaagaatggtcaaccgacctgaaccgggcggttgatgagcaaggctgggaatatagtattaccatccccccggaacggaagcctaagcactgggtacccgctgagaagatgtactacacacacaggcgacgccgatgggtgaggctgaggaggagggatctctcccaaatggaggctctcaaacggcacaggcaggccgaggccgagggagagggctgggagtatgcaagcctgttcggctggaaattccacctggaataccgtaaaacagacgcattcaggagaaggcgctggaggcgtcgcatggaacctttagagaagacagggcccgcagccgtgtttgcactggagggagccctgggcggagtcatggatgataaatcagaggattctatgagtgtctcaaccctgtcatttggcgtaaaccgccccactatcagctgcatcttcgactatggtaaccgttaccatctgcgatgttacatgtaccaggctagagatctcgctgcaatggataaagatagcttctccgacccctacgcaatcgtgagttttctgcaccaatcccagaagacggtggtcgtgaagaatacactcaacccaacctgggaccaaactctcatattttacgaaatcgagattttcggagagcccgcgacagttgccgagcagccgccatccatcgtagtggagttgtatgaccatgacacctatggagccgatgagttcatgggccggtgcatctgccaaccatcattagaacgaatgccacgactggcttggttccccctcactcggggttcacagccttccggcgagctgctcgcctcttttgagctaatccagcgggagaaaccagccatccaccatattccgggattcgaagtgcaggaaaccagtcgaatcctggacgagtccgaagataccgatctgccttaccccccccctcagagagaggctaacatctatatggtgccgcagaacataaaaccagcgctacagcgtaccgcaattgagatactggcctggggtctgagaaatatgaagtcctatcaattggccaacatcagttccccaagtctggtggtggagtgtggggggcagacagttcaatcctgtgttattcggaacctgcgtaaaaacccaaatttcgatatatgtacactcttcatggaggtcatgctgcctcgagaggaactttattgtcccccaatcacggtcaaagtgattgataatcgccagtttggacgcagacccgtggtgggccagtgcacaatccggtcactagaatcattcctgtgcgacccttattccgcagaatcaccctcaccacaagggggtcctgacgacgtttctctgctctcccctggcgaagacgtgctgattgacattgacgacaaggaaccattgattcctattcaggaggaggaatttattgattggtggtccaagttcttcgcgtccatcggcgagagagagaagtgtgggagttatctggagaaagactttgataccctaaaggtgtacgatacacagcttgagaacgtggaagctttcgagggactgagtgatttctgtaatacattcaaattgtatcgaggcaaaacccaggaagagacagaggatcctagtgtgattggggaattcaaaggcctgttcaagatctaccctctacctgaggatcctgctattcccatgccccctcgccagtttcatcagctggccgcccagggtcctcaggagtgtctcgtccggatctacattgtacgggcattcgggctgcagccaaaggacccgaatgggaaatgcgacccctatatcaagattagtatcgggaaaaaaagcgtgtccgaccaggacaactatatcccatgcaccttggaaccagtgttcggcaaaatgttcgaactgacctgcacactcccccttgaaaaagatcttaaaatcacactttatgactacgacctgctctctaaggacgagaagataggcgagaccgtagtcgatctggaaaaccggcttttatctaagtttggtgctaggtgtggtttaccccagacctactgcgtttccgggccaaatcagtggcgcgatcaactcagaccctcccaactcctccacctgttctgccagcagcaccgagtgaaagcccccgtctacagaactgaccgcgtcatgttccaggataaggaatacagcatcgaggagatcgaagctggaagaatccctaacccccacctcggtcccgtggaggagcgcctcgctcttcacgtgctacagcagcagggcctggtgcccgaacacgtggagagcagaccactatactcaccactacaacccgatatagagcagggcaagttgcagatgtgggtggacttgttccccaaggctctggggaggcctggtcccccatttaatataacgcctcgtagagctagacggttcttccttcgttgtatcatctggaacaccagggacgtgatcctggatgatcttagcctgaccggggagaagatgagcgatatctatgtaaagggctggatgatcggattcgaagagcacaaacagaagaccgatgttcattaccgctctcttggtggggagggaaacttcaactggcgttttatttttccgttcgattatcttcccgcagaacaggtgtgtactattgccaaaaaagacgccttctggaggctcgataaaaccgaaagcaaaatccctgcccgggtggtgttccagatctgggacaacgataagtttagtttcgacgattttttgggcagcttgcagctggatctgaacagaatgcccaagccagcaaaaaccgcaaaaaaatgtagccttgaccagctggacgacgcattccatccagagtggtttgtgtcgctgttcgagcagaagaccgtgaagggatggtggccttgcgttgccgaggaaggtgaaaaaaagatactggccggaaaactggagatgacactggagatagtggctgaaagtgagcacgaagagcggcctgctggacagggacgggatgaacccaatatgaatccaaagttggaagatcctaggagaccggacactagtttcctgtggtttacgtcgccttacaagaccatgaagttcatcctgtggaggagattcaggtgggctattattctattcataattcttttcatcctcctgcttttcctggccattttcatttatgcctttccaaactacgcagcgatgaagctggtgaagcctttctcc

SEQ ID NO: 10695 - DNA, 6243 bp, synthetic construct
  misc_feature 1..6243: note = source = /note="Description of Artificial Sequence: Synthetic coding sequence"
  source 1..6243: mol_type = other DNA
atgctgtgctgcctgctggtccgggcttcaaacttgccatccgcgaaaaaggaccggagatccgaccccgtggcgagcctgactttccggggggtgaagaaacggaccaaggtgatcaagaactccgtgaatccggtgtggaacgaaggattcgagtgggacctcaaaggaattccgctcgatcaaggctcagagctgcacgtggtggtcaaggaccatgaaaccatgggacgcaaccggtttctgggagaagccaaggtgcctctgagggaagtacttgcgaccccctccctgtcggcctctttcaacgccccgctcctggataccaagaagcaaccaacgggggcatcgctggttctgcaggtgtcatacacccccctgccgggggctgtcccgctctttccgcccccgaccccacttgaaccctcgccgacgcttccggacctggatgtggtggctgacactggaggtgaggaggacaccgaagatcagggcctgaccggagatgaggcagaaccctttttggaccagtccggtggaccgggcgctccgaccaccccgcggaagctgccgtcgaggccaccaccccactacccaggtatcaaaaggaagagatcggcacctacgtcacgcaaactcctgtccgataagccgcaagattttcagatccgcgtgcaggtcatcgagggacgacagctgccgggcgtgaacatcaagccagtggtgaaggtcaccgccgcagggcagaccaaacgcactcggatccacaagggaaatagccccctgttcaatgaaaccctgttcttcaatctcttcgattcacctggagaactgttcgacgaacccatcttcatcactgtcgttgattcccgttccctgcgcactgacgcactgctcggagaatttcgcatggatgtgggaaccatctacagagagccgaggcacgcatacctccgcaaatggcttctgctttcggacccagatgatttctccgcaggagcccgtggatacctgaaaacttcgctgtgcgtgctgggccctggagatgaagccccattggaacggaaagatccttcagaggacaaggaggacatcgaatccaacctcctcaggcctactggagtggcgctgagaggagctcacttttgtctcaaggttttcagagcggaagatctcccacaaatggacgacgccgtgatggataacgttaaacaaatcttcggattcgaatcaaacaaaaagaacctggtggacccgttcgtggaggtgtcgttcgcgggaaagatgctctgctctaaaatcttggagaaaaccgccaatccgcagtggaatcagaacatcactctgcctgccatgtttccttctatgtgcgaaaagatgagaatcagaatcatcgactgggatcgcctgactcacaacgatattgtggcgaccacctacctgtcaatgagcaagatttcggcgcctggaggcgaaatcgaggaggaaccagccggcgctgtcaagccgtcaaaggcctcagatctcgacgattacctgggcttcttgcctactttcggcccgtgctacatcaacctgtacggatctccgcgggaattcaccggctttccagacccgtacactgagctgaataccggcaaaggagagggggtcgcttaccgcggccggctgctcctctcgctcgaaactaaactggtcgagcatagcgagcaaaaggtcgaggacctgccagccgatgacatcctccgggtcgaaaagtacctgcggcggcggaagtactccctgtttgcggctttctactccgcgaccatgctgcaggacgtggacgatgctatccagtttgaagtatcgatcgggaattacggcaacaaattcgacatgacttgtttgcccctggcctccactactcaatatagccgagccgtgttcgacggttgccactactactacctgccttggggtaatgtcaaacctgtggtggtcctgtcgagctactgggaagatatctcacataggattgagactcaaaatcagctgctgggaatcgcggatcgcctggaggccgggctggaacaagtccatctggccttgaaggcccaatgctcgaccgaggacgtggactccctcgtcgcgcagcttactgacgaactcatcgctggatgctcccaaccgctgggtgatattcatgagacgccgagcgccacgcatctcgaccagtacctttaccagctccggactcaccatctttctcaaatcaccgaagctgccctcgccctcaagctcggacactctgaactccctgccgcactggaacaggcggaggactggctgcttcgcctccgcgcacttgcggaagagccgcagaatagcctcccagacatcgtgatctggatgctgcagggcgacaagcgcgtggcctaccagcgcgtcccagctcatcaggtgctgttctccagaaggggcgcgaactactgtggcaagaattgtggcaagctgcaaaccattttcctgaagtaccccatggaaaaggtccctggcgcgagaatgccggtgcagatcagggtgaaactttggttcggactgagcgtggatgagaaggaattcaatcaattcgcggagggaaaactgtccgtgtttgcggaaacctacgagaacgaaaccaagttggccctcgtagggaactggggaactactggcctcacctacccgaagttctccgatgtgaccggcaaaatcaaacttcccaaggactcattccgccccagtgcaggatggacttgggccggcgactggttcgtgtgccccgaaaagaccctgctgcacgacatggacgccggacatctgagctttgtcgaagaggtatttgaaaaccagacccgcctgccaggcggacagtggatatacatgtcagataactacactgacgtcaatggagaaaaggtgctgcctaaggatgacattgagtgcccgctcggatggaaatgggaagatgaggagtggtccactgacctcaatagggccgtggacgaacaaggttgggagtacagcatcaccatcccgccagagagaaagccgaaacactgggtcccagcggaaaagatgtactatacccaccgtcggcgccgctgggtgaggctcaggcgcagggatctcagccaaatggaggcactgaagcgccatagacaagccgaggccgagggtgaggggtgggaatacgcatcgctttttggttggaagttccacctggaataccgtaaaaccgacgcttttcgtcgcaggagatggcggagacgcatggaaccgctggaaaaaacgggcccagccgctgtctttgccctcgagggggccttgggaggcgtcatggatgataaatccgaggactccatgtccgtcagtacgctctccttcggcgttaaccgtccgactatctcgtgcattttcgactatggcaaccgctatcacttgcggtgctacatgtaccaggctcgcgatctcgccgcaatggacaaggactccttttcggacccgtacgccatcgtgtccttcctccatcaaagccaaaagacggtcgtggtgaaaaacaccctcaacccaacctgggaccagaccctcatcttctacgaaatcgaaatcttcggagaaccggcaacggttgctgaacagccaccctcgatcgtcgtggaactgtacgatcacgacacttacggagccgacgaattcatgggacgatgcatctgccagccttcgctggagcgcatgcctaggctcgcctggttcccgctgactagaggctcgcagccctcaggagagctcctggcttcttttgagctgatccagcgggaaaagcctgcaatccaccacatcccaggcttcgaggtccaagaaacctcccggatcctcgatgaaagcgaagatactgacctgccataccctccgccgcaacgggaggccaatatctacatggtcccgcaaaacatcaagcccgcgctgcaacgaactgcaatcgaaattcttgcttggggactgagaaacatgaagagctaccagctggcaaacatcagcagcccgtccctggttgtcgaatgcggaggccagactgtgcagtcgtgcgtcatccgcaacctgcgcaagaacccgaatttcgatatctgcaccttgtttatggaagttatgctgcctcgggaggaactttactgtccaccgatcactgtgaaggttattgataacagacagttcggacggcggcctgtcgtgggacagtgtaccatccgcagcctggaatcattcctgtgcgacccttacagcgccgaatccccttccccgcaaggaggaccggatgatgtgagcctcctttcacccggagaggacgtgctgatcgacatcgacgacaaggaaccactcataccgatccaggaagaagaattcattgactggtggtccaaattcttcgcatcgatcggagaacgggagaagtgcggatcatacctcgagaaggacttcgataccctgaaggtttacgatacccagctggagaatgtcgaggctttcgaaggcttgtcagacttctgtaacactttcaaactttatcgggggaaaacccaggaggagactgaagatccgtcagtgattggggaattcaagggactcttcaagatatatccgctgccagaagatccggccatccctatgccgccgagacagttccaccaactggccgcacagggaccccaagaatgcctggtgcgtatctatatcgtgcgcgcctttggacttcaacccaaagatccaaacggaaagtgtgacccttacattaagatcagcataggaaagaagtcggtgtcggaccaagacaactacatcccgtgcaccctggagccagtgtttgggaagatgttcgagcttacctgcactttgccccttgaaaaggatttgaaaatcaccctctatgactatgacctgctgtccaaggatgagaagataggcgaaaccgtcgttgacttggagaatcggctgctcagcaagtttggtgcacgctgcggactcccacagacttactgcgtgtccggaccaaaccagtggcgcgaccagctccgccctagccagcttctgcacttgttttgccagcaacaccgcgtcaaggctccggtctaccggactgatcgagtgatgttccaggataaagaatactcgatcgaggaaatcgaagcaggccgcattcctaacccgcacctggggccggtcgaggaacgcctggctctgcatgtgctccaacagcagggactggtccccgaacacgtggagtcccggccattgtactcgccgctgcagccggatatcgaacagggcaagttgcaaatgtgggtggacctgtttccgaaagccttgggacgaccaggtccgcccttcaacatcacccctagacgggctcggcggttcttcctcagatgtatcatttggaacactcgggacgtgattctggatgatttgtcactgacgggagagaaaatgtcagatatctacgtgaagggatggatgatcgggttcgaagagcataagcaaaaaaccgacgtgcattacagatcgctgggtggagagggtaatttcaactggagatttatcttcccgttcgattaccttcctgctgagcaggtgtgtaccatcgctaaaaaggacgccttttggcggctggacaagactgagtctaagataccagcccgggtggtgttccagatctgggacaatgacaagttttcgttcgacgactttctgggttcccttcaactcgacctgaatagaatgccaaagccagcaaaaacggccaagaaatgcagccttgatcagctcgacgacgctttccaccctgagtggttcgtgtctctgtttgagcagaaaactgtgaagggttggtggccgtgtgtggctgaagaaggcgagaagaagatcttggccgggaagctggagatgactctggaaatcgtggcagagtccgagcatgaggagcggcccgcggggcagggacgggacgaacccaacatgaaccctaaattggaagatccgcggcggcctgacacttcgttcttgtggttcacttcgccgtacaagaccatgaagtttatactctggagaaggttcagatgggccatcatcctcttcatcatcctgttcatcctgctccttttcttggcgattttcatctacgccttcccgaattacgccgcgatgaagttggtgaaaccgttttcc

SEQ ID NO: 10696 - DNA, 6243 bp, synthetic construct
  misc_feature 1..6243: note = source = /note="Description of Artificial Sequence: Synthetic coding sequence"
  source 1..6243: mol_type = other DNA
atgctttgctgcctgcttgtgcgggccagcaatcttcctagcgctaaaaaggataggaggtcggacccagtcgcgtcgcttacttttaggggtgtgaagaagaggactaaagtcataaagaactcggtgaatcctgtgtggaatgaagggttcgaatgggatctgaagggtattcctctggatcaaggttccgaacttcatgtggtcgtgaaggaccatgaaactatgggaagaaaccgcttcctcggtgaagcaaaggtgcctctcagagaagtgttggcgaccccttcactgtcggcctcttttaacgcgcctctgctggacaccaagaagcagccaaccggagcatcactggtcctccaggtgtcgtatactcctttgccgggagcggtgccattgtttccgccccctacccctctcgagccctcgcccactcttcctgatctcgatgtggtcgcagacaccggcggagaggaggatactgaggatcagggcctgactggagacgaagccgagccttttttggatcaatcgggcggaccgggcgcacctaccaccccacgaaagctgccatcgcgccctccaccccattacccaggaatcaagaggaaaagatcggcgcctacgtcgcgtaagttgctctcggataagccacaggacttccagattagagtgcaggtgattgagggacgccaactcccgggtgtgaacataaagcctgtggtcaaagtgacggccgcagggcaaaccaaaagaactcggattcataaagggaacagcccacttttcaacgaaacgttgtttttcaacctttttgatagcccaggagaactttttgacgaaccaattttcatcactgtcgtagacagcagaagccttcgcaccgatgcccttcttggggaatttagaatggatgtcggtaccatataccgcgagccacgacatgcgtacctgagaaagtggcttcttctctcggatccagatgacttttcggcaggcgcaagagggtacctcaagacgtccctttgtgtgctgggtcctggtgacgaggcaccgctggagaggaaagatccctccgaagataaagaggatattgagtccaatctgcttcgtccaacgggggtggcacttcgaggcgcacacttctgtctgaaggtctttcgcgcagaggatctgcctcagatggatgacgcggtgatggataacgtcaagcagatttttggattcgaaagcaataagaagaaccttgtggatccgtttgtggaagtgagcttcgctggaaaaatgctttgtagcaaaattctcgagaaaactgccaatccccagtggaaccaaaacattactcttccagcaatgttcccttccatgtgcgaaaagatgcgtattcgcatcatagactgggaccggcttacgcacaatgacatagtcgcaactacttatctttcgatgtcgaaaatctcggcaccaggtggggaaatagaagaagaaccagcaggtgccgttaagccctccaaggcgtctgaccttgacgattaccttggatttctccctacttttggaccttgctatatcaatttgtacggctcgcctcgtgagtttaccggattcccagatccgtacacggagttgaatactggcaaaggagaaggggtcgcatatcgggggcggttgcttcttagccttgagactaaactggtggaacactccgaacaaaaggtggaggacctccctgcagatgatatcctgagagtggagaagtacctccgcaggagaaagtactcactcttcgcagccttttactcagcaaccatgctgcaggacgtcgatgatgcgatccagtttgaagtgagcattggtaactatggtaataagttcgacatgacgtgtctccccctggcaagcaccacccaatactcgagagccgtgtttgacggttgccattactactacctcccatggggaaatgtcaagccagttgtggtgctgtccagctactgggaagatatctctcatagaattgaaactcagaaccaactgttgggtatcgctgaccggctcgaagcaggactggagcaggtccatctggcccttaaggcgcagtgttcgactgaagatgtggatagcctcgtggcacagttgaccgatgaactgattgcaggttgttcgcaaccactgggcgacattcatgagactccttcagcgacccacctggatcaatacttgtaccaactgagaacccaccatctgtcccaaattactgaggcagcattggcactgaaattgggacactccgaacttccagcagctctggagcaggctgaagattggcttcttcggctgagagcactggcagaagagcctcaaaactccctgcctgacatcgtcatttggatgcttcaaggagataagagggtggcttaccagcgggttcctgcgcaccaagtgcttttttcgcgccggggagcaaattactgtggtaagaactgtggtaaactgcaaaccatattcctgaagtaccccatggagaaggtccctggtgcaagaatgcctgtgcagatccgagtgaagctctggtttggactgtcggtggatgagaaggagtttaatcaattcgccgagggtaagctctccgtgtttgccgaaacttacgaaaatgaaaccaaacttgcgctggtcggaaattgggggaccacggggcttacttatcctaagttttccgatgtgactgggaagattaagctgccaaaggactctttccgaccttctgcaggctggacctgggctggggattggtttgtgtgtccagagaaaacgcttctgcacgacatggacgccggccatctttcctttgttgaggaggtgtttgagaatcagaccaggcttcctggaggccagtggatttacatgtcagataactacaccgatgtgaacggtgaaaaggtgcttcctaaggacgacattgagtgccccctcggatggaagtgggaagatgaagaatggtctacggatcttaacagagcagtggacgaacagggatgggaatactcaattaccatcccacctgaacgtaaaccaaagcactgggtgccagctgaaaagatgtactacacccatagacgacgacggtgggtccggttgcgccgtagggacctgtcgcaaatggaggcactgaagcggcatagacaagctgaagctgagggtgaagggtgggaatatgcttcgctcttcggttggaaattccacctggaatacagaaagactgacgcattccgccgccgtagatggcgccgacggatggaaccgcttgaaaaaacgggtcctgcggcggtgtttgccctggagggcgcactgggtggagtcatggatgataagagtgaggactctatgtccgtgtcgaccctctcgtttggcgtgaacaggcctactatctcgtgtatctttgactacggtaatagataccatcttcgctgttatatgtaccaagccagagatctggctgctatggataaggattcgttctcagacccctacgccatcgtgtcgtttcttcaccaatcccaaaagactgtagtcgttaagaacactctgaaccctacttgggaccaaactctgattttctacgagatagagatctttggtgaacctgcaacggtggcagaacaacccccttccatcgtggtggaactttacgatcatgatacctacggagcggacgagtttatgggccgctgtatctgtcaaccctcgctggaacggatgcctcgtctggcatggtttcctctcacccggggtagccagccgtcaggagagttgctggcatcatttgaacttattcaaagagagaaacccgccattcatcatatccctggatttgaggtccaggagacttcgcggattctggacgagtccgaggataccgacttgccatacccacccccacaacgcgaagcaaacatttacatggtgcctcaaaacataaaaccggcactgcaacggactgcaattgagattctggcatgggggctcagaaatatgaaatcataccagctcgcaaatatcagctccccttctctcgtcgtggaatgtggagggcaaaccgtgcagtcatgcgtgatccgcaatcttaggaaaaacccaaactttgacatctgtactcttttcatggaagtgatgctgcctcgagaagaactttactgtccacccattactgtgaaggtgattgataaccgacaattcggacgccgcccagtcgtgggtcagtgcaccatcaggagccttgagtccttcctctgtgacccgtactccgcagagagcccaagcccccaaggtggaccagatgatgtcagcctgttgtccccgggagaagatgtgctgattgatatcgatgataaggagcctcttatcccaattcaagaggaagagtttattgattggtggtcgaagttctttgcaagcatcggggagagagaaaagtgtggatcctacctggagaaggatttcgatacccttaaggtttatgatactcaacttgaaaatgtggaggcatttgagggcttgtccgatttttgcaacacctttaagctctaccgagggaaaacgcaagaagaaactgaagatccttcagtgatcggtgagtttaagggactgtttaagatatacccccttcctgaagatcctgccattcccatgccacccagacaattccatcaacttgccgctcagggaccacaggaatgccttgtcagaatttacattgtgagagcgttcggactccagcccaaagatcctaatggaaagtgcgatccatacatcaaaatctcgattgggaagaagtcggtgagcgaccaggacaactacattccatgcaccctggaacctgtctttgggaagatgttcgagcttacctgcacgctgcccctggaaaaggatctcaagattactctgtacgattacgatctcctttcgaaagacgagaagatcggagaaaccgtagtcgatctggagaatcggcttctctccaagtttggagcccgatgtggtctgccacagacttactgtgtgagcggaccaaaccagtggcgcgaccaattgcgaccgtcacaactcttgcacctgttctgtcaacaacatagggtcaaggcacctgtgtaccggactgaccgtgtgatgtttcaggacaaagaatacagcattgaagagatcgaggcgggccgtattccaaacccgcatcttggccctgtcgaagaaaggctggccttgcatgtccttcagcagcagggccttgtgcctgaacacgtggaaagcaggcctttgtactcgccactgcaacctgatattgagcaggggaaactccagatgtgggtggacctttttccgaaagcgctgggtcgaccaggacctccttttaacatcacccctagacgtgcaaggcgctttttcctccgttgcatcatttggaacactcgcgatgtgatcctcgatgacctgagcctgaccggtgaaaagatgtcggacatctacgtgaaaggttggatgatcgggtttgaagaacacaagcaaaaaaccgatgtgcattaccgttcgttgggtggcgaaggcaatttcaattggcggttcatctttccatttgactacctgccagcagaacaagtgtgtactatagcaaaaaaggatgcgttttggcgtctggacaagaccgaatccaagatccccgcacgcgtggtgtttcaaatctgggataacgacaagttcagcttcgatgattttcttggcagcctccaacttgatctgaaccggatgcccaagcctgccaagactgcaaaaaagtgcagccttgatcagctggatgacgcatttcatcctgagtggtttgtcagccttttcgaacaaaagaccgtcaagggttggtggccttgtgtggcagaagaaggtgaaaagaagatcctggctggaaaattggaaatgaccctggagatcgttgccgaatccgaacacgaagagcgtccggcaggacagggtagagacgagcctaacatgaaccctaagctcgaagatccgcgtcgccctgacacgtcctttctctggtttacctctccctacaagaccatgaaattcattttgtggaggcgcttcaggtgggcgatcattctgttcattatcctgtttatcctgcttctgttcctcgcgatctttatctacgccttccctaattacgcagcgatgaagctggtgaagcctttcagc

SEQ ID NO: 10697 - DNA, 6243 bp, synthetic construct; identical to SEQ ID NO: 10692
  misc_feature 1..6243: note = source = /note="Description of Artificial Sequence: Synthetic coding sequence"
  source 1..6243: mol_type = other DNA

SEQ ID NO: 10698 - DNA, 6243 bp, synthetic construct
  misc_feature 1..6243: note = source = /note="Description of Artificial Sequence: Synthetic coding sequence"
  source 1..6243: mol_type = other DNA
atgttatgctgcctgttagtacgtgcgagcaatttaccgtctgcgaaaaaagaccgtaggagcgatccggtagcctctttaacgtttagaggagtcaagaagcgcaccaaagtgatcaaaaattcggttaatcctgtgtggaacgagggctttgaatgggatcttaagggaatccccttagaccaaggatctgagcttcatgtggtagttaaggatcatgaaactatggggagaaaccgctttttaggtgaggcaaaagtgccgttacgcgaggtattggcgactccgtctctatctgcaagctttaacgcgcctctacttgacactaaaaaacagccgacgggagcttctctagtacttcaggtgtcttatacaccactgcccggagctgtacctttgtttccgcctccgactccactcgaaccgagccccactcttccggatttagacgtagttgcggacaccggtggtgaggaagatactgaggaccaaggacttacaggggatgaagctgagccttttttggatcagagcggcgggccgggcgctccgactacccctcgaaaactgccttcccgtccgccgccgcactatcccggcattaaaagaaaacgctccgccccaacttcacggaaacttctgtctgataagccgcaagatttccaaattcgtgtacaagttatagaaggcagacagcttcccggtgttaatattaaaccagtcgttaaggtaacagccgctggccagacgaagcgtacgcggatccacaagggtaatagcccactgtttaatgaaacgctctttttcaatctgttcgattctcccggagaactctttgatgaaccgatttttattacagtggtggattcgcgatctttaaggaccgacgcactgctcggcgaatttagaatggatgtcggcaccatttacagagaaccgcggcatgcctaccttcgaaagtggctgctgctcagtgatcctgatgatttctcagctggcgcgagaggctacttaaagacttcgctttgcgtgctcggcccgggtgacgaagctcctcttgaaagaaaggacccgtcagaggataaggaggatatcgagagcaaccttttgcgcccaacaggtgtagccttacgtggggcccatttttgccttaaagttttcagagctgaggatttgcctcaaatggacgacgccgttatggataacgtcaaacaaatttttggctttgaatctaacaagaagaacctcgtagacccatttgtagaggtctcttttgcgggtaagatgctgtgctccaaaatattagagaaaactgccaatccccagtggaatcagaacatcacactccctgcgatgtttcctagtatgtgtgaaaagatgcggatacgtattatcgattgggacagacttacacataacgatattgtcgctactacttacctctcaatgagcaagatttcagcgcccgggggtgaaatcgaagaggaaccggctggcgcggtgaaaccatcaaaagcatcggatcttgatgactacctgggctttcttccgacatttggtccttgctatattaatctgtacggtagccctagagagtttacgggatttcctgatccatatacagaactcaataccggcaaaggggaaggcgttgcctatagaggccgtctcttgctgtcattggaaactaaactggtcgaacacagcgaacagaaagtcgaagacttgccggctgacgatatcttacgcgttgagaaatatcttcggagaaggaaatacagcttattcgcggctttttactcggctacaatgttacaagacgtcgatgatgccatacagttcgaagttagcattggtaattatgggaataaattcgacatgacttgtctgccgttggcctccacaacccagtattcacgggcggtatttgatggttgtcattattactatttgccttggggcaacgttaaaccggtagtcgtcctttcttcatattgggaggatatttcacaccgcattgagacacaaaatcagctcctgggcatcgccgatcggttagaagccggcttggaacaggttcatctggcacttaaagcccaatgtagtacagaagacgtagactcactggtggcacagttaacggacgaactcattgctggttgcagtcagccgctaggtgacatccacgaaacaccatctgcaacacatcttgatcaatatttgtaccaattacgcactcatcacctcagccagattacagaagcagctttagctctgaagctggggcactcagaattgccggcagccctggaacaagctgaggattggttattgcgcttgcgagctcttgccgaagaaccgcaaaattcccttccagatatcgtcatttggatgttacaaggggataaacgggttgcttatcaacgtgtcccggcgcatcaggtcctgttctcacgtagaggtgccaattattgtggtaaaaactgcggaaaattacagacaatatttcttaagtatccgatggaaaaggttcccggagccaggatgcctgtacagatccgggtaaagctgtggtttggcctgtcagtggatgaaaaagaattcaaccaatttgcagagggaaaactttcagtatttgcagaaacttacgaaaacgagaccaaacttgctcttgttggcaattggggtacaaccggtttgacatatcctaaatttagcgatgtaactgggaaaataaagttaccaaaagactcctttcgtccatcagccggctggacatgggcaggtgattggtttgtgtgccctgagaaaacccttttgcatgacatggatgcaggtcatctttcttttgtggaagaggtcttcgaaaaccagactagacttccggggggtcagtggatctatatgagtgacaactatacagatgttaatggagaaaaggtcttgcctaaagatgatattgaatgtccattaggttggaaatgggaagacgaagaatggagcacagacttaaatagagctgtggatgagcaaggctgggagtatagcataactattccgccggaaaggaagccgaaacactgggtgccggcagagaaaatgtattatacccataggagacgtcgctgggtacggttacgtagacgagacctgagccagatggaggctcttaaaagacatcgccaggcggaagcagaaggagaaggctgggaatatgcttccttgtttggctggaagtttcatctggagtatcgcaaaaccgatgcatttcgaaggcgcagatggcgccgcagaatggaaccgctggaaaaaacaggcccagcagctgtcttcgcgcttgaaggggcactgggaggggttatggacgataaatcagaagattcaatgagcgtcagcacattatcttttggcgttaatcgtccgaccattagctgtattttcgattacggaaatagatatcatctacgctgttacatgtatcaagcgcgggacttggccgccatggacaaggattcattttccgacccttatgcgattgtgtcgtttcttcaccaatctcaaaaaacggtagtggtcaaaaacaccttgaacccgacatgggatcagacgctgattttttacgaaattgaaatatttggagaaccagctacggtggcagaacaacctccatccattgtcgtggaattgtatgatcatgatacatatggcgccgatgagtttatgggaagatgcatttgccaaccttcattagagcgcatgcctagattggcttggtttccacttactagaggttcacaaccgtctggggagttattggcaagctttgaattaattcaacgagaaaagcctgccattcatcatatacctggattcgaagtacaagagacaagccgaattctggacgaaagtgaggatacggacttaccgtatccgcccccacagcgagaagcaaatatatatatggttcctcagaacataaagccagctcttcaacgcacggccatagaaatcctggcttggggattacgcaacatgaaatcttatcagctggcgaatattagcagtccatcattggtggttgagtgcggcgggcaaacagttcaatcgtgcgtcatcagaaacttgcgcaaaaaccctaattttgatatttgtacgctgtttatggaagtgatgcttccaagagaagaactctattgtcctcctatcaccgtcaaagtaattgataataggcaatttggtcgccgcccggtagtggggcagtgtacaatccgttcgttggaatcttttttatgtgatccgtattcggcagaatcaccatcaccgcaaggcggccctgatgatgtatcacttctgagcccgggtgaggacgtacttattgatattgatgataaggaacctctgattccaatccaggaagaagaattcatcgattggtggtctaaatttttcgcgtccatcggagagcgcgagaagtgcgggtcttatctagaaaaggattttgatacgctaaaagtgtacgatactcaactcgagaatgttgaagcatttgaaggtcttagcgatttttgcaatacgttcaagttatacagagggaaaacacaggaagaaacagaagatccgtccgtaattggcgaattcaaaggactgtttaagatctacccgctccctgaagatcctgctattcctatgccgcccagacaatttcatcagcttgctgcccaaggaccgcaggaatgccttgttcgtatctatattgttcgtgctttcggactccaacctaaagatccgaacggtaaatgcgatccatatattaagatttcgatcggcaagaaatccgtttcagatcaagataattatatcccttgtactttagaacccgtttttggcaaaatgtttgagctgacttgcactcttccgcttgagaaagacctgaaaattacactctatgattacgatctactgtcaaaggatgaaaaaatcggagaaacagtggtggatttagagaatcgcttgctctcgaaatttggagcacggtgcggactgcctcaaacgtactgcgtgtctgggccaaaccaatggagagatcagcttagaccgtctcagttattgcacctgttttgtcagcaacatagagtgaaggcgcctgtttatcggacagatcgcgttatgtttcaagataaagaatactcgattgaggaaatcgaggcgggtcggatccccaatccgcacttgggaccggttgaagaacgtttagctctccacgtgttacagcaacagggtcttgtcccggaacacgttgaatcacgccccctgtacagcccgctgcagcctgatatagagcagggcaaattgcagatgtgggtcgatctgtttccgaaagccttggggagaccgggacctccgtttaatattacaccgcggcgtgcccgacgcttttttctccggtgcattatctggaacacacgggatgtcattcttgatgatttgagcctaacaggagaaaagatgtcagatatttatgtcaaaggatggatgattggctttgaagagcataagcagaagacagatgtgcattaccgttcattaggcggcgaagggaactttaattggagattcatattcccctttgattatcttcctgctgagcaggtctgtacaatcgccaaaaaagatgccttttggcgcctagataaaacagaatctaagatccctgctcgcgttgtctttcagatttgggataacgataagtttagctttgatgactttttaggttctctccaacttgacctaaatagaatgcctaaaccggcgaaaaccgcaaaaaaatgcagtcttgaccagcttgacgatgcttttcatccagaatggttcgtgtccctctttgaacaaaaaacagtcaaaggctggtggccttgcgtagccgaagaaggagaaaagaaaattctcgccggaaaactagaaatgacgctggaaatagtcgcagaatccgagcatgaagagcgtccggcaggacaaggacgggatgaacctaacatgaatccaaaactggaggatccacgccgtccggacacaagttttctgtggtttacgagcccttacaagactatgaaatttatcctttggcgcagatttagatgggccattatcctgtttattatattatttatcttacttctgtttctggccatttttatctatgcttttccgaactacgcggctatgaaactggtgaagccgttttct

SEQ ID NO: 10699 - DNA, 6243 bp, synthetic construct
  misc_feature 1..6243: note = source = /note="Description of Artificial Sequence: Synthetic coding sequence"
  source 1..6243: mol_type = other DNA
atgctttgctgcctcctagtcagagccagcaaccttccctccgccaaaaaagaccgccgttccgaccctgtggcctcgctgacctttcgcggagtgaaaaagcgcacaaaagtgatcaagaactccgttaaccccgtatggaatgaaggcttcgaatgggatctgaaggggatccctttggaccagggctctgaacttcacgtggtggtcaaagaccacgagacgatgggccggaataggtttctgggtgaggccaaagtgcccctgcgcgaggtgctggcaaccccgtccctatctgccagctttaatgcaccgctgcttgacacaaagaaacagcccactggtgcaagtctggtgctgcaggtctcttacacccccctccccggtgcagttcccctcttcccaccacctacgcccctcgagcctagcccaacacttcctgaccttgatgtggtggctgatacaggtggtgaggaggataccgaggatcagggcctaacgggggatgaggctgagccctttctagaccagtctggagggcccggcgcacctaccacacccagaaaattgccatcacgcccgcctccccactaccccgggatcaagcgcaaacggtctgctccgaccagccggaagcttctcagcgataagccccaggatttccagattagagtacaggttattgaaggcagacaactccccggagtcaatattaaacctgtggttaaggtgacagcagcgggccagaccaagcggacccgcattcacaaagggaactcgcccctcttcaatgagactctcttcttcaacttgttcgattcaccaggtgaactcttcgacgaacctatttttataaccgtggtcgattccagatcactccgcactgatgcattactgggcgagttcaggatggatgtgggaacaatttaccgcgaaccacgacacgcatatctgaggaaatggctgctgctgagtgacccagacgacttctcagctggcgctcggggctatctgaagacaagcctctgtgtcctagggcctggggacgaggcgcccctagagaggaaggatccctcagaggacaaggaagacatcgagagtaacctgctgcggcccaccggagttgcacttcggggtgcccacttctgtctgaaggtgttccgggcagaggatctgccccagatggatgacgccgtgatggacaatgttaaacagatttttggatttgaaagcaacaaaaagaatcttgttgatcccttcgtagaagtctctttcgcaggcaaaatgctgtgcagtaagattctcgagaagacagcaaatccgcaatggaaccagaacatcaccctgccagctatgttcccatccatgtgcgagaaaatgcgaatccgaattatcgattgggaccgcctgacgcataatgacatagtagctactacatatctgagcatgtcaaaaatttccgcccccggcggcgaaatcgaagaagagccagccggggcagtgaaaccctccaaagcctccgatttggatgattatctgggcttcctccccacattcggcccttgttacattaacctgtatggctcgccacgggagttcactggtttccccgatccatacacggagctgaataccggaaaaggagagggcgttgcgtacagaggccggctgctgctctccctcgaaactaaactcgtcgaacactcggaacagaaggtggaagatctcccagccgatgatatcttacgtgtggagaaatacctccgcaggcgaaaatattccctgtttgccgctttctacagcgctaccatgctgcaagacgtagacgatgctatccagtttgaagtgagcattgggaattacgggaacaagttcgatatgacatgtctgcctcttgcttctacaacacagtattcaagggctgtgtttgacggctgtcattactattatctgccctggggcaacgttaagccagtggtcgtgttgagctcatattgggaagacatcagtcaccgcatagaaacacagaaccagctgctggggattgctgacaggttagaggccggactagaacaggtgcatctggctttgaaagcccagtgttctacggaggatgtggacagcttggttgctcagctgacagacgaattgattgctggatgctcacagcccctgggtgatattcacgagaccccctcagccacacatttggaccagtacctgtatcagctgcgtactcatcacctgtctcagatcacggaagccgcactcgccctgaaactaggccatagtgagttgcccgccgccctggagcaggctgaggattggcttctgaggctccgcgctctggccgaggagccacagaattccctgcccgacatcgtgatatggatgctacagggtgataaaagagtggcctatcagagggtacctgcacatcaggtcctgttctcccggcgtggggccaattactgtgggaagaattgtggcaagctccagacaattttcctcaagtacccaatggaaaaagtgccaggagcaaggatgcccgtgcagatccgggtcaagctgtggtttggattaagcgtcgacgaaaaagaatttaatcaatttgctgagggcaagctgtcagttttcgccgaaacctatgagaacgagactaagctggcactggtgggcaactggggcacaaccgggctgacatatcccaagtttagcgatgtgactggcaagattaagctgcctaaggattccttccgtccttccgccggatggacctgggccggcgactggttcgtgtgccctgaaaagactttgctgcatgatatggacgcaggtcacttgagcttcgtggaagaggtctttgaaaaccagacacggttgcccggcggccagtggatttacatgagtgataattacaccgatgtcaatggcgagaaagtgttgcccaaggacgacatagaatgtccccttggttggaagtgggaagacgaggagtggtctacagaccttaatcgcgccgtggatgagcagggctgggagtattcaattaccatccctccagaacgcaagcctaagcactgggtccccgccgagaagatgtattacactcaccgtaggagacgctgggtccgcctgaggaggcgcgatctctctcagatggaagccctgaagcggcatcgacaagccgaagccgaaggggagggatgggagtacgcgagcctattcggttggaagttccacttggaatataggaagactgacgctttccgtcggcgccggtggagacgaaggatggagcccttagagaaaaccggaccagccgctgttttcgctctcgagggagccctgggtggagtaatggacgataaaagcgaggactccatgagtgtgtctacactgtccttcggcgttaacaggcctaccatttcatgtatctttgattacggaaataggtaccacttgagatgctacatgtatcaagcccgggatctcgcagccatggacaaggacagcttctcagacccgtatgccatcgtttctttcttacatcagtcccagaagacggtggtcgtgaagaatacactgaatccaacatgggatcagactttaattttttatgagattgaaatatttggagagcctgccactgtcgcagagcagcctccgtccatcgtggtggagttgtacgatcacgatacctacggtgcggacgaatttatgggcagatgcatttgccagccaagcttagaaaggatgcccaggctggcatggttccctttgacgcgggggtctcaaccatcaggcgagttgctggcttcgttcgaattgatccagagggagaagcccgctattcaccatattcccgggtttgaggtccaggaaacgtctcggatcctggatgaaagcgaggacacggatctgccttaccctcctccacaacgggaggccaacatctacatggtgcctcagaacatcaaaccagccctgcagaggactgccattgagattctggcatgggggttaaggaatatgaaatcataccagcttgccaatatttcgtctccctctctcgttgtcgagtgtgggggccagacagtgcagtcttgtgtgattcggaatctgcggaaaaacccaaactttgatatctgtactctgttcatggaagtgatgctcccacgcgaggagctctattgccctccaatcacagtgaaagtcatcgacaaccgccaattcggtaggcgtcctgtggtgggacagtgtaccattagatccttagagtcatttctgtgcgatccgtacagcgcagaatccccgagcccccagggcgggccggacgatgtcagcttattatcgcccggagaggatgtgttaatcgacattgacgacaaggaacccctaattcctattcaggaagaagaatttatcgactggtggagcaagttcttcgcgtcgatcggggaacgcgagaaatgcggcagctacctggagaaagactttgataccctgaaggtgtacgatacccagctcgaaaacgtggaggcctttgaaggccttagcgatttctgcaatacattcaaactgtatcgtggaaaaacccaggaagaaacagaggatccttccgttatcggcgagttcaagggtttattcaaaatttatccacttcccgaagaccctgctatccctatgcctcctcgtcaattccatcaattggcagcccaagggccacaggagtgcctggtccggatttatatcgtcagggcctttggcttgcagcccaaggatcccaacggtaaatgcgatccgtacatcaagatatccattggcaaaaaaagcgtttcagaccaagacaattatatcccttgtaccttggaacccgtcttcgggaaaatgtttgaattaacttgcacattgcccctggagaaggacctgaaaatcaccctgtacgactatgacctgctttctaaggatgagaaaataggagagaccgtcgtggacctcgagaatcgcttactctcaaaattcggcgcccgctgcggactgccgcagacgtactgtgtttccggtcccaaccagtggcgtgatcagctgcggccctcgcagctactacacctgttctgccagcaacaccgcgttaaggcgccagtatacaggacggatcgcgtgatgtttcaggacaaggaatactctatcgaggaaatagaagcaggccgaatcccaaatcctcacctggggcctgtggaagaaagacttgctttacacgttcttcagcagcagggtttagtcccagaacatgtggaatctaggcccttatatagcccactgcaacccgacattgagcagggcaagctccaaatgtgggtcgatctctttcctaaggcgctgggacggcctggacctccgttcaacatcacaccaaggagggctcggagatttttcttacgctgtatcatctggaacacgcgggatgtgatcttggacgacctgtctctcaccggagaaaaaatgagcgacatctacgtgaagggttggatgatcggttttgaagaacacaagcagaagacggatgtacattacaggtccctcggtggagaaggcaactttaactggagatttatatttcctttcgattacttaccagctgaacaggtgtgtacaatcgccaaaaaggatgccttctggcgtttggataaaacagaaagcaagattcctgccagagtagtgtttcaaatatgggacaacgataagttttccttcgacgacttcttgggcagcctgcagctggacctgaacaggatgcccaaacccgccaaaaccgccaagaagtgttctcttgaccagctggatgatgcgtttcacccagagtggtttgtgagtcttttcgagcagaagaccgtgaaaggttggtggccgtgcgtggctgaagaaggggagaaaaagattctggccggcaagctagaaatgactctggaaattgtagccgaaagtgaacatgaggagagaccggccggacaggggcgcgacgaacctaacatgaaccctaaactggaggaccctcgcagacctgacacttccttcctatggtttacatccccctataaaacgatgaaatttatcctgtggcggcgcttcagatgggccattatcttattcattatcttgttcatcctcctgctgttcctcgctatattcatttacgctttcccaaactacgctgcaatgaagcttgtcaagccattctcc

SEQ ID NO: 10700 - DNA, 6243 bp, synthetic construct
  misc_feature 1..6243: note = source = /note="Description of Artificial Sequence: Synthetic coding sequence"
  source 1..6243: mol_type = other DNA
atgctgtgttgtctgcttgttcgtgcctccaacctcccatcagcaaagaaagaccgaaggtcagaccctgtagccagcctgacattcagaggggtgaaaaagaggaccaaagtcataaagaacagcgtcaaccctgtttggaatgaaggcttcgagtgggacctgaaaggcattccgctcgatcaggggagtgaacttcatgtagtggtgaaggatcacgagacaatgggacgaaatcggtttctcggggaagctaaagttccactgcgtgaagtactcgctaccccctcactctcagcatcatttaatgccccactcctggacactaagaaacaacctacaggcgcctccctggttcttcaggtcagctacacccccctgcctggggctgtcccattgtttcccccccctacacccttagagccaagcccaacactgcccgaccttgatgtggtggccgatacggggggtgaggaagatacggaggatcagggtttaaccggcgatgaggctgagccgttcctagatcagagcggggggccgggggctcccactacaccccgcaagctgccaagtaggcctccgccacattaccctggcatcaaacgaaagagatccgccccaacatcaagaaagttgctatcagataagccccaggatttccagattcgagtgcaggtcatcgaaggaaggcaattgccaggcgtgaacattaagcctgtggtcaaggtaaccgccgcaggacaaactaagcggacccgtattcataaggggaactctccgttgtttaacgagacactcttctttaatctttttgattcccctggagaactcttcgatgagccaattttcatcactgtggtcgacagccgcagtctgcggactgacgccctgcttggtgaattcaggatggacgttggcaccatttacagggagccaagacatgcctacctgcgtaagtggctcctgctttccgatccggatgacttctctgcaggcgccaggggctatctcaagaccagtctctgcgtgcttggcccaggggatgaggcaccactggagcgaaaagacccaagtgaggacaaggaggatattgagtctaatctgttgcgcccgactggagttgcactaagaggagctcatttttgtctgaaagtcttccgcgccgaagatctgccgcaaatggatgacgccgtgatggacaacgtgaagcagatctttggctttgaaagcaataagaagaacttagttgaccctttcgtggaagtgtcctttgccggtaagatgctctgctctaaaatactcgagaaaaccgcaaatccccagtggaatcaaaatatcaccctacccgccatgtttccatccatgtgcgagaagatgaggattagaattattgattgggaccgattgacacataatgacatcgttgcaactacgtacctgagtatgagtaagatttctgctcccggaggggaaattgaagaggagcctgcaggcgctgtgaagccttccaaagcttcagacttggacgactatctgggcttcctccctaccttcggtccttgttatatcaatctgtatggaagcccccgcgaatttacaggctttcctgatccttacacggagctgaatacaggaaagggtgaaggtgtggcctaccggggcagactgctgctgtcacttgagactaaactggttgagcactccgagcagaaagtagaagatttgcctgccgatgacatactgcgcgttgagaaatatttacgccgcaggaagtacagcctctttgcagccttctactccgcgacaatgctgcaagacgtggacgacgcaatccagttcgaagtctcaatcgggaactacggaaataagtttgacatgacatgcctgcctctggcgtctacaacccaatactcacgcgcggtgtttgacgggtgtcattactattatttgccatggggcaacgttaaacctgtggtggtgctctctagctactgggaagacatttcccacagaattgagactcagaatcagctattgggcatcgccgatagactggaagcagggctggagcaggttcacctggccctgaaagcacagtgcagtacggaagacgtcgactcgttggtcgcccagctgactgacgaactcatcgcagggtgtagccagccactgggcgatatccatgagacccctagcgccacgcaccttgatcagtacctctatcagcttaggacccatcatttgtcccagataacagaggctgcactcgccctgaagctggggcatagcgaactgcccgcagctctggagcaggcagaagattggctgttgaggctgcgtgctctcgctgaggagcctcagaatagcctcccagatattgtgatctggatgctccagggggacaaaagggtggcttatcaaagagtccccgctcaccaggtgctgttctcacggagaggcgccaactactgtgggaaaaactgtggtaagctgcagacaatcttcctaaagtacccaatggagaaggttcctggcgccaggatgcccgtccagataagggtgaagctttggttcggcctgtccgtagatgaaaaggagttcaaccagttcgccgagggaaaattgagtgtgttcgcagaaacatacgagaatgagactaagctcgctctcgtcggcaattgggggactacaggcctgacctatccaaaattctccgatgttactggaaaaattaaactgcctaaagatagcttcaggccatccgcagggtggacatgggctggcgattggttcgtatgtcccgagaagaccctcctgcacgatatggacgccggccatctatctttcgtggaggaagttttcgaaaatcaaaccagattacccggcgggcagtggatttacatgtccgataactatacagatgttaacggcgagaaggtcctgccaaaggatgacatagagtgtccccttgggtggaaatgggaagacgaggaatggagcacagatctgaatcgcgcagtggatgagcagggctgggaatactccattaccataccgccagaaagaaagccaaagcactgggttcccgcagagaaaatgtactatacccatcggcgaagaagatgggtgcgcctgaggaggcgagacctgtcccagatggaggcccttaagcgccatagacaggccgaagccgagggtgagggatgggaatacgcatctctttttggatggaaattccacttggagtaccgtaaaaccgacgccttccgtagacgcagatggaggcgcaggatggaacccctggagaaaacagggcccgccgccgtgtttgcgctggagggcgcactgggtggggtgatggatgataagtcagaagatagcatgagcgtgagtacgctcagtttcggcgtgaacaggccaacgattagctgcatatttgactacggaaatagataccatctgcgctgctatatgtatcaggcccgcgacctggccgctatggataaagacagcttttccgacccctacgcgatcgtgtcattccttcatcagtctcagaaaaccgtagttgtgaaaaatacccttaatcctacatgggaccagactttgatcttctacgagatcgagatattcggagagccagccactgtggccgagcagccaccttctattgttgtcgaactctacgaccacgatacttacggtgcggacgaatttatgggaagatgtatatgtcaaccttccctcgagaggatgcctcgcctagcctggtttcccctcacacggggaagccagccatctggtgagctgctagccagcttcgagctgattcaacgcgaaaaacccgcaatccatcacatcccgggtttcgaggtgcaggagacctcaagaatacttgacgagagtgaagataccgacctgccttatcctcctccgcagagggaggctaacatctacatggtcccccagaatatcaaaccggccctacaacgcactgcaattgagatcctcgcttggggtctacgcaacatgaagtcgtaccagctcgccaatatctccagccctagcctagttgtagagtgtgggggacagacagttcaaagttgtgtgatcagaaatttgcgcaagaatcccaatttcgatatatgtactctctttatggaagtgatgctacctagagaggaactgtactgtccgccaatcaccgtgaaggtaatagataatagacagttcggtcggaggccagtcgtgggtcaatgcactattagatccttagagtcttttctctgcgatccctactctgcagagtcaccttcgccgcaaggtggaccagatgacgtctcgctgttgtccccaggcgaagatgtgcttatagacatcgatgacaaagaacccttgatacctattcaggaggaggagtttatagactggtggagcaagttttttgcaagcatcggagagcgagagaagtgcggcagttatttggagaaggatttcgatactctcaaggtgtacgacacccagttggaaaatgtagaagcattcgaagggcttagcgacttttgcaacacctttaagctctatagaggcaagacccaagaggagaccgaagatccgtcagttatcggtgagtttaaaggactgttcaagatttatcccctgcccgaggacccggctatccccatgccacctcggcagtttcatcagttggcggctcaaggccctcaggagtgtctagtgagaatttatatcgtgagggctttcggactgcagcccaaggatcctaatggcaaatgtgacccttacatcaagatcagcattggaaaaaaatcagtgtctgatcaggacaactacattccatgcactctagaaccggttttcgggaagatgttcgagctgacttgtaccctccctttggagaaggatctgaaaattaccctgtatgactacgatctgctctcgaaagatgagaaaataggggaaaccgtcgtggatctcgaaaacaggttactcagtaagttcggagcccgctgcgggctccctcagacttactgcgtgagcggcccgaaccagtggcgtgatcagctcagacccagccaacttctccatcttttctgccagcaacacagagtgaaagcacctgtgtaccggacagatcgtgtgatgtttcaagacaaggagtactcaattgaggaaatcgaagccgggcgcatcccaaacccacacctgggacctgtcgaagagagattagctttgcatgtgctgcagcaacagggtctggtgcccgagcacgttgagagccgacccttgtacagtcctctccaaccagatatcgaacagggcaaattgcaaatgtgggttgacctctttccgaaggcgctgggtcgaccaggaccccctttcaacattacccccaggcgggcaagaaggttcttcctgcgctgcatcatttggaatacgcgcgacgtaatcttggacgacctgtcactcaccggagaaaaaatgtccgacatctacgtaaaagggtggatgattggttttgaagagcataagcagaagacagacgtacactaccgttcactgggtggggagggaaactttaattggaggtttatattccccttcgactatctcccggctgagcaggtttgtaccatcgcgaagaaagacgccttctggagactggacaaaacggaaagcaaaatccccgctcgcgtggtgttccaaatctgggataacgacaagttctcctttgatgacttcttgggcagtctccagctggatttaaatagaatgcccaagcctgctaaaacggctaaaaagtgcagtctcgatcagctcgacgacgcttttcaccctgaatggttcgtgtcgctcttcgagcagaaaactgttaaggggtggtggccttgcgtggcagaggagggcgagaaaaaaattcttgcgggcaagctggagatgacgctggagattgtcgcggaatcagagcacgaggagcgtcctgccgggcaaggccgtgatgagcccaatatgaacccgaagctggaggatccccgtagaccggacacgagctttctgtggtttacatccccatacaaaaccatgaaatttatactttggaggaggttccgctgggctatcatcctgttcattatactttttatcctgcttctgttcctcgccatctttatctacgcttttcctaactatgctgcgatgaagctggttaaaccattctct

SEQ ID NO: 10701 - DNA, 6243 bp, synthetic construct
  misc_feature 1..6243: note = source = /note="Description of Artificial Sequence: Synthetic coding sequence"
  source 1..6243: mol_type = other DNA
atgctgtgctgtctcctcgtgcgcgcgtcgaatctgccgagcgcgaagaaagatcggaggtcggatccggtggcaagtctgaccttccggggggtcaaaaagcggactaaggtgatcaagaattcggtcaaccctgtgtggaacgaaggtttcgaatgggacctcaaggggattcccctggaccaaggatcggaattgcacgtcgtggtcaaagatcacgagacgatgggccggaatcggtttctgggagaagccaaggtcccgctgcgggaagtgctggccaccccttccctgagcgcctcttttaacgcccctctgcttgacaccaagaagcaaccgactggtgcctcgctggtgcttcaggtcagctacaccccattgcctggagcagtgccgctgttcccaccgccaactccgctggagccttcgcctactctgcccgacctggacgtggtcgcggacactggaggagaagaagataccgaagatcaaggcctgactggcgatgaagccgaaccgttccttgatcaatcgggcggaccgggagcacctaccactcctcggaagctcccgtcgcgcccgccgccgcactatccagggatcaagcgcaaaagatccgcgccaacctccagaaagctgctgtcggataaaccccaagacttccaaatccgcgttcaggtgattgaaggacgccagctgccaggtgttaacatcaaaccagtggtgaaagtgaccgcggccggacagaccaagcgcacccggatccataagggcaattcgcccctcttcaatgaaactcttttcttcaatttgttcgactcgccgggagagctcttcgacgagcccatctttatcactgtggtggactcgcgttccctgcgcaccgatgctctgctcggagagttccgcatggacgtgggcaccatctaccgtgagccccgccacgcatacctccggaaatggctcctcttgtccgacccagatgacttctccgctggcgctcgaggatacctgaaaacttccttgtgcgtgctgggacccggagacgaagcaccactcgagcggaaggacccttcagaagataaggaggatatcgagtccaacctgttgcggcccactggcgtggcgctccgcggggcgcatttctgtctgaaagtgttccgggctgaggatttgccccagatggatgatgccgtgatggataacgtgaagcagattttcggattcgagtcgaataagaaaaaccttgttgatccgttcgtggaagtctcgttcgccgggaaaatgctgtgctcaaagatcttggaaaagactgccaatccccagtggaaccaaaacataactttgccggcgatgtttccctccatgtgtgagaagatgcgcatcagaatcatcgactgggacaggcttacccacaacgacatcgtcgccaccacctatctgagcatgagcaaaatctcagctccgggcggagagatcgaggaagagcccgcgggggcggtgaaaccgtcgaaggcttccgacctcgacgattacctcggcttcctgccgactttcggaccatgttacattaacctgtacgggtccccacgggaattcactggattcccggatccgtacactgaactcaacactggaaagggtgagggagttgcttaccgagggcgccttctgttgtcgttggagacgaagctcgtggaacactccgaacaaaaggtcgaggacctccctgctgatgatattctccgggtggaaaagtacctcaggcgccggaagtatagccttttcgccgcgttctactcagcaactatgctgcaggatgtggatgacgcgatccagttcgaagtctccatcggaaattacggcaataagttcgatatgacttgccttccgctggcttccaccacgcagtacagccgcgcagtgttcgatggctgccattactactaccttccctggggaaatgtgaagcccgtggtcgtcctttcgtcgtactgggaggacatttcccaccgcatcgaaactcagaatcaactgctcgggatcgccgaccgcctggaagccggcctggagcaggtccatctcgccctcaaagcccaatgtagcactgaagatgtcgattcgctggtggcccagctgactgacgagcttatcgccggttgcagccagccgctcggagatatccacgaaactccctcggcgacccacttggaccagtacctgtaccaactgcgcactcatcacctgtcgcagatcaccgaggcagccctggccctcaaactgggccattccgaacttccagcggctcttgaacaagccgaggactggctgcttcgcctgcgggcgcttgccgaagaaccacagaacagcctgccggacatagtgatctggatgctgcagggagacaagcgggtggcgtaccagcgggtccccgcccaccaagtgctgttttcgagacgcggcgcaaactactgcggaaagaattgcggcaagttgcaaaccattttcctgaaatacccgatggaaaaggtcccaggagcacggatgccggtgcagatccgggtcaagctgtggtttggcctgtcggtggacgagaaggaattcaaccagtttgccgaggggaagctctcagtgttcgccgaaacctacgaaaatgagactaagctggcgctcgttggtaactggggtaccactggccttacgtacccaaagttctcagatgtgactggaaagatcaagctcccgaaagactcctttcgcccttcggcaggatggacttgggccggagactggttcgtgtgcccggaaaagactcttctccacgacatggacgctggtcacctgtccttcgtcgaagaagtgttcgaaaaccagaccaggctgccaggaggccagtggatctacatgagcgacaattacactgacgtcaacggagaaaaagtgcttcctaaagacgatatcgagtgtccgctgggatggaagtgggaggacgaggagtggagcactgacctcaacagggccgtggacgaacagggttgggaatactccattacgatcccaccagagcgcaaacccaagcattgggtccccgcagaaaagatgtactacactcatcggcgccggagatgggtgcgtctccgccgcagggatctgagccaaatggaggccctgaagcgccacagacaggcagaagctgagggcgagggatgggagtatgcgtcactgttcgggtggaagttccatctggaatatagaaaaactgatgcgttccggcggcgccggtggcgccggagaatggaaccactggaaaaaaccggaccggcagccgtgttcgcgctggagggagctctcggaggggtgatggatgacaagtccgaggactccatgtcagtctcaaccctcagcttcggtgtgaaccgcccaactatttcttgtatcttcgattacggcaacagataccatctgaggtgctacatgtaccaggcccgcgacctcgccgctatggacaaggattcattctcggatccttacgcgatcgtgtcgttcttgcatcagagccaaaagaccgtggtggtgaagaatactctgaacccaacctgggatcaaactctgatcttctacgaaatcgagatcttcggggagccggcgaccgtggccgagcagccacctagcatcgtcgtggagctgtacgaccacgacacctacggagccgatgagtttatgggccgctgcatctgccagccaagcctggaaagaatgccgaggctcgcgtggttcccactgactagaggaagccagccatcgggggagctcctcgcgtcgttcgagttgatccagagggagaagccggcgatccatcacatcccgggcttcgaagtgcaggagacttcgcgcatcctggatgaatccgaagatactgatcttccataccccccgccccaacgggaagccaacatctacatggtgccgcaaaacatcaaaccggctctccagcgaactgccatcgagatcctcgcgtgggggctgcgcaatatgaagtcataccagctggctaacatctcgtccccgtccctggtggtggagtgcggcgggcaaactgtgcaatcgtgcgtgatccgcaatctgcggaagaacccgaattttgatatatgcacgcttttcatggaggtcatgctgccacgcgaagaactctactgcccgcccatcactgtgaaagtgatcgacaaccgccagttcgggagacgcccggtcgtgggacaatgcaccatccgcagcctcgaatctttcctgtgtgacccgtacagcgcagagagcccatcgccacagggaggaccggacgacgtgtcgcttctgagcccaggcgaagatgtgctcattgacattgatgataaggagcccctgatcccgatccaagaagaggagttcattgactggtggtcaaagttttttgcgtccattggagagcgggagaagtgtggatcatacctcgaaaaagacttcgacactctcaaggtgtacgatacccagctcgaaaatgtggaggcttttgaaggactcagcgatttctgcaacacttttaagttgtatagaggaaagacgcaagaagaaaccgaggacccatcggtcattggagaattcaaaggcctgtttaagatatacccgcttccggaggatcctgccatcccgatgccgccaagacagttccatcaactggccgcacaaggaccacaggagtgcctcgtccggatctacatcgtgcgcgccttcggcctccagccgaaggaccccaatggcaagtgcgatccgtacatcaagatctccataggcaagaagtccgttagcgaccaggataactacatcccgtgcacccttgaaccggtctttggaaagatgtttgagctgacctgcaccctgcctctggagaaggacttgaagattaccctgtatgactacgacctgctgagcaaggacgaaaagatcggagaaaccgtggtggacctggagaaccgcctgctttcaaagttcggcgccagatgtgggctcccacaaacttactgtgtgagcggacctaatcagtggagagatcaactgaggccgtcgcagttgctgcaccttttctgccagcagcatagagtgaaagcgcccgtctacagaactgaccgtgttatgtttcaagataaagaatatagtatcgaggaaattgaagccggacgaatcccgaatcctcatctggggccggtcgaagaaagactcgccctgcacgtgctgcagcagcaaggactcgtgccagaacatgtggagtcccgccctctgtactcgccactgcaaccggacatcgaacaaggcaaacttcaaatgtgggttgacctgttcccgaaggccctggggcgcccgggaccgccattcaacatcactccgagacgggcgcggcggttcttcttgagatgcattatctggaacacccgcgacgtcatcctggacgatctgtcgctgaccggagaaaagatgtccgatatctacgtgaagggttggatgatcggattcgaggagcataaacagaaaactgatgtccactataggtccttgggaggtgaggggaactttaactggcggttcatcttccccttcgactacctcccagcggagcaggtctgcactatcgccaagaaggacgccttttggagactggacaaaaccgaatcgaaaatcccggctcgggtggtctttcagatctgggataacgataagttctcctttgacgacttccttggatcactgcaactggacctcaatcggatgccaaaacctgctaagaccgccaagaagtgttcactcgaccagctggacgatgccttccatcccgagtggtttgtgagcctgttcgaacaaaaaaccgtgaagggatggtggccgtgcgtggccgaggagggcgagaagaagatcctggcaggcaagctggagatgaccctggaaatcgtggcagagtccgaacacgaagaacgcccggcagggcaaggacgcgatgagccgaacatgaacccgaagctggaagatccgcggcgaccagacacctcgttcctgtggttcacgtccccgtacaagactatgaaattcatcctgtggcggcgctttagatgggccatcatcctgttcatcattctgttcatcctgctcttgttcctggcgatctttatctacgcgttcccgaactacgccgcgatgaagctcgtaaaaccgttcagc

SEQ ID NO: 10702 - DNA, 6243 bp, synthetic construct
  misc_feature 1..6243: note = source = /note="Description of Artificial Sequence: Synthetic coding sequence"
  source 1..6243: mol_type = other DNA
atgttgtgctgcctgctggtgagagcctcgaatcttccatcagccaagaaagatcggagatccgacccagtggcctcgttgacctttcgcggcgtgaagaagagaactaaggtcatcaagaatagcgtgaacccggtctggaacgaaggctttgagtgggacctcaaaggaatcccgctcgaccaaggatctgagttgcatgtggtggtgaaggaccacgaaactatgggacggaaccgcttcctgggagaagcgaaagtcccactccgcgaagtgcttgccactccctccctctcggcgtccttcaatgcgccattgttggacacgaagaagcagcctactggcgcgtcgctcgtgctccaagtgtcctatactccactgccgggagccgtgcccctttttccgccaccgactccactcgagccctcgccaaccttgcccgacctggacgtggtggcggataccggcggagaagaagacaccgaagaccagggtcttaccggcgatgaagcagaaccgttcctcgaccagagtggcggccctggggctcctaccaccccccgcaagctcccttcacgccctcctccgcattacccagggatcaaaagaaagagatcggctcccacctcccggaagctcctgtccgataaaccgcaggatttccagattcgcgtgcaggtcatcgagggaagacagctcccgggagtcaacatcaaaccagttgtgaaagtgaccgctgccgggcagactaagagaacgcggatccacaagggaaactccccgctcttcaacgagacgctgttcttcaacctcttcgacagcccgggggagctgttcgatgagccgatcttcatcactgtggtggattcacgctccctcagaaccgacgcactcctgggcgagtttagaatggacgttgggaccatctacagagagccccggcacgcatacctccggaagtggcttctgctgtcagatccggatgatttctcggccggagctcgcgggtacctcaagacttcgctgtgcgtactgggtccaggagatgaggcgccccttgagcgcaaggacccgtcagaagataaggaagatattgagtctaacctgcttagaccaacgggggtcgcactgcggggagcccatttctgcctgaaggtgttcagagcggaagatctgccgcagatggacgacgctgtgatggacaacgtgaaacagatttttggcttcgagtcaaataagaagaacctggtggacccattcgtggaggtttcgttcgctggaaagatgctttgtagcaagatcctggaaaagaccgctaacccacagtggaaccagaacatcaccctgccggccatgtttccatccatgtgcgagaaaatgcgcatccgcatcatcgactgggatcgcctcacgcacaatgacatcgtggctactacgtacctctcaatgtccaagatctcagcaccgggaggcgagatcgaagaggaaccggccggagccgtcaagccgagcaaggcctcggatctggatgactacctcgggttccttcctaccttcggaccgtgctacatcaacctctatggttcaccgagagaatttaccggcttcccggacccgtacaccgaactgaatactggaaagggagaaggcgttgcttacagagggcgactcctgctgagcctggaaaccaagctggtcgagcactccgaacagaaggtcgaggacctgccggcagatgacatcctgagagtggagaagtacctgaggaggcgcaagtactccctgtttgcggccttctactctgcgactatgcttcaagatgtcgatgatgccattcaattcgaagtgtcaatcggaaattacgggaataagttcgacatgacctgccttccgttggcaagcactactcagtactcgagggcggtcttcgatggatgccactactactacctgccgtggggcaacgtgaagcctgtggtggttctttcttcatactgggaagacatctcgcaccggatcgaaacccaaaaccagctcctcggaattgcggacaggctggaggctggactcgagcaggtgcaccttgccttgaaggcacaatgctcgactgaggacgtggactcactcgtggctcagctgaccgacgaactcatcgctggatgctcgcaacctctgggggacatccatgagactccctcggcgacccatctggaccagtacttgtatcaactccgcacccaccatctgtcgcagatcaccgaagcggcgctggcactcaagctggggcactcggaactgccagccgcattggaacaagccgaagactggctgctgcgactccgggccctcgcagaagaacctcagaattcgttgcctgacatagtgatctggatgctccagggtgataaacgcgtcgcgtaccagcgcgtgccggctcatcaggtgctgttctccagacgcggcgcgaactactgcggcaagaattgcggcaaacttcagactatctttcttaagtaccccatggaaaaagtgccgggtgcccggatgccggtgcagatccgggttaagctgtggttcggactgtcggtggacgaaaaagaattcaatcaatttgcagagggcaaacttagtgtgttcgccgagacttacgagaatgaaaccaaacttgcacttgtcggaaactgggggactacgggcctgacctacccgaaattctcggacgtgactggaaaaatcaagctgcctaaagacagcttccggccgtcagcgggatggacttgggcgggagactggtttgtatgcccggagaagaccctcctccacgacatggatgcaggccacctgtcgttcgtggaggaagtctttgaaaatcagactcggctccctggtggtcaatggatatacatgtcagacaactacaccgacgtcaatggagaaaaagtgctcccgaaggacgatatcgagtgtcctctcggatggaaatgggaagacgaagagtggagcaccgacctgaacagagcagtcgacgaacagggatgggaatacagcatcactatcccaccggaaagaaagccgaagcactgggtccctgctgaaaagatgtactacactcaccggcgccggagatgggtgcggttgcggcgtcgggatctgagccaaatggaggcactcaagcgccaccgccaagcagaggccgaaggcgagggatgggagtacgcaagcctttttggatggaagttccacctggagtacaggaagactgatgctttccgcagacggcggtggagacggcgtatggagccgctcgagaagactggtccggcggccgtgttcgcgctggagggtgctctgggtggagtgatggacgacaagtcagaggatagcatgtcagtgtccaccctcagcttcggggttaatagaccaaccatcagctgcatcttcgactacggcaaccgctaccatcttcggtgctacatgtaccaggctcgggacctcgctgctatggataaagactcattttccgatccgtacgcaatcgtgtccttcctgcaccagtcccagaagacggtggtcgtcaaaaacaccctgaatccgacctgggatcaaaccctcattttctacgagatcgaaatcttcggggagcccgccaccgtggccgaacagccgccgtcaatcgtggtggaactgtatgatcatgatacctacggagccgacgagttcatggggcgttgcatctgtcaaccatcgctggagcgcatgccgcggctggcctggttcccgctgacccgtggaagccagccttcgggtgagctccttgcctcgttcgagctcatccaaagagaaaaaccggccatccatcacatcccgggattcgaagtgcaagaaacttcgcggatacttgacgagtccgaagacacggacctgccctacccgccgccgcagcgcgaagcgaacatctacatggtgccgcaaaatatcaagcccgcgcttcagcgcaccgcaatcgagattctggcctggggcttgcgcaatatgaagtcatatcagctggccaacatctcttcgccatcactcgtagtggagtgcgggggacaaactgtgcagagctgtgtgatccgcaacctgagaaaaaacccaaattttgatatctgcactctctttatggaagtcatgcttcccagagaagaactctactgcccgccgatcaccgtcaaggtgatcgataataggcagttcgggcgccgccccgtggtcggacagtgtacgatcaggagcctggagtcctttctgtgcgacccttactcggccgaaagcccgtcacctcagggaggaccggacgatgtgtcgctgctgtcaccgggagaggatgtgctcatcgacatagacgataaggaacccctgatccccattcaggaagaagagttcatcgattggtggtccaaattcttcgcctccatcggagaacgggaaaaatgcggaagctacctggagaaggatttcgacaccctgaaggtgtacgatacccagctcgagaacgtggaggcttttgagggactctccgacttctgcaacactttcaagttgtacagaggcaagacgcaagaggaaactgaggatccgagcgtgattggagagttcaagggcctcttcaaaatctacccgctgcccgaagatccggcgatccctatgccccctcgccagttccaccaactcgccgctcagggaccgcaggaatgtcttgtgcgcatctacatcgtgagggcattcggtctgcagccgaaggacccgaacggaaagtgtgacccgtacatcaaaatttcaatcggaaagaagtcagtgtcagaccaggataactacatcccttgcactctcgaaccagtgtttggcaagatgttcgaactgacctgtaccctgccgctcgaaaaagacctgaagattactttgtacgattacgatttgctttctaaggacgagaagatcggggaaacggtcgtcgatttggaaaatagactcttgagcaaattcggcgctcgctgcggacttccacagacgtactgcgtgtcgggacctaaccagtggcgggaccaacttcgcccctcgcagctgcttcatctgttttgccaacagcacagggtcaaggcacctgtctacagaactgaccgcgtgatgttccaggacaaggaatactccatcgaagaaatcgaggcaggcagaattccaaatccgcacctgggacctgtcgaagaacggctcgctctccacgtgctccagcaacagggactcgtgcctgagcacgtggaatcaaggccgctctacagcccactgcagccggatatcgaacagggaaagctgcagatgtgggtggacctgtttccaaaggcgttgggacggcccggacctcccttcaacatcactccgcggcgcgccaggcgcttctttctccggtgcattatctggaatacccgcgacgtgatccttgacgacctgagcttgaccggcgagaaaatgtccgatatctacgtcaagggatggatgattgggttcgaggagcataagcaaaagactgacgtgcattacaggtccctgggaggagaaggtaacttcaattggagattcattttcccatttgattacctgccggccgagcaggtgtgcaccatcgctaaaaaagacgcgttttggcgtctggataagactgaatcgaagattcccgcgcgcgtcgtgttccagatctgggacaatgacaaattctcgttcgacgactttctgggatcgctgcagctggacctcaacagaatgccaaaaccagccaaaaccgctaagaagtgctcgttggaccagctcgacgacgccttccatcctgaatggtttgtttcgcttttcgagcagaagactgtgaagggatggtggccatgcgtggccgaggaaggtgagaaaaagatcctcgcaggcaagctggaaatgaccctggaaattgtggccgaaagcgaacatgaggaaagacccgccggtcagggtagagacgaaccaaacatgaaccctaaactggaggatccgaggcggcctgataccagcttcctgtggtttacctcaccttataagaccatgaagttcatcctgtggcgtaggttccgctgggcgatcatcttgtttatcatccttttcattctgctgctcttccttgcgatctttatctacgcattcccgaactacgcggcaatgaagctggtgaaaccgttctcc

SEQ ID NO: 10703 - DNA, 6243 bp, synthetic construct
  misc_feature 1..6243: note = source = /note="Description of Artificial Sequence: Synthetic coding sequence"
  source 1..6243: mol_type = other DNA
atgctttgctgccttcttgtgagagcatccaaccttccatccgcgaagaaggatagacggtcagatcctgtcgcatccctcacttttcgtggagtgaagaaaagaaccaaagtgatcaagaactcggttaacccagtgtggaatgaggggttcgagtgggatcttaagggcattccgctggatcagggttcagagctgcatgttgtggttaaggatcacgagactatgggtcgaaaccgatttcttggtgaagcaaaggtgccacttcgggaagtgcttgcgaccccgtcgctgtccgctagcttcaacgcaccacttcttgacaccaagaagcaacctactggcgcaagccttgtcttgcaggtgtcctacactccactgcccggcgcagtcccactgttcccacctcccacccctcttgaaccttcccctacccttcctgatcttgacgtcgtggcagacactggtggtgaggaggatacggaagatcaagggctcaccggcgacgaagctgaaccttttcttgatcaatcggggggacccggtgcacctaccactcctaggaaactgccgtcacgtccaccgccacactacccaggtattaagcggaagcgatcagctccaacctccagaaagctgctctctgataagccacaggatttccagattcgggtgcaagtgatagaaggacgacaactcccaggagtgaatatcaagcctgtggtgaaagtgaccgcggcaggacagactaagcggaccagaattcataagggaaactcgccgctcttcaacgagactctgttctttaacctgtttgattcccccggagagctgttcgatgagcctattttcattactgtggtcgattcgcgatcccttagaaccgacgcccttcttggagagtttagaatggacgtcggtaccatctaccgggagcctcggcatgcctacctccgaaaatggctcctcctttccgatcccgatgacttcagcgcaggggcccggggctacctcaaaaccagcctgtgcgtcctgggtcctggtgacgaggcacccctggagcgcaaggacccctccgaagataaagaagatatcgaatcgaatctcctgcgcccgaccggagtggcccttcgcggagcccacttctgccttaaggtgtttagggcagaggatctgccacagatggatgacgcagtcatggataacgtgaagcagatttttggtttcgaaagcaacaagaaaaatctcgtggacccttttgtggaagtgtcctttgcaggtaagatgctgtgttctaaaatcctcgaaaagaccgccaacccacaatggaaccagaacattaccctccccgcgatgtttccaagcatgtgtgagaaaatgcggataagaatcatcgattgggataggctgacccacaatgatattgtcgcaaccacttacctctcgatgagcaagatttccgcccccggaggggaaatcgaagaagaaccagcaggggccgtgaagccatcgaaagcatccgatcttgacgactatctcggtttccttcccacctttggtccctgctacataaacctttacggatcgcctagagaatttaccggtttcccagatccttacaccgaattgaacactgggaaaggcgaaggtgtggcctaccggggacggttgctcttgtctctggaaaccaaacttgtggagcactcagaacaaaaggtggaggaccttccagcggatgatattctgagagtcgagaaatatcttagacgcagaaagtactccctttttgccgcgttttacagcgccaccatgctccaggatgtggacgatgcaattcaattcgaagtgtcgatcggcaactacggtaataagtttgatatgacttgtctgcctttggcatccaccacccaatacagcagggcggtctttgatggatgtcactattactacctgccttggggaaacgtgaagcccgtggtggtgctgagctcgtactgggaagatatctcgcatcggattgaaacccagaaccaactcctgggtatagcagatagactggaagcaggactggagcaagtgcacctcgcgctgaaagcgcaatgctccactgaggatgtcgattccctggtcgcgcagctgactgatgagcttattgccggatgttcgcagccgctgggggacattcatgagactccatcggccactcacttggaccagtacctctaccaacttcggactcatcatctttcccagataaccgaagcggcacttgcacttaagctcggacattctgaacttcctgctgcccttgagcaagctgaagattggttgctgagacttcgggcactcgcagaagagcctcagaattcgctgccagacatagtgatttggatgctgcagggagataagcgggttgcctaccaacgcgtgcctgcccatcaggttcttttttcccgtcgcggggcaaattactgcggtaagaattgtggtaagttgcaaacgatttttctgaagtaccccatggagaaggtgcctggtgccagaatgccagtgcagatacgtgtgaagctgtggttcggtctgtccgtggatgagaaagagtttaatcaatttgcagaaggaaagctgtccgtctttgcggaaacttacgaaaatgaaacgaaacttgccctggttggaaactggggaaccactggacttacctaccctaaattctcggacgttaccggaaagatcaaactgcctaaggattcatttagacccagcgcaggatggacgtgggcaggggattggttcgtgtgcccggaaaagactcttcttcacgatatggatgcaggccatctgagcttcgtggaagaggtctttgagaatcagactagactgccaggaggacaatggatctacatgagcgacaattacacggatgtgaacggggaaaaagtgctgcccaaggatgatattgaatgcccacttggatggaaatgggaagatgaggagtggtccaccgacctgaatcgtgccgtggatgaacagggatgggaatattccatcaccattccacctgagcggaagccaaagcattgggtgcctgctgaaaagatgtactacactcatagacgcaggagatgggtgagactgcggagaagagatctctcacagatggaggcgctcaagagacatagacaggcagaagccgagggcgaaggctgggaatacgcctcactgttcggttggaagtttcatttggaataccgcaagactgatgcatttcggaggagaagatggcgacgaagaatggaacctcttgaaaaaactggtcccgcagcagtctttgccctcgagggggcccttggtggtgtgatggacgataaatcggaggattcaatgtcggtgtccaccctttcattcggcgtcaatcgtcctaccatctcgtgcatttttgactacggcaaccgataccatctcagatgttacatgtaccaggcccgagatctggcggccatggataaagactcctttagcgacccttacgcaatcgtgtcctttctgcatcaatcccaaaagacggttgttgtgaagaacactcttaaccctacctgggatcaaacccttatcttctacgagatcgagatcttcggcgaacctgcaaccgtggcggaacaaccaccaagcattgtcgtggaactttacgatcatgacacgtacggtgccgatgagtttatgggaaggtgtatctgtcagccaagccttgaacgtatgcctcgcttggcttggtttcctttgacgaggggttcacaacctagcggggaacttttggcgagctttgaacttattcaacgggagaaacctgccattcaccatattcctggttttgaagtccaagagacttcgcgaattctggacgaatcggaggacaccgatctgccatatcctccaccacagcgtgaggcaaatatctacatggtgccccaaaacatcaagccagcactgcagagaacggctatcgaaatcctggcatggggattgagaaacatgaagtcataccaactcgcaaatatcagctcgccttcgctggtggtcgaatgtgggggtcaaaccgtgcagtcgtgcgtgattagaaatctgagaaagaacccaaacttcgatatttgtacccttttcatggaagtcatgctccctcgggaagagttgtactgccccccgattactgtcaaggtcattgacaacagacagttcggaagaaggccagtggtgggacaatgcactatcaggagccttgaatcatttctctgcgacccttactcggcagagagccctagcccccagggtggaccagatgatgtgagccttctttcacctggagaagatgtgcttattgatatagacgataaagaaccactcattccaatacaggaagaggagtttattgattggtggagcaagttttttgcctccattggcgaacgagaaaagtgtggaagctatcttgagaaggattttgataccttgaaggtctacgatacccagctcgaaaatgtcgaagcgtttgagggactgtcggatttttgcaacacgttcaaactctaccgcggtaagactcaagaggagacggaagatccatcggtgataggggaattcaaaggactgtttaagatctacccgctgccggaagatccagcaatccctatgccgcctcggcaatttcatcaacttgctgcacaagggcctcaagaatgcctggtccgtatttacatcgtgagagcatttggccttcaacctaaagaccccaatggcaagtgtgatccttacattaagatctcgattggtaagaagtcagttagcgatcaggacaactacattccatgtacgctggaaccggtctttgggaaaatgttcgaactgacctgcacgctgccacttgaaaaggatttgaagattacgctctacgactatgatctccttagtaaagatgaaaagattggcgaaaccgtcgtggacctggaaaaccggcttctttcgaaattcggagcaaggtgtggactcccgcaaacctactgcgtgagcgggccaaaccaatggcgggaccaacttaggccttcccagctgctgcaccttttctgtcagcagcatagagtgaaagcgcctgtgtacagaaccgatagagtcatgtttcaagataaggaatatagtattgaggagatcgaagctggtcgtatacctaatcctcatcttggcccagtggaagaacgtctggcccttcacgtgctgcagcagcaagggctggtgcctgagcacgtcgaatcaagacctctgtacagccctttgcagcctgacatagagcaaggtaaattgcaaatgtgggtggacctgtttcccaaagcgcttggacgcccgggaccaccttttaacattacccccagaagagcccggcgcttttttcttaggtgtatcatatggaacactcgtgatgtgattctcgacgacctgtcgctgaccggagagaagatgtcagacatttacgtgaagggatggatgataggattcgaagagcataagcaaaagaccgatgtgcactacaggagcctgggtggagaaggcaactttaactggcgtttcatctttccctttgattaccttccagccgaacaggtgtgtactattgctaagaaggacgcattctggagacttgacaagaccgaatcaaagattccagcaagggtggtgtttcagatctgggataatgacaagttctcgttcgatgactttcttggatcacttcaacttgaccttaatcgcatgcctaagcctgcaaaaactgcaaagaaatgttcgctggatcagctggacgacgcattccacccggagtggtttgtgtccctgtttgagcagaaaactgtgaaaggatggtggccttgcgtggccgaggagggagaaaagaaaattctcgcggggaaactcgaaatgaccctggaaattgtcgcagaatccgagcacgaagagaggccagcaggacagggaagagatgaacctaacatgaacccaaaacttgaggaccctagacgtccagatacttcctttctctggtttacgagcccatacaaaaccatgaagtttattctttggaggagattccgttgggccatcatcctctttatcattctgttcatattgctcctgttcctcgccatcttcatttatgccttcccaaattacgcagcgatgaaacttgtcaagccattctcg

SEQ ID NO: 10704 - DNA, 1167 bp, synthetic construct
  misc_feature 1..1167: note = source = /note="Description of Artificial Sequence: Synthetic coding sequence"
  source 1..1167: mol_type = other DNA
atgggctaccctgaagtggaaagaagagagctcctccctgcagctgccccccgggaaagaggttcccagggatgtggatgtggtggtgcacctgcacgggcgggggaaggtaacagctgtctgctttttctgggattctttgggctttcccttgcactgcacctgctgactctttgttgttaccttgaactgcgcagcgagctccgcagagaaagaggggcagagtcgagactcggaggttcgggtacccctgggacctcgggaacgcttagcagtctcggaggacttgaccctgattcacctatcacctcccatttgggccaaccttcaccaaaacagcaacccctggaacccggagaagcagcactccattccgattcgcaggatggacatcaaatggccctccttaacttctttttcccagatgagaagccctactcagaagaagaatccagaagagtcagaagaaacaaacgctcgaagtcgaatgaaggggcagatgggccagtgaagaacaagaaaaagggtaagaaggcgggtccaccaggacctaacgggcctcccggcccaccgggtccacccgggccacaaggcccccctggaataccaggtatcccaggtatccctgggactactgtaatggggcccccaggacctcctgggccaccgggacctcaaggccctcccgggctccaaggtcctagcggagccgcagacaaggcaggtactcgagagaaccaaccagcagtcgtgcacctgcagggtcagggctccgctattcaggtgaagaacgacctttcgggtggagtcctgaacgactggtcgagaatcactatgaatccaaaggtctttaagctccacccccgtagcggggaactggaggtgcttgtcgatggaacttacttcatttactcgcaagtgtactacatcaacttcacggattttgcttcatacgaagtggtggtggatgaaaagcctttcctgcaatgcactcgttccattgaaactgggaaaactaactataacacctgttacaccgcgggggtgtgccttttgaaggcgcgccagaaaattgcagtgaagatggtgcatgcagatatcagcatcaatatgtcaaagcacaccacctttttcggcgccattaggcttggcgaagcacctgcatcc

SEQ ID NO: 10705 - DNA, 1167 bp, synthetic construct
  misc_feature 1..1167: note = source = /note="Description of Artificial Sequence: Synthetic coding sequence"
  source 1..1167: mol_type = other DNA
atggggtatcctgaggtggagcgaagagagctcctccccgctgccgcaccccgggagagagggagccagggctgtggttgtggcggggcgccggcacgagccggggaaggtaacagctgcttgctgtttcttggttttttcggcctgagtctggcactgcatctgctaactttgtgttgctacctagagctgagatccgagctgcggagagaacggggagcagagagtaggctgggcggaagcggaactccggggacatctgggactctgagctcactagggggtctcgatccagactcgcccataaccagtcatctgggccaaccttcacccaagcagcagccactggagcctggcgaggccgccctccattccgatagccaagatgggcatcagatggccctgctgaacttctttttccccgacgagaagccttattctgaagaagaatcccggagggtacgacgaaacaaaagatctaaaagcaatgagggtgccgatggtcctgtgaagaacaagaagaaaggaaagaaagctggaccccctggccctaacggcccgcccggtccgcctggaccaccagggccacagggtcctccaggaattcccgggatacccggcatccccggaaccacggtgatggggccaccaggtccacccggccctcccgggccacagggtccaccaggcctccaggggcctagcggcgccgccgacaaggccgggacacgcgagaaccagccagctgtggtccatctgcaaggtcagggaagcgccatccaggtcaagaacgatctctccggcggcgtgctgaatgattggtctcgcattactatgaaccccaaggtatttaagttgcaccctcggtctggcgaactggaggttttagtggacggcacctactttatctacagccaggtatattacatcaatttcacggattttgcttcttacgaagtcgtagtcgacgagaaacctttcttgcagtgtacacgctcgattgagactggtaaaaccaactacaacacatgttacactgcgggcgtgtgtcttctgaaagctcgccagaagatcgctgtgaaaatggtccacgcagatattagcatcaatatgtcaaaacatacaacatttttcggagcaattagactgggcgaggcaccagcctcc

SEQ ID NO: 10706 - DNA, 1167 bp, synthetic construct
  misc_feature 1..1167: note = source = /note="Description of Artificial Sequence: Synthetic coding sequence"
  source 1..1167: mol_type = other DNA
atgggctatcccgaagtggagcgccgcgagcttcttcctgccgccgcacccagagagcgaggctcacaggggtgtggctgcggcggcgcgcctgctagggctggagagggtaatagttgcctgctgttcctgggcttcttcgggcttagcttggctctgcatctgctgaccctttgctgctacctagaattgagaagtgaactgagacgtgagaggggcgccgaaagcagactcggaggctcagggactcccggtacaagcggaacactgtcaagtctgggaggcctcgatccagactcccctattacttcccacctaggacagccctcccccaaacagcaaccactcgagcctggggaagcggccttacattccgattctcaggacggccaccagatggcactcctgaacttctttttccctgatgaaaagccgtacagcgaggaggaatccagacgcgtccgccggaataagcggagcaagagcaatgagggcgccgacgggcctgtcaagaacaaaaagaagggcaagaaggctggccctccggggcctaacgggccgcctgggcctccagggccgccaggcccccagggcccccccggaatacccgggatcccaggcatcccaggtaccactgtaatggggccaccaggcccaccagggcctccaggaccacaggggccccctggcttacaaggcccttccggggcggccgataaggccggaacccgtgagaaccaacccgcagtagttcacctccaggggcaggggtctgcaatccaagtcaagaatgacctcagtggtggtgtcctgaacgattggtcgagaatcacaatgaaccccaaagtttttaaactgcacccgcgctcaggtgagctggaagtgcttgtggatggcacttacttcatttatagccaagtgtactatataaatttcaccgacttcgctagctacgaggtcgttgtggacgagaaaccatttctccagtgcacccgatcgatcgaaactggcaagaccaattataatacatgctataccgctggggtctgcctgctgaaagcgcgacaaaaaatagcagtgaagatggtgcacgcagatatctctatcaatatgagtaaacacacaactttcttcggagccattcgcctcggggaggcccctgcctca

SEQ ID NO: 10707 - DNA, 1167 bp, synthetic construct
  misc_feature 1..1167: note = source = /note="Description of Artificial Sequence: Synthetic coding sequence"
  source 1..1167: mol_type = other DNA
atgggataccctgaagtggaacgccgcgaactcttgcctgcggccgccccgagagaacggggaagccaaggatgcggatgtggaggagcccccgcgcgcgctggtgaaggaaactcgtgcctgctgttcttgggattcttcggtctgtcgctggccctgcatttgctcaccctgtgttgctacctggaattgagatcagagctgcgccgcgagcgcggcgccgagtccagactggggggatccgggacgcctgggaccagcggaacgttgtcgtccctcggagggctggatccggattcccccatcacttctcacctcggtcagccctcgccgaagcaacagcccctggaaccgggagaagcagctttgcactcggattctcaagatggacaccagatggcgctcctgaacttcttctttccggatgaaaagccttattccgaagaagagagtcggcgcgtgagaagaaacaaacgcagcaagagcaacgaaggcgccgacggcccggttaagaataagaagaaaggcaagaaggccggtcctccaggaccaaacggacccccaggaccgcccggcccgccaggaccacaagggccgccgggtatccccggtatccctggaattcctggtactacggtgatgggcccgccggggccgcctggaccaccagggccgcagggaccgccgggcctccaaggaccgtccggcgccgcagataaggctggtactcgggagaatcagcctgcggtcgtccatctgcagggacagggaagcgcaatccaggtgaaaaacgacctttccggcggagtcctcaacgattggtcccggatcaccatgaacccaaaggtgttcaagctccatccacggagcggagaactggaagtccttgtggacggcacctactttatctactcccaagtttactacatcaatttcactgacttcgcttcatacgaagtcgtggtggacgaaaagccgtttctgcagtgtactcggtccatcgagactggaaagaccaactacaatacctgctacacggcgggagtgtgccttctgaaagctcggcagaagatcgccgtgaagatggttcacgcggacatctccatcaacatgtcgaagcacaccaccttctttggagcgatccggctgggggaggccccggccagc

SEQ ID NO: 10708 - DNA, 1167 bp, synthetic construct
  misc_feature 1..1167: note = source = /note="Description of Artificial Sequence: Synthetic coding sequence"
  source 1..1167: mol_type = other DNA
atgggctaccccgaggttgagaggagagagctgcttcccgccgctgctccaagggagaggggtagccagggttgcggttgtggcggcgcacccgcacgcgccggtgagggaaatagctgtctcttgttcctgggatttttcggcctgtctttggccctccacctcttgactttgtgttgttacctggaactgaggagcgagctgcgccgcgaaaggggagcagaatcacgcctcggcggtagcggcacacccggaacatcaggcacgctgagttcactgggtggccttgacccagacagccccattacttcacatctgggccaaccatcccctaaacagcaacctctggagcccggagaagctgctctccattccgattcccaggatggacatcagatggctctccttaatttcttctttccagacgaaaagccttactccgaggaagaatcccgccgcgtgaggagaaacaaaaggagtaaaagtaatgagggtgccgatggaccagtgaagaacaagaaaaagggcaagaaagctggccctcctggcccgaacggaccccctggcccacccggacccccgggcccacagggtccaccaggtattcccggcattcccggcatccccggcactaccgtaatgggcccccctggcccacccggaccaccgggtccgcagggacctcccggtctccaaggaccctccggtgctgctgacaaagcgggtacgagggaaaaccaacccgctgtagtacacctgcagggacaaggtagcgccattcaagtaaagaatgacctctccggcggcgtactcaatgactggtcccgcatcactatgaaccccaaagtgtttaagcttcatccccgcagcggtgaactggaggtgctggtcgacggaacttatttcatctacagccaagtttactacatcaacttcacggacttcgcttcctacgaggttgtagtggatgagaaaccctttctgcagtgtacaagatctatcgaaacaggaaagaccaattacaatacctgttataccgccggcgtgtgcttgcttaaggccaggcaaaagatcgctgtgaagatggtgcacgccgacatctctatcaacatgtctaagcataccaccttctttggagctatcaggcttggtgaagcgccagcgagc

SEQ ID NO: 10709 - DNA, 1167 bp, synthetic construct
  misc_feature 1..1167: note = source = /note="Description of Artificial Sequence: Synthetic coding sequence"
  source 1..1167: mol_type = other DNA
atgggatatcctgaagtggaacggcgggaattactaccagctgcggcaccccgcgagcggggcagtcagggttgtggatgcggcggcgcacctgctagagcaggcgagggcaactcctgcctgctgttcctggggttcttcgggttgtcacttgccctgcacctcctaaccctttgctgctacttggaactgcggagcgagctacgccgggagcgaggggcagagagtcgccttgggggttctggaacacccggcacatccggcaccctatcatcactgggagggctcgaccctgatagccccataacgagccatttgggacagcccagccctaagcagcagccactcgaacctggggaggcagctctccacagtgacagtcaagacgggcaccagatggctttgctgaattttttttttcctgatgaaaagccctactcggaggaggaaagtcggagagttcgacgcaacaaaaggtcaaaatcaaatgagggcgccgatggacctgttaagaataagaagaagggaaagaaggcaggccctcccggacccaatgggcctcctgggcctcctggcccaccaggcccacagggcccaccaggtatcccaggtatccccgggattccaggaaccaccgtgatgggacctcctggccctccaggaccacccggtccccagggcccccctgggctccaaggcccatctggggcagctgataaggccggaacacgagagaatcagccagccgtggtacatctgcaggggcaagggtccgccatccaggtcaagaacgacttgagtggaggagtcctaaacgactggtctcgaataaccatgaatcccaaggtgtttaagctccatccccgaagcggtgagcttgaggtacttgtcgacggcacctattttatctattcacaggtgtattatatcaatttcacagatttcgcttcatatgaggtggtggtggacgagaagccgtttcttcagtgcactcggagcatagagacaggcaaaacaaattataatacttgttacacggccggcgtctgtctcctgaaggcaagacagaagatcgccgtgaaaatggtccatgctgacatatcaatcaacatgtccaaacatactacgtttttcggcgcgattagacttggcgaagcacccgcatct

SEQ ID NO: 10710 - DNA, 1167 bp, synthetic construct
  misc_feature 1..1167: note = source = /note="Description of Artificial Sequence: Synthetic coding sequence"
  source 1..1167: mol_type = other DNA
atggggtatcctgaggttgaaaggcgagagctgctgcccgccgctgctccgagagagcgcgggtctcaagggtgcgggtgcgggggagccccagcccgggccggggagggcaacagctgtctgttgttcctcggctttttcggattgtctctggccctgcacctgctaactctttgttgttatcttgaactgcggtcggaactgcggagagagcgcggagccgagagccgccttggcggctccggcactcccggtacttccggcaccttgagctccttgggtggtctggatcccgattcccccatcacatcacacctggggcagccctctcccaagcagcagccactggagccgggagaagcagctttgcacagcgactcccaggacggacaccagatggccttgcttaacttcttctttcccgacgagaagccgtattcagaggaagaatccaggcgcgttaggaggaacaagagaagcaaatccaacgaaggcgcggatggccccgttaaaaacaagaagaaggggaagaaggctggccctccgggacccaatgggccccctggcccgcctgggcctccaggaccgcaagggccacctgggattcctgggatccccggcattccggggacaacggtgatgggtccccctggtcctcctgggccccccgggccccagggcccccctgggctgcagggcccctccggcgcggcagataaagctggtacgcgcgagaaccagccagccgtggtgcacctccagggtcagggttctgccatccaagtgaaaaatgacctgtcaggcggcgtgctgaacgactggtctcggatcaccatgaatcctaaagtgtttaaactgcacccaagaagcggggagctcgaggtgctggtcgacggcacatacttcatctacagccaggtgtactacattaactttaccgacttcgcgtcctatgaagttgtggtggacgaaaagccgttcctgcagtgtacgaggtccatcgagaccgggaagactaattataatacctgctataccgccggcgtgtgcctattgaaagcccggcagaaaatcgctgtgaagatggttcacgcagacatctccattaacatgtccaagcatactaccttctttggcgccataagactgggagaggccccagcaagc

SEQ ID NO: 10711 - DNA, 1167 bp, synthetic construct
  misc_feature 1..1167: note = source = /note="Description of Artificial Sequence: Synthetic coding sequence"
  source 1..1167: mol_type = other DNA
atggggtaccccgaagttgagagacgggaacttctgcctgcagcggccccacgggagcgggggagccaggggtgcggctgtggaggcgccccggcacgcgccggcgagggtaactcgtgcctgctgttcctggggtttttcggcctctccctggcactgcacctgttgaccctgtgctgctacttggagcttcggtcagaattgcgacgcgagcgcggcgccgaatcgcggctgggaggatcgggaacccctgggacttccggaaccctgtcctccctgggaggactggatcctgattctccaatcaccagccacctgggtcaaccatccccgaaacagcagccgctcgaaccgggcgaagccgcgctgcacagcgactcgcaggacggccatcagatggcgctgctcaatttcttctttcccgatgaaaaaccatactcggaagaggaatcgcgcagagtccgccgcaacaagcggtcaaagtcgaacgagggggcagacggccccgtcaaaaacaagaaaaagggtaagaaggctggtccgccaggccccaacgggccaccgggaccccccgggcctcctggaccgcaaggcccaccggggatcccgggcatcccgggaatcccggggacgactgtcatggggcctccgggaccgcctggtccgcctggtccccaggggccaccagggttgcagggaccgtccggcgctgccgataaggccggaacgcgcgagaaccaaccggccgtggtgcacctgcagggacagggatccgctatccaggtgaagaatgacctgagcggaggtgtcctcaacgactggtcgaggatcaccatgaaccctaaggtgttcaagttgcatccgcggagcggcgagctcgaagtgctggtcgatgggacctatttcatctactcgcaagtgtactacatcaatttcaccgacttcgccagctacgaagtcgtggttgacgaaaaaccgtttctccagtgcacccggtcaatcgaaaccggaaagactaactacaacacctgttacactgccggagtgtgcctgctgaaggcccgccaaaagatcgcggtgaagatggtgcacgccgatatctcaatcaacatgtctaagcacaccacgttttttggagcgatccgacttggagaagcgccggcttcg

SEQ ID NO: 10712 - DNA, 1167 bp, synthetic construct
  misc_feature 1..1167: note = source = /note="Description of Artificial Sequence: Synthetic coding sequence"
  source 1..1167: mol_type = other DNA
atgggctatcctgaggtggagcgccgggagttgctcccagcggccgcaccccgggaacgtggatcccagggatgcggctgtggcggcgcaccggcccgcgccggggaggggaacagctgtctgctgtttctgggctttttcggactgtcgctcgccctgcaccttctgacattgtgttgttacctcgagctaaggagcgaattgaggcgagagcggggggcggagagcagacttgggggcagtggaacacccgggacttccggaacactttctagtcttggaggtcttgatcctgattcacctatcacaagtcatcttggccaaccaagtcctaaacagcagccacttgagcccggcgaagcagcacttcattctgactcccaggatggacaccagatggcgctcctcaactttttcttcccagacgaaaagccctattcagaggaagaatctaggagggtgcggagaaataaaagaagtaaatccaatgagggagccgatggtccagtgaaaaacaagaagaagggaaagaaagctgggcctcccggacctaatgggccacccggcccacctggaccaccagggccacaaggtcctcctggcattccgggcatccccggcatacctggcacaaccgtcatgggcccccctggcccccccggacccccaggccctcagggaccacccggcttgcagggcccctctggagcagctgataaggcaggaacccgagaaaaccaacccgccgtggttcatcttcagggccagggctccgccatccaggtgaaaaatgacctgtccggaggcgtactgaatgattggagtcgtatcacaatgaatcctaaggtttttaagctccaccctcggagcggggagctcgaggtgttagtggacgggacctactttatctattctcaagtgtactatatcaatttcacggattttgcttcatacgaggttgtggtcgacgagaaaccatttttgcaatgcacacgcagcatcgaaacggggaagactaactacaacacttgttacacagctggcgtttgcctcctcaaagcacggcagaagatcgctgtgaagatggtacacgctgatatcagcatcaatatgtccaagcataccacatttttcggggccattcggctgggcgaggcccccgcgagc

SEQ ID NO: 10713 - DNA, 1167 bp, synthetic construct
  misc_feature 1..1167: note = source = /note="Description of Artificial Sequence: Synthetic coding sequence"
  source 1..1167: mol_type = other DNA
atggggtaccctgaagttgaaagaagagaacttctgcctgcagcagcgccccgagagagaggaagccaaggttgtggctgtggcggggctcccgctcgcgcgggcgaaggaaattcttgtctgctgttcctgggctttttcggattgtcccttgcactgcatcttctcaccctgtgttgttacttggaattgcggtcggagctgcgcagagagcgaggtgcagagtcgaggttgggtggatccggaacccctggcacctccggtactctgtcctcactgggcggacttgacccagactcgccaattacttcccatttgggtcagccgagtccaaaacaacagccgctggaaccgggagaagcggcattgcactccgattcgcaggatggacatcaaatggcactcctgaatttcttttttcccgatgaaaagccatatagcgaggaggaatcgcgtcgcgtccggcggaataagcgttcaaaatcgaacgagggcgcagatgggcccgtgaaaaacaagaagaaagggaagaaggcaggtccccctggcccaaatggtcctccaggtccacctggtcccccgggtcctcaggggccgcccggaatccctgggatccctggcatacctggaactactgtcatgggacctcccggaccaccaggccctcccggtccacaggggcccccgggtctgcaagggccttcgggagcggccgataaggcgggcacccgcgagaaccagcccgcagtggtgcacctgcaaggacagggctccgccattcaagtgaagaatgacctttcaggaggggtgctgaacgattggtcccgaattaccatgaacccaaaggtgtttaaactgcatcctcggagcggagaactcgaggttctcgtggacggaacctatttcatttactcccaagtatactacatcaacttcactgactttgcatcttacgaagttgtggtggatgaaaaaccttttctccaatgcacgaggtcaatcgaaaccggtaagactaactacaacacgtgctacacggcaggtgtgtgcctcctgaaggccagacaaaagattgctgtcaagatggtccacgctgatattagcatcaatatgtctaaacatactaccttctttggggcaataaggttgggcgaggcccctgccagc

SEQ ID NO: 10714 - DNA, 1167 bp, synthetic construct
  misc_feature 1..1167: note = source = /note="Description of Artificial Sequence: Synthetic coding sequence"
  source 1..1167: mol_type = other DNA
atgggctaccctgaggtggaacggcgcgagcttttgccagcagccgcaccaagagagagaggctcacaaggatgcggctgtggcggcgctcctgcaagagcgggtgaggggaatagctgtctgctttttcttggctttttcgggctcagtctggctctgcaccttcttaccctgtgctgctaccttgagctgaggagcgaactgcgccgagagcggggggccgagtcacgtctgggcgggtctggaactcctggcacgtcggggactctgagctcactgggaggactcgatccagactcacccatcacttcccacctggggcaaccttctccgaaacagcaaccactggaaccaggtgaggcagcacttcattccgatagccaagatggacatcaaatggcactgctcaatttcttcttcccggacgaaaaaccatactcggaagaggaatcgcggagagtgcgcaggaataaacgctccaagtcgaacgagggcgccgatggacctgtaaagaataagaaaaagggaaagaaagcaggcccaccaggccctaacggtcctcctgggcctccaggacctcctggccctcaggggccacccggtattcccggtatccctggtattcctggaaccaccgtgatgggtcctcctggaccaccaggtccaccaggaccgcagggccctcctggtttgcaggggccttcgggagctgcagacaaggcaggaacccgagagaatcaacccgcagtggtacatctgcaaggacaaggttcggcaattcaggtgaagaatgatctgtcgggaggtgtgcttaacgattggtcgagaattaccatgaaccccaaggtctttaaactccatccgcgatctggcgaacttgaggtgctggtggacggaacgtactttatctactcgcaggtgtactacataaacttcaccgactttgcatcctacgaagtggtcgtcgacgaaaagccatttcttcagtgtaccagatccatcgagacgggtaagactaactacaacacctgttatactgcaggggtctgcctgttgaaggcgaggcaaaagatcgcagtcaagatggtgcatgcagacatttccatcaacatgtcgaagcatacgacctttttcggagcaataaggctgggagaggctccagcgtca

SEQ ID NO: 10715 - DNA, 1167 bp, synthetic construct
  misc_feature 1..1167: note = source = /note="Description of Artificial Sequence: Synthetic coding sequence"
  source 1..1167: mol_type = other DNA
atgggatatccagaagtcgaaaggagggaattgctcccagctgccgcacccagggagagaggcagtcagggatgcggatgcggaggggcaccggccagggctggtgagggcaactcttgtcttctgttccttggtttcttcgggctgtcactggctctgcacctgctgaccctctgctgctacttagaactcagaagcgaactgaggcgtgaacgcggagcggaaagtcggcttggcggcagcggaacacctggcacatccggtactctgagttcccttggcggactggacccagattctcccattactagccaccttggacagccttctcctaaacaacagccattagaacccggagaggctgcccttcactctgacagccaggatggccatcagatggcgttgctgaattttttttttcccgatgaaaaaccttacagcgaagaggaatcccgcagagttcggcgcaacaaacggtccaaatccaacgagggggcagacgggcctgtgaaaaacaaaaagaagggcaagaaggcgggaccgccaggcccaaacgggcctcctggaccacctggaccgccagggcctcagggaccacccggaatccctggaatcccaggaatcccaggaaccacggttatgggcccccctggcccccctggtccccccggcccacagggtcccccagggctgcaagggccgagcggagccgcagataaggccgggacacgagagaaccagcccgcagttgttcatctgcagggacagggaagcgctatccaagtgaaaaatgatctgagcggcggtgttcttaacgattggagccgcatcaccatgaatcctaaagtgttcaaactgcatccccggagtggtgagctggaggttctagtcgacggcacatattttatctatagtcaagtatactatattaactttaccgatttcgcttcctacgaagtagtagtcgatgagaaaccttttttgcagtgcacccggtctattgaaactggaaaaacaaattataacacctgctatactgccggtgtctgcttgctcaaagcaaggcagaagatagcagttaagatggtgcatgctgatatatccatcaacatgagtaaacacacaaccttttttggtgcaatcaggcttggagaagcccccgcttct

SEQ ID NO: 10716 - DNA, 1167 bp, synthetic construct
  misc_feature 1..1167: note = source = /note="Description of Artificial Sequence: Synthetic coding sequence"
  source 1..1167: mol_type = other DNA
atgggataccccgaggtcgagcgccgggagctgctccctgccgcagccccgcgggaacgcggttcgcaaggttgtgggtgcggcggcgcgccggcacgcgccggagaaggaaactcgtgtctgctcttcttgggattcttcggcctctcgcttgcgctccatctgttgactctgtgttgctacttggagctccggagcgagctcagaagagagcgcggagctgaatcccggctgggaggctcaggaaccccaggaacttccgggactttgtcgagcttgggcggactggaccctgactcgccaatcacctcgcatctgggacagccgagcccaaaacagcaaccgctggagcctggagaggccgcgctccactcagactcgcaagatggacaccagatggccctgctgaacttcttctttccagacgagaagccgtactcggaggaggaatcgagaagagtccgccgcaacaagagatcaaagtcaaatgaaggcgcggatggcccagtgaagaataagaagaagggcaaaaaagccgggccgccgggcccgaatggtccaccgggcccacctgggccaccgggaccccagggtcccccaggaatcccgggaatccctggcatcccaggcacgactgtcatgggcccaccaggaccgccgggacccccgggaccgcaagggccgcccggcttgcaaggaccatcaggcgccgcagacaaggcggggacccgggaaaaccaaccagcagttgttcacctccagggacagggttccgccattcaagtcaagaacgacctgtcaggtggtgtgctgaacgactggtcgcgcataaccatgaacccgaaggtgttcaaactgcatccgcgctcgggagaattggaggtgctcgtggatggaacttactttatctatagccaggtgtactacatcaatttcacggacttcgcttcgtacgaggtggtcgtggacgagaagccttttctccagtgcactagatccatcgagactggcaagactaactacaatacctgttacactgctggggtgtgccttcttaaagcgcgccagaagatcgcggtgaaaatggtgcacgccgacatctcaatcaacatgtccaagcataccactttctttggagcaatccgactcggagaagcacctgcatcg

SEQ ID NO: 10717 - DNA, 1167 bp, synthetic construct
  misc_feature 1..1167: note = source = /note="Description of Artificial Sequence: Synthetic coding sequence"
  source 1..1167: mol_type = other DNA
atgggttatcctgaggttgagagaagggagctcttgccagccgctgcaccaagagagagaggctcgcaggggtgcggctgcggtggcgcccctgcccgcgccggggaaggaaactcgtgcctgctgtttctgggtttctttggcctgtcattagccctgcacctcctaacactgtgttgctatctagaattgaggtcagagctgcggcgcgagcggggagctgagtcccgtctcgggggatccggcacccccggcacatccggaactctctcttctctcggcggtctggatcccgactcccctatcacaagtcacctggggcagccctctccaaaacagcaaccactcgagcccggcgaggctgctctgcattccgactcacaggatggacaccaaatggctctgctgaattttttttttcctgacgagaagccatattcagaggaggagtcccggagagtgcgtcgcaataagcgtagtaaaagtaacgagggagcagatggcccagtgaagaacaaaaaaaaggggaaaaaggctggtcctccgggtccaaatgggcctccgggcccccctggcccacccggtccccaaggcccccctggcatccctggaattcctgggattccggggactaccgtcatgggtccaccaggcccgcccgggcccccgggaccccagggccccccgggcctgcagggccccagtggggctgcagacaaagccggcacgcgcgagaatcagcctgccgtggtgcatctgcagggtcagggctccgcaattcaggtaaaaaacgacctctccggtggggttctcaacgattggtctcggattactatgaatccaaaagtcttcaaattacatccaagatctggggagttagaagtgctcgtcgatggtacctatttcatatactctcaggtgtattatatcaatttcacagattttgcttcttacgaagtggtggtggatgaaaagccttttctgcaatgtacccggtcaatcgagacgggaaagactaactacaacacatgttatacagccggcgtctgtctactaaaggccagacagaagatagctgtgaaaatggtacacgctgacataagtattaatatgtctaagcacactacctttttcggggccatcagactgggggaagcacccgcctcc

SEQ ID NO: 10718 - DNA, 1167 bp, synthetic construct
  misc_feature 1..1167: note = source = /note="Description of Artificial Sequence: Synthetic coding sequence"
  source 1..1167: mol_type = other DNA
atgggctaccctgaagttgaaaggcgggagctgctccctgccgcggcgcctagggagcgcgggagccagggatgtggctgcggcggcgcccctgccagagccggcgaggggaacagttgcctgctatttctcgggtttttcgggctcagtcttgccttgcacctccttacactttgctgctatctggagctgcggagtgaactgcggagggaaagaggggccgaatcccgcctgggcgggtctggcacaccggggaccagcgggaccctttcctctctcggcggtctggatcccgattctcccattacaagtcaccttgggcaaccgtctccaaagcaacaacctctggagccgggcgaagctgctctgcactccgattctcaggacggtcatcagatggcactattgaatttctttttccccgacgagaaaccttatagcgaagaggagagcaggcgagttcgtcgcaataagaggtccaaatccaatgagggagctgacggacccgtcaagaacaagaaaaaagggaaaaaggcaggtccccccgggcccaacggcccgcccggccctcctggtccccccggccctcaaggccctcccggaattcctgggatacccggaattccgggaacaaccgtcatgggcccccctgggcccccagggcctcctggccctcaaggcccacccggcctccagggacccagcggcgcagctgacaaagccggcacccgggagaatcaaccggctgttgtgcatctgcagggccaaggcagcgctatccaagtaaagaatgatctttccggcggcgtcctgaatgattggagtcggatcaccatgaatccaaaggtcttcaagctccatcctcggagcggggaactcgaagtgttggtcgatggaacttatttcatttacagtcaggtctactacataaattttacagattttgccagctacgaagtggtggtggacgaaaagcccttcctgcagtgcacccgcagtatagagaccgggaaaactaactacaacacatgctacacagctggggtttgcttgctgaaagcaaggcagaagatcgccgtcaaaatggtacacgccgacatttccattaacatgtcaaaacacacaacttttttcggggctatccggctgggtgaagctcctgcaagc

SEQ ID NO: 10719 - DNA, 1167 bp, synthetic construct
  misc_feature 1..1167: note = source = /note="Description of Artificial Sequence: Synthetic coding sequence"
  source 1..1167: mol_type = other DNA
atgggatatccagaggttgaaagaagagaacttttgccggcggctgctccacgagagcggggttcgcaaggatgcggctgtggtggagcgccagcacgggctggggaaggaaattcttgtttgctgttccttggattctttggactctccttagccctacatctgttaaccctttgttgctacttggagctccgtagtgagttacgtagggagcgtggagctgagagccggcttggaggttccggaacaccaggaacttctggcacgctatcctccctgggaggtttagatccagattcacctattacatctcatcttggacaaccatcaccaaagcaacaaccgttggagccaggagaggctgcactgcactcggattcacaagatggtcaccagatggctcttctcaatttcttttttcccgacgaaaaaccatattccgaggaggaatctcggcgggtcagacgtaataaacgctcgaagtctaacgagggggccgatggtcctgtgaaaaataaaaagaagggcaagaaagctggacctccaggtccgaatggaccaccaggaccaccaggtccaccaggaccgcagggacctccgggaataccaggtattccaggaattccggggacaaccgttatgggacctccaggaccacctggtccacctggaccacaaggaccacccggcttgcaaggaccgtcgggtgctgctgacaaagcaggaacacgtgaaaaccagcctgccgtggtccatttacaagggcaaggttcagcaattcaagtcaaaaacgacctttcaggcggtgtcttaaatgattggtccaggattacaatgaatcctaaagtgttcaagttgcacccaagatctggtgaacttgaagttctcgtggacggaacgtattttatctattcacaagtctattatattaactttacagattttgcaagttatgaagttgtggtagacgaaaagccctttcttcaatgtacacgcagtattgagacaggaaaaactaattataacacatgttacacagctggggtctgtctacttaaagcacgacagaagattgctgttaagatggtacacgcagatatctctatcaacatgagtaagcacactacattcttcggcgctattcgtctcggagaagctccagcttct

SEQ ID NO: 10720 - DNA, 1167 bp, synthetic construct
  misc_feature 1..1167: note = source = /note="Description of Artificial Sequence: Synthetic coding sequence"
  source 1..1167: mol_type = other DNA
atggggtacccggaagtcgaaagacgggaattgctcccggctgctgctccccgggagcgtggaagccaggggtgtggttgcggcggggctcccgctcgagctggggaaggaaactcctgtctgctgtttttaggcttttttggactcagcctggccctgcacctgctaaccctttgctgctatctggagctccggagcgagctgcgacgggagcggggagcggagagcaggctgggcggcagtggcacgcctggcacctcaggcacactctctagcctcggtggactcgaccctgactcacctatcactagccatcttggccagccttccccaaagcagcaacccctggagccaggagaagctgcgttacactccgacagccaagatggacatcagatggccttgctaaattttttcttccccgacgagaagccctactctgaggaggagtcccggcgcgtgaggcggaacaaaaggtcgaagtcaaatgaaggtgccgatgggcccgtcaaaaataagaagaaaggcaaaaaggctggtccccctggcccaaatggaccccctggaccacccgggccccctggcccccaagggcctccaggaattcctgggatccctgggataccagggacaaccgtgatgggccctcccggccctccagggcctccaggtcctcagggccctcccggattacagggaccctccggcgcagcggataaagccgggaccagggagaaccagccagccgtcgtccatctccaaggacagggctccgcaatacaggtgaagaacgatcttagtggcggggttctaaacgactggagcagaatcaccatgaaccctaaggtatttaagctccaccctaggagcggggagctggaggttcttgtggacggcacgtatttcatatattcacaggtctactacattaattttacagactttgccagttacgaagtggttgtggacgaaaaaccctttctccagtgcactcgaagtattgaaaccgggaaaacaaactataacacgtgctacacggccggcgtctgtctgctgaaagcccggcagaagatcgcagtcaaaatggtgcatgcggacatctcaatcaacatgtccaagcacacaactttctttggtgccataagactcggcgaggcaccggcatct

SEQ ID NO: 10721 - DNA, 1167 bp, synthetic construct
  misc_feature 1..1167: note = source = /note="Description of Artificial Sequence: Synthetic coding sequence"
  source 1..1167: mol_type = other DNA
atgggatatccagaagtggaaagacgcgagcttcttccagccgcagcaccaagagaacgaggctcgcaaggttgtggatgcgggggagcacctgcccgtgcaggtgaaggaaattcgtgtctgttgtttctcgggttctttggactttcactcgcgctccacctcctgaccctgtgctgttacctcgaacttagatcagaactgagacgggagagaggtgcagagagtagactcggcgggtcgggtactcctggaacttcaggtaccctcagctccttgggtggtcttgaccccgactcgccaattacttcgcatttgggccaaccttcacccaagcaacaacctctggaaccaggagaggctgccctgcattcggattcccaagacgggcaccagatggcactcctgaactttttctttcctgacgaaaagccctactccgaagaggagtcccgtagagtgcgaagaaacaagagatcgaagtctaatgaaggtgcggacggacctgtgaagaataagaaaaaaggtaagaaggcaggtcctcccggcccaaacggtcctccaggccccccagggccccctggtccccagggcccacctgggatacctggtatacctggaatcccaggtaccaccgtgatgggccctccaggaccgccggggcctccaggtccacagggtccccctggattgcagggtccttccggagcagcagacaaagccggcaccagggaaaaccagccagcagtggtgcatcttcaaggtcagggctcggccattcaagtcaagaatgatctgtcgggtggagtgctcaacgattggagcagaattaccatgaaccctaaggtgttcaaactgcatcctcgctcgggtgagttggaagttcttgtggatgggacttacttcatctactcccaagtgtactacatcaactttactgactttgccagctacgaagtcgtggtggatgaaaagccttttctccaatgtacgcgttcgatagagactggtaagactaattacaatacttgttacaccgcaggagtgtgcctgctgaaggcacggcaaaagattgcagtgaagatggtgcatgcagatatatccattaacatgtccaagcacactacgtttttcggggcgattagacttggcgaagcgccagcatcc

SEQ ID NO: 10722 - DNA, 1167 bp, synthetic construct
  misc_feature 1..1167: note = source = /note="Description of Artificial Sequence: Synthetic coding sequence"
  source 1..1167: mol_type = other DNA
atgggatatcctgaggttgagaggcgggagctactccctgcagccgcacccagggaaaggggaagccagggctgcgggtgcggtggcgcccccgcgcgcgctggggagggtaacagttgcctgctgttcctcgggttcttcgggctatcactggcactccatcttctcaccttgtgttgttacctcgaactgcgcagtgagctccgaagggagaggggcgctgaatctaggctgggagggagcggcacccctgggacttccgggacactgtcttcactaggtgggctcgacccagactccccaattaccagccatttgggtcagccgtcccccaaacagcagcccctcgagccaggagaagccgcgctgcattctgacagccaggacggccaccaaatggcccttctgaattttttcttccctgatgagaaaccgtactccgaggaagagtccagacgggtccgacgcaataaacggtctaagagcaacgagggcgcagacggccccgtaaagaataagaagaagggaaaaaaagcaggccctccagggccgaatggcccccctggtcccccaggccctccagggcctcaggggcctccaggcatccccggaattccaggaattcccggcaccacggtgatggggcctcctgggccacctgggccgccaggacctcaaggcccacccggcctgcagggtcctagtggggcagctgacaaagctggaacccgagaaaaccagccggcagttgtgcatctacagggacagggtagcgctattcaggtaaagaacgatctgagtggaggagttcttaacgattggtcccgaattaccatgaatcctaaggtgttcaaactacatccgcgctcaggcgaattagaagtgttggtggacggaacttacttcatatattcgcaggtctattatattaattttaccgatttcgccagttacgaagtggttgtggacgagaagccttttctccagtgtacaaggtcaatcgagaccggcaagaccaactacaatacttgctatacggctggggtgtgtctgttaaaagcccgtcagaagatcgctgtcaagatggtccatgcagacatatctatcaacatgtctaagcataccacttttttcggggccattcggctcggagaggctccggccagc

SEQ ID NO: 10723 - DNA, 1167 bp, synthetic construct
  misc_feature 1..1167: note = source = /note="Description of Artificial Sequence: Synthetic coding sequence"
  source 1..1167: mol_type = other DNA
atggggtacccagaagtggagaggagggaactgttacccgccgcggccccgcgcgaaagaggctcacaaggttgcggttgtggaggggcgcccgcccgcgccggggagggcaattcatgtctcctctttctggggttctttgggttgtctttggcccttcatttactcacattatgctgttatctggaattgaggagcgagctgagaagagaaaggggagcagagagtagacttgggggctccggaacccctgggacttctggtacattgtcgtccctcggaggattagatcccgattcccctatcacatcccacctgggacagccttcccccaaacaacagcctctcgagccgggcgaagcagctctgcacagtgatagccaagatgggcatcagatggccctcttgaatttcttcttcccagacgaaaagccatatagcgaagaggaaagccggcgagtgagacgcaacaaacgcagcaaatctaatgagggcgcggacggacccgtcaagaacaaaaagaaagggaagaaggcggggcctcctggcccaaatggcccccctggtcctccgggtcccccagggcctcagggaccacccggcattccaggcattcccggaataccaggaactaccgttatgggacccccaggccctcctggacccccgggcccacaggggcctccaggcctccagggtccatcgggcgctgccgataaggcaggaaccagagagaatcagcccgccgtggtacacctgcaaggacaggggtcagctattcaagttaaaaacgacctcagtggtggtgtgctgaacgattggtcaagaattaccatgaatcccaaagtttttaaactgcacccccggtccggtgagcttgaggtgctggtggatgggacctacttcatctacagccaggtgtactatataaacttcacagactttgcctcatatgaggttgtggtggatgagaagcctttcttgcaatgtacacggtcaatcgagactggtaagactaattataacacttgctataccgccggggtgtgcctcttaaaagcgaggcagaagattgccgtgaagatggttcacgccgatatctcgatcaacatgtcgaagcacactactttttttggggcaataaggttaggagaagctcccgcttcc

SEQ ID NO: 10724 - DNA, 1167 bp, synthetic construct
  misc_feature 1..1167: note = source = /note="Description of Artificial Sequence: Synthetic coding sequence"
  source 1..1167: mol_type = other DNA
atgggatatcccgaggttgagcggagagaactgctccctgctgccgcaccccgggagcggggatcccaaggctgcggatgcggcggggcaccggcacgagcaggcgaagggaactcctgtctcttatttctggggttcttcgggctttcgttggccctgcatctgttgacgctatgctgttaccttgagctgagatccgaactgagacgggaacggggtgccgaaagcaggctgggcggctccgggacaccaggcacgtctggcactctttcaagtttgggcggcctggaccctgattcacccataacaagccatttaggccagccttctcccaaacagcaaccacttgagccaggcgaggcggctctccacagcgatagtcaggacgggcaccagatggccctcctaaacttcttctttccggacgaaaaaccgtactccgaggaagaatcacgaagggtgaggaggaacaagcggagtaagtcaaatgagggtgccgacggcccggttaaaaacaagaaaaaaggtaagaaagccggtcccccaggccctaacggacctccagggccccctggacctccgggccctcagggcccgccagggatacccgggatccctgggattcctggcacaactgttatgggtcctcccggtccccccggtccgcctggaccgcagggaccccccggcctacaaggcccctcgggcgcagccgacaaggctggaaccagagagaatcagcccgccgtcgtgcacttgcagggacagggatctgcgattcaagtgaaaaatgacctaagcgggggagttctcaatgactggtcacgcatcacaatgaatcccaaagtgtttaagttgcatcctaggtccggcgaactcgaggtgctggtggatgggacatattttatatactctcaggtgtactacattaacttcactgactttgcatcatacgaggtggtcgtagatgaaaagccctttttgcagtgcacccggtcgattgaaactggtaagacaaattataacacctgttacactgctggcgtgtgcttactgaaagctagacagaaaatcgccgttaagatggtgcacgctgatatctcgatcaatatgagcaaacataccaccttttttggggcaatccgactgggcgaggcacccgcatcc

SEQ ID NO: 10725 - DNA, 1167 bp, synthetic construct
  misc_feature 1..1167: note = source = /note="Description of Artificial Sequence: Synthetic coding sequence"
  source 1..1167: mol_type = other DNA
atgggttaccctgaagtcgaacgcagggagctcctgcctgctgccgccccgagagagagaggctcccagggatgcggctgcggcggagcccctgcccgcgccggagaaggcaacagctgtctgctgtttctggggttctttgggctgtcgctggcgctgcatctgttgaccctgtgctgttacctcgagctcaggagcgaactgcggcgggagcgcggagccgaatcgagattgggcggctcgggcactccagggaccagcggaaccctgagttcgctggggggtctggacccggactcaccgatcacctcgcacttgggacagccgtcccccaagcaacaaccactggagccaggggaagccgcacttcattcggactctcaggatggacatcagatggctcttctcaatttcttcttcccagatgaaaagccgtacagcgaagaagaaagcagacgggtgcggagaaacaagcggtccaagtcaaacgagggagctgacggacccgtcaagaataagaagaagggaaagaaggcgggaccacccggaccgaacggccctcctggaccacctggaccgccgggaccacagggcccaccggggatcccaggaatccctgggatcccgggtaccactgtgatgggaccccccgggccacctggcccgcctggacctcagggcccgccggggctccagggaccgtcgggagccgcggacaaggctggcacgcgcgaaaaccagcccgccgtggtccacctccaaggacagggatcagccatccaggtgaagaacgacctgagcggcggagtgctcaacgattggtcccgcataaccatgaacccaaaggtgtttaaactgcatcctcgctctggcgagttggaagtgctcgtcgatggaacttacttcatctactcgcaggtgtattacattaacttcaccgactttgcgtcgtacgaagttgtggtcgatgaaaagccatttcttcaatgcacccggtcgatcgaaaccggaaagacgaactacaatacctgctacactgccggagtttgcctgcttaaagcaagacagaagatcgccgtcaaaatggtgcatgccgacatcagcatcaacatgagcaagcatactaccttctttggagcgatccggctcggtgaagcccccgcctca

SEQ ID NO: 10726 - DNA, 1167 bp, synthetic construct
  misc_feature 1..1167: note = source = /note="Description of Artificial Sequence: Synthetic coding sequence"
  source 1..1167: mol_type = other DNA
atgggataccccgaagtggagagaagggagctgctgccagctgccgccccccgggagagaggatcccagggatgcgggtgcggaggagctccagcaagggccggagagggaaactcttgtctcctgttcctcggattcttcggactctcactggcactgcacctgctgaccctgtgttgttacctggaactccggtccgagctgaggcgggagaggggagctgagtccagactgggtggctccgggacgccgggaaccagtggcaccctttcttcactgggcggtttagatcctgactctccaattactagtcacctcggccaaccgagtccgaagcaacagcctctggagcctggggaagctgccctccactctgacagccaggatggccaccaaatggccctgctcaacttcttcttcccagacgagaagccttatagtgaggaggaaagtagacgggtgagacgaaataagcggagtaaatccaatgagggggctgatggtccagtgaagaacaagaagaagggcaagaaggccggtccaccgggcccaaatggtccacctggcccccccgggcctccaggccctcagggacctccagggattcccggaatcccgggaatccccggtacaacagtgatggggcctcctggccccccaggaccacctggacctcaggggccacccggattgcagggtccaagcggcgccgcagacaaggccggcacacgggaaaaccagccggcggtcgttcacttgcagggccagggtagtgccatccaagtgaagaacgacctctctggtggcgtgttaaatgattggagtcgcattactatgaatcccaaagtcttcaagctgcatccccggtcaggagagctggaggtgctggtcgacgggacatattttatatacagtcaggtgtactatatcaattttacagattttgccagctatgaggtggtggttgatgagaagcctttcctgcagtgcacgaggagcatcgaaacgggcaagactaactataatacttgctacacagcgggagtgtgccttctgaaggcgcggcaaaagattgccgtcaagatggtgcacgccgacatcagtatcaacatgagtaaacacactacctttttcggagccataagactcggggaggccccagcttct

SEQ ID NO: 10727 - DNA, 1167 bp, synthetic construct
  misc_feature 1..1167: note = source = /note="Description of Artificial Sequence: Synthetic coding sequence"
  source 1..1167: mol_type = other DNA
atgggctaccctgaggtcgagcggcgggaacttctcccagcggccgccccacgcgaacgcggctcccaaggctgcggctgcggcggcgccccagcacgcgccggcgagggtaattcgtgcctgctttttctgggattctttggactgtccctggcgctgcatctgctcaccctgtgttgttacctcgaactgagatcggagctcagacgagagcggggcgctgaaagcagattgggcggatcgggaaccccggggacttcggggactctgtcctcactcggaggacttgacccagattcacccatcaccagccatcttgggcagcctagccctaagcaacagccgttggagcccggggaggccgctctgcattcggattctcaagacggacaccagatggctctgctgaacttcttctttcccgatgaaaagccgtactcggaagaggaatccaggcgagtgcggcgcaacaaacgctccaagtccaacgaaggagccgacggacctgtcaagaataagaagaagggaaagaaggcaggaccgcctggtccaaacggtcctcctggtccacctggacccccgggaccccagggtccgccaggaataccggggattccgggaattcctggtaccaccgtgatgggaccaccaggaccgccgggtccaccaggaccacaaggcccgccgggactccaggggccatccggggcagccgataaagccggcacccgcgagaatcagccggcagtggtgcacctccaaggtcagggttccgcaattcaggtcaagaacgatctttcgggaggggtgctcaacgattggtcccgcatcaccatgaacccgaaggtgttcaaactccacccaagaagcggagaactcgaagtcctcgtggacggtacttacttcatctactcacaagtctactacatcaatttcaccgatttcgcgtcatacgaagtcgtcgtggacgaaaagccattcctgcagtgtactcggagcatcgaaaccggaaagaccaactataacacttgttacaccgcaggagtgtgcctgttgaaagcgaggcagaaaatcgcagtgaaaatggtgcacgcagacatctccatcaatatgagcaagcacaccacttttttcggagcaatccggctgggagaggcaccggcctcg

SEQ ID NO: 10728 - DNA, 1167 bp, synthetic construct
  misc_feature 1..1167: note = source = /note="Description of Artificial Sequence: Synthetic coding sequence"
  source 1..1167: mol_type = other DNA
atgggttacccggaagtggagagacgggaacttctgcctgccgccgctccccgcgagaggggatcccaaggctgcggctgtggtggagccccggcccgggcaggagaaggcaactcctgcctgctgttccttggcttcttcggactctcgctggctctgcacctgcttaccttgtgttgttacctggaactgagatccgagctgagacgcgaacggggcgccgaatccagactgggcggatccggaaccccgggcacctcgggaactttgtccagcctcggaggtctggaccccgattccccgatcacctcgcacctcggacagccctctccgaagcagcaaccactggaaccgggcgaggccgcactgcactccgattcgcaagacgggcaccaaatggctctgttgaatttctttttccccgacgaaaagccatactcggaagaggagtcgagaagagtgcgccgcaacaaacgctcgaagtctaatgaaggggcagacggaccggtcaagaacaagaagaaagggaagaaggctggacccccaggccctaacggacctcctggcccgccaggtcctccaggcccccaaggcccgccgggaatccctggcatccccggcattccgggtactaccgtcatgggccccccaggtccgcctggaccgccgggacctcagggtccccccggacttcagggcccgtcaggtgcggcggacaaagccggtaccagagagaatcaaccagcagtcgtgcacctccaaggtcagggatccgcgattcaggtgaaaaacgacctcagcggaggggtgctgaacgattggtcacggatcaccatgaacccgaaggtgttcaaactgcatccacgcagcggagagctggaggtgctggtggacggaacctactttatctactctcaggtgtactacatcaactttaccgatttcgcgtcgtatgaggtggtggtggatgagaagcctttcctccaatgtactcggtcgatcgaaactggaaaaacgaactataacacttgctacaccgcgggagtatgcctgctgaaggcccggcagaagatagccgtcaaaatggtccatgcggacatctcgatcaacatgagcaagcatacgactttctttggtgcgatccgcctgggggaagcgcccgccagc

SEQ ID NO: 10729 - DNA, 1167 bp, synthetic construct
  misc_feature 1..1167: note = source = /note="Description of Artificial Sequence: Synthetic coding sequence"
  source 1..1167: mol_type = other DNA
atggggtaccccgaggtcgagaggagggaattgttacctgctgcagctccaagagaacgtggtagccaaggatgtgggtgcggaggggccccagcaagagcaggagagggtaattcctgcctactttttcttggattttttggtctcagtttggctcttcatcttttgactctttgttgttatctagagcttcgaagcgagttgcgtagagaacgtggagcagagtcaaggctaggggggtccggtacccctgggacatctggtaccctcagttccttaggtggtttggatcccgatagtccaataacatctcatctaggacaaccttcgcctaaacaacagccactcgaacccggtgaagccgcacttcattcagattcgcaggatggtcatcaaatggctttgctcaacttcttcttccctgacgaaaagccctactccgaggaagaaagtcgtagagtcaggagaaacaagcgatctaagtccaatgaaggagctgatggcccagtgaagaataagaaaaaggggaaaaaggcgggtccacccggtccaaacggtcctcccgggccgccaggaccaccagggccacagggaccccctgggattcctggaattccgggaattccgggaactacagtgatgggtccaccgggtccgccgggccctccaggccctcaaggccctcccggtctccaggggccaagtggagccgcggataaagccggtacccgggaaaaccaaccggctgttgtccatttgcagggccagggttccgctattcaagtgaagaacgatttgagcggaggcgtccttaatgattggagtcgtatcaccatgaacccaaaggtgtttaagctccacccacgttccggggaactcgaagtattggtagatgggacatactttatatacagccaagtctactacattaacttcactgatttcgcatcttacgaagtggtggttgatgaaaagccatttcttcagtgcacaagaagcattgaaactggcaagacaaactataatacctgctacactgcaggtgtgtgtttactcaaagcccgacagaaaattgctgttaagatggtgcatgctgatatcagcattaacatgtcaaagcatactaccttctttggagctattcgtctcggagaggccccagcctca

SEQ ID NO: 10730 - DNA, 1167 bp, synthetic construct
  misc_feature 1..1167: note = source = /note="Description of Artificial Sequence: Synthetic coding sequence"
  source 1..1167: mol_type = other DNA
atggggtaccctgaagttgagcggcgcgaactgttacccgccgctgccccaagggagaggggatcacagggatgtggatgcggcggcgcaccagcgagagcaggcgaaggaaattcttgtctcctgtttttgggcttcttcgggctgagcctggcactgcatctgctcacactgtgctgctacttggagttaagaagcgagctgcgccgcgaacgcggtgccgaaagccgcctgggcggcagcggcacccctggcacctcaggaaccctgtctagtttgggaggcctcgatccagactcgcccatcacatctcacctcggtcaaccaagccctaagcagcagcccctcgaacctggcgaagccgctctacacagcgacagccaagatggtcaccagatggccctcctcaactttttttttccagacgaaaaaccttatagcgaggaggagagccgcagggtgagaaggaacaaaagatcaaagtcgaatgaaggtgctgatgggccagtgaaaaacaagaagaaaggaaagaaagccggaccacccgggccaaacggcccacctggcccccccggtccacctggcccacagggaccaccaggaatccctggaatccctggaattccagggaccactgtgatgggcccacccggcccgcctggccctccaggccctcaggggccaccgggactgcaaggtccaagcggtgccgccgataaagcaggaaccagagagaatcagccagcagtagtgcatctgcaaggccaagggtccgctatccaggtgaagaacgatctgtccggaggcgttctgaacgattggtctagaataaccatgaacccaaaagtgttcaaattacaccccaggagcggagagctggaagtgctggtcgatggtacgtactttatttactcccaggtctactacatcaacttcaccgattttgcatcctacgaggtggtcgtggatgagaaaccattcctgcagtgcacacgatctattgagaccggaaagaccaattacaacacttgctacacagccggcgtgtgtctcctcaaagctagacaaaaaatcgcagtgaagatggtccacgctgacatctccatcaatatgtcaaagcacacaaccttctttggcgctatccgtttaggtgaagcaccggcaagc

SEQ ID NO: 10731 - DNA, 1167 bp, synthetic construct
  misc_feature 1..1167: note = source = /note="Description of Artificial Sequence: Synthetic coding sequence"
  source 1..1167: mol_type = other DNA
atgggataccccgaggtggagcgcagagaactgttgcctgctgctgccccaagggaaaggggatcacaaggatgcgggtgtggtggtgcccccgctcgagctggggagggtaactcttgtctgctgtttctgggatttttcggactgagtctggcccttcacctgctcacactgtgctgttacctcgagctgcgttccgagttgcgaagggaaagaggcgctgagtcaaggctggggggctcaggtacgcccggcacctctgggactctatcttctctagggggactggatcccgactcacctatcaccagccacctaggtcagccctcccccaaacagcagccccttgaaccaggtgaggccgcactgcattcggactctcaagacgggcaccaaatggccctgctgaattttttttttccggacgaaaaaccttactcagaagaggaatcgaggagagttcggaggaacaagcgttcgaagtccaatgagggagccgacggtcccgtcaaaaacaagaagaagggcaaaaaggctggccctccaggcccaaacggcccgccaggacctccaggacctcctggaccccaggggccccccggaatccccggaatccctggcatccctgggacaacggtgatggggcctcccgggcctcccggacctccgggcccacagggccccccgggcctgcaagggccaagtggagccgctgacaaggccggcacccgggagaatcagccggccgttgtgcatctgcagggacaggggtcagcaattcaggtgaagaacgatctgtctgggggcgttctgaacgattggtcccggataacgatgaaccccaaggtcttcaaattgcatccccggtcgggtgaacttgaggtcctggtggacgggacctattttatctacagtcaggtatactatattaacttcacagacttcgctagttatgaggtcgtcgtggatgaaaagcccttccttcaatgcacgcggagcattgaaactggcaaaaccaattataatacatgctacaccgccggcgtgtgcttactgaaggctagacagaagatcgctgtgaagatggttcatgcagatatcagcatcaacatgagtaagcataccacattctttggtgcaatacgcctcggcgaggcccccgctagc

SEQ ID NO: 10732 - DNA, 1167 bp, synthetic construct
  misc_feature 1..1167: note = source = /note="Description of Artificial Sequence: Synthetic coding sequence"
  source 1..1167: mol_type = other DNA
atggggtacccagaggtcgaacggagggaactgcttcccgccgccgcaccccgagaacgggggtctcaggggtgtggatgtggaggggcccccgcgcgagcgggagaggggaattcttgtttactgttccttgggttctttgggctcagtcttgctctgcatctgctcacactctgttgctaccttgaactccgatctgaacttagacgcgagcgcggggccgaatctcggcttggagggtctggaacacctggaacatctgggacactgtctagtctcggagggctcgatcctgatagtccaataacatcccatcttgggcagccctcacctaaacagcagccactcgaaccaggggaggccgccctccattccgattcacaggatgggcaccagatggcattactcaactttttctttcctgacgaaaagccatattctgaagaagaatctcggcgcgtgcgaagaaataaaaggtctaaatctaacgagggagccgatgggcctgtgaaaaataaaaagaaagggaaaaaagccgggcctccagggccaaatggaccacctggaccccctggacccccaggaccccaggggcctcctgggatccctgggatccccgggatcccaggaactactgtaatgggacctcccgggcccccaggaccccctgggcctcagggaccaccagggctccaggggccctccggggccgccgataaagcaggaactcgagagaaccagcccgcagttgtacatctccaaggacagggatcagccatccaggtgaaaaacgatctctccgggggagtactcaacgattggagtcgcatcactatgaaccctaaagtttttaaactccatcctcgatctggagagctggaagtactggtggatggaacatatttcatatattcacaggtttattatataaattttacagattttgcttcttatgaagtagtggtcgacgaaaaaccatttctacagtgcacacgctctatcgagacagggaaaacaaactataatacatgctatacagcaggagtgtgtctcttgaaggctaggcagaagattgccgtcaaaatggttcatgctgatatcagtataaatatgagtaaacatactacattctttggggctatcagacttggggaagcacctgcatca

SEQ ID NO: 10733 - DNA, 1167 bp, synthetic construct
  misc_feature 1..1167: note = source = /note="Description of Artificial Sequence: Synthetic coding sequence"
  source 1..1167: mol_type = other DNA
atgggctatcctgaagtcgaacgccgcgaactgctgcccgcagctgccccacgcgagcggggcagccagggttgtggatgtggaggtgctcccgcaagagccggtgaaggcaacagctgcctgctgttcctgggatttttcggactgagccttgcactgcatcttctcactctgtgttgttacctcgagctgagatccgagctgaggagagagcgtggcgcagagtcacgcctgggaggatcaggaactcctggtacttcaggaactctctcctcccttggaggcttggacccagactcgcctattacgtcccatttggggcaaccatccccgaagcagcaacctctcgaacctggtgaggcagcacttcactcagattcccaagatggacaccaaatggcactgctgaacttcttttttcctgacgagaagccctactcagaagaggagtcgaggcgcgtccgacgtaataagagatccaagtcgaatgagggagcagacgggcctgtcaaaaacaaaaagaagggtaagaaggcaggaccaccggggcccaacgggccaccaggtcctccaggtcctcctggccctcaaggacctccgggcatacccggtattcccggcattcccggtaccaccgtcatgggtcctcccggacctcccggtccacccggtcctcagggaccacctggacttcagggcccctccggtgcagcagataaggcaggaaccagggaaaatcaaccagcagtggtgcatctccagggtcagggttcggcaatccaagtcaagaacgatctgtccggaggagtgctgaacgattggtcaagaataactatgaatcccaaggtgtttaaacttcatcctcgctccggggagctcgaggtacttgtcgacggtacctactttatctactcacaggtgtactacatcaactttactgattttgccagctacgaagtggtggtcgacgagaagccattcctgcagtgcactaggtccattgaaactggaaaaaccaattacaatacttgttacactgcgggggtgtgtctcttgaaggcacggcagaagatcgccgtgaaaatggtgcatgcagatatctcgatcaatatgtccaaacacaccaccttctttggagccatccggctcggggaagccccagctagc

SEQ ID NO: 10734 - DNA, 1167 bp, synthetic construct
  misc_feature 1..1167: note = source = /note="Description of Artificial Sequence: Synthetic coding sequence"
  source 1..1167: mol_type = other DNA
atgggataccctgaggtggagcgccgggaattgctgccggctgccgcccctagggagaggggttcacagggatgcggttgtggtggcgccccggcccgcgccggagagggcaatagctgcctcctgttcctgggcttcttcggactctctcttgctctgcaccttctgacactctgttgctacctggagctgcgctctgaattgcggagggagagaggggctgagtcacggctggggggctccggaactccaggaacaagtggtacactgagttccctcggcgggctcgatcctgactcacctatcacaagtcatctcggacagccgtcccctaagcagcagcctcttgaacctggggaggcggcgttgcactccgactctcaggacggccatcagatggctctgctcaacttttttttccccgatgagaagccatatagcgaggaggagtctcggcgggtgcggaggaacaagagatccaagtctaacgagggcgcagatggtccagtgaaaaacaaaaaaaagggtaagaaggcaggcccaccaggccctaatggtccccctgggcctcctggcccccccgggcctcaaggtccccccgggattcccggcatcccaggcatccctggcactacggtaatgggaccgcctgggccccctggcccgccggggccacaaggtccacccgggcttcagggcccctcaggggctgctgacaaggccggcaccagggaaaatcaacccgctgtggtccacctgcaaggtcagggcagtgcgatccaggtgaagaacgatttgtccggaggggtgctgaacgattggtccaggattaccatgaatcccaaagtgtttaagctccacccacggtccggagagctcgaagtgcttgtggatgggacctatttcatctattcccaggtgtactatatcaacttcactgactttgcgagctacgaggtggtcgtggacgaaaagccgttcctgcagtgtaccagatcaattgaaacaggaaaaactaattacaacacctgttacacagcaggcgtgtgcctgctgaaagcccggcagaagatcgcggtgaagatggtgcacgccgatatcagcattaatatgtctaagcatacaacttttttcggcgccatccgactgggcgaagcaccagcctct

SEQ ID NO: 10735 - DNA, 1167 bp, synthetic construct
  misc_feature 1..1167: note = source = /note="Description of Artificial Sequence: Synthetic coding sequence"
  source 1..1167: mol_type = other DNA
atgggttaccctgaggtagaaaggagagagcttctacccgctgccgcgcctagagagcggggctcacaaggttgcggttgcgggggggctcctgcgcgggcaggagaggggaatagctgcctactgttccttggcttcttcggtttgtcactcgccctgcacctgcttacgctctgctgttatttggaattacggagtgaactaagacgggagagaggagctgagtctcgcttggggggatcaggaacccccggcactagtggtaccttgtctagcctgggtggcctggatcctgactctcctatcacatcccatttaggtcaaccatccccaaagcagcagcccctagaacccggcgaggcggcgctgcatagtgactcccaagacggccatcaaatggccctcctgaatttctttttccccgatgagaagccatactccgaggaagagagccggcgggtgcgtcgcaacaagagaagtaaatcaaatgagggcgcagatggacctgtcaagaataaaaagaaaggtaaaaaggctggcccaccgggccccaatggtccacccggaccacccggaccccctggaccacaggggccccccggtatccccgggatccccggcatacctggcacgaccgtcatgggcccccccggacccccgggaccaccaggtccgcagggtccccccgggctacaggggcccagcggggccgctgataaggccggaaccagagaaaaccaacctgcagttgttcacctccaaggccagggaagcgcaattcaagttaaaaatgacctgtcgggtggggtgctgaatgactggtcccggatcaccatgaacccgaaagtgttcaagcttcatccgcggagcggcgagctggaagttctcgtggatggcacttattttatttattcccaggtttactacatcaatttcaccgacttcgcctcctatgaggttgtggttgacgaaaagccattccttcagtgcacgaggagcatcgagactgggaagaccaactataatacatgttatactgctggcgtatgtctcctgaaggctcggcaaaaaatcgccgtcaagatggtccatgccgatataagtattaatatgtctaaacacacaacatttttcggagctatcagactcggagaggctccagcttcc

SEQ ID NO: 10736 - DNA, 1167 bp, synthetic construct
  misc_feature 1..1167: note = source = /note="Description of Artificial Sequence: Synthetic coding sequence"
  source 1..1167: mol_type = other DNA
atgggatatcccgaagtggagcgtagggaactgctacctgctgctgccccaagggaacgcggctcacaggggtgcggctgcggcggtgccccggcacgggcgggggaggggaactcttgtctcttgtttttaggctttttcggcctgagtttggccctacacctgttgacgctatgctgctacctcgaacttcgcagtgagctgcggcgtgagcggggtgccgaaagtagactcggtgggagtggaacaccaggtacctctggaacacttagttccttgggggggctggaccctgacagcccaatcacatcccatctgggccagccctcaccaaaacagcagcccctggaacctggcgaggcagccttgcactcagacagccaggacgggcatcagatggcgctactcaacttttttttcccagacgagaagccatattccgaggaagagagtaggcgcgtccgcagaaacaaacgttccaaatctaatgaaggtgcagatggtcctgtcaaaaacaaaaaaaaggggaaaaaggcaggccctcccggccccaatggtccccccgggccccctgggcctcctggacctcaggggcctccaggtatccccggaattccaggcattcctgggaccaccgtaatggggccaccaggacctcctggaccgccgggccctcagggacctcctggcctacagggcccttccggggcagctgacaaggctggcacgcgggagaatcagcctgctgtagttcaccttcagggacaagggtccgccatccaggtcaagaatgacctgtccggaggagtgctcaacgactggtcccgcattaccatgaatcccaaggtcttcaaacttcacccacggtcgggggagttggaggtgttggttgacgggacctacttcatttattcccaggtttactacatcaacttcactgattttgcttcatacgaggtcgtcgttgacgaaaagccatttttgcagtgtactagaagcattgagactggcaagaccaattataatacctgctacacagccggtgtttgcctgctgaaagctagacaaaaaattgccgttaagatggtgcatgcggatatctccatcaatatgagtaaacatactacattttttggagccatcagactcggggaggcccccgctagc

SEQ ID NO: 10737 - DNA, 1167 bp, synthetic construct
  misc_feature 1..1167: note = source = /note="Description of Artificial Sequence: Synthetic coding sequence"
  source 1..1167: mol_type = other DNA
atggggtaccccgaggtagagagacgggagctcttgccagcggccgcccctagggagagaggtagccagggctgtggctgcggcggcgcccctgcacgggccggagaaggcaactcctgcctcctgttcctcggattttttggactgtctctcgcccttcatctgctgactctgtgctgttacttggaactcagaagcgagctgcggcgcgagaggggcgcagaaagccggcttggcggcagcggcactccaggaacctccgggacattgtcctcactcggtggattggatcctgactctccgattacctctcaccttggtcagccgtctccaaagcagcagccgctggagccgggtgaggccgctctgcactccgatagccaagacggacatcaaatggccttgctgaacttttttttccccgacgaaaagccatactccgaggaggaaagccgccgagtgcggcggaataaacggagtaaatccaacgaaggcgcggatgggccagttaaaaacaagaagaagggtaagaaggctggaccaccggggccgaacggacctcccggacctcccggccccccaggccctcaaggcccacccggcatcccaggtatccccggcatcccaggaacgacggtgatgggccctcccggcccacctgggccacctggacctcagggaccccccggactgcagggtcccagcggagccgctgataaggcaggtacgcgcgaaaatcagccagctgtggtccacctccagggacaaggcagtgccatccaagtcaaaaacgacctcagcggtggggtattgaatgactggagtcggataaccatgaatcctaaggtctttaaactgcatccacgcagcggcgaactggaagtgctggttgacggtacttactttatttattcccaggtgtactacattaattttacggactttgcctcatatgaagtggtcgtggatgagaaacccttcttgcagtgtactcgcagtattgagaccggaaaaacaaattataatacctgctacaccgccggcgtgtgtctgcttaaggccagacagaagatcgcagttaaaatggtgcatgctgacattagcattaacatgagtaaacacactaccttctttggtgccataagactgggtgaagcccctgcttcc

SEQ ID NO: 10738 - DNA, 1167 bp, synthetic construct
  misc_feature 1..1167: note = source = /note="Description of Artificial Sequence: Synthetic coding sequence"
  source 1..1167: mol_type = other DNA
atggggtatcctgaggttgagagaagggaattgctgcctgctgcagctccccgggaaagaggcagtcaggggtgtggctgtggtggggccccagcccgcgctggggaagggaacagctgccttttgttcctcggcttctttggcctgtctctcgctctccacctgctgaccctgtgctgctacttggaactaaggagcgagctgcggagggagcgcggtgccgagagtcggctcggaggttccggaacgccaggcacctccgggactctgtcctcactgggagggttggatcccgactcgcccatcacaagccatctgggccagccctcgcccaaacagcagcctctagagccaggcgaagctgccctacactcagattctcaggacggccaccagatggcattattgaacttcttcttccctgacgagaaaccctactctgaggaggagagcaggagagtgagacgtaataaaagatccaagtccaatgagggggctgacggcccagtaaagaataagaagaaaggcaaaaaggctggcccacccggcccaaatggccccccaggtccacccgggcctcctggaccacagggccctcctggcatccccgggatcccgggcattcccgggaccactgtcatgggacctccaggtcctcccgggcccccgggcccgcagggcccccctggactgcagggtccaagcggagcagccgacaaggccggaaccagggagaatcagcctgctgtggttcatctgcaagggcaagggtctgccatacaggtgaaaaatgacctgagcgggggcgtgttgaacgattggtcacgcatcacaatgaatcctaaggtgtttaagctgcatcctaggagtggagaactcgaagtattggtcgacggtacttactttatttacagccaggtgtactatattaattttaccgattttgcaagttacgaggttgtcgttgatgagaaacctttcctccagtgtacccgttctattgaaacgggaaagaccaactacaacacatgttacaccgctggagtgtgtctgctgaaggcacgacagaagattgctgttaaaatggttcacgctgatatctcaataaatatgtccaagcacactacttttttcggagcgattagactaggagaggctcctgcatct

SEQ ID NO: 10739 - DNA, 1167 bp, synthetic construct
  misc_feature 1..1167: note = source = /note="Description of Artificial Sequence: Synthetic coding sequence"
  source 1..1167: mol_type = other DNA
atgggttatcctgaggtcgaaagacgagagcttctgccagcagcagctccacgggagcgcgggtctcagggttgcggctgtggcggggcaccagccagggccggagaaggcaatagctgcctgctctttctgggctttttcgggctctcactggcactgcacctgctgacactgtgttgctacctggagctccgaagcgagttaaggcgtgagaggggtgccgagtctcgactgggggggtctgggactccaggaaccagcggtaccctgagtagcctaggggggctggaccccgattcccctataacatctcatttaggacagccctctcctaaacagcagccactggagcccggggaggctgccctgcactcagacagtcaagacggccatcagatggctctactgaatttcttctttcccgacgagaagccttactccgaagaggagagccggcgcgttcggcgtaacaagagaagtaagagcaacgagggagctgatggcccagttaaaaataagaagaaggggaagaaagccgggccaccaggtcctaacggaccacctggcccaccagggcctccgggcccgcaaggaccacccggaattccaggtattccagggatccccgggaccacagttatgggccctccaggccctcccggccctccaggacctcagggcccccccggcctgcaaggcccatccggtgcagccgacaaagccggcacaagggagaaccagccagcagttgtgcatctgcagggacagggcagtgctatacaagtgaaaaacgatctgagtgggggcgttctgaatgactggagcagaatcaccatgaaccccaaggtgttcaagctgcacccaaggtctggcgagcttgaggttctggtagacggaacctacttcatctactcccaggtctactatataaacttcactgattttgcttcttacgaggtagtggtggacgagaagccttttctccagtgtactcgaagcattgaaaccgggaagaccaattacaatacctgctatacagctggggtgtgcctgctgaaagctcgccaaaagattgccgtgaaaatggtgcacgccgatatctctattaatatgtccaaacacacaacattctttggcgccatacgattgggcgaggctcccgccagt

SEQ ID NO: 10740 - DNA, 1167 bp, synthetic construct
  misc_feature 1..1167: note = source = /note="Description of Artificial Sequence: Synthetic coding sequence"
  source 1..1167: mol_type = other DNA
atgggatatccagaagtggagagacgggaactgctgccggcggctgcaccaagagagagaggctcccaaggatgtgggtgcggcggtgcaccagcaagagcaggagaaggtaatagctgccttctttttcttggattctttggtctttcgcttgcactccatctccttactctgtgttgttacttggaacttcgctcagagcttcgcagagaacggggggcagaatcccggctgggtggatccggtactcccgggacctctggaaccctgagctcgctgggcggactcgatcccgattccccaattacctcccaccttggtcaaccgtcccctaagcaacagccacttgaacctggagaagcagccctgcactccgactcgcaagatgggcaccagatggcgctgttgaacttcttttttcctgacgaaaaaccatactccgaagaagaatcccgaagggtccgtcggaataagcggtcaaagtcaaacgaaggagcagatggaccggtgaagaataagaagaaaggcaagaaagcgggaccacctggaccaaatgggcctcccgggcctcctggtcccccaggaccacaaggaccccccggtatccctggaatcccaggcatcccgggaaccaccgtgatgggaccaccaggaccacccggacctcctgggccacagggtccacctggcctccaaggaccaagtggggccgcagataaggcaggtactcgcgaaaaccaacctgcggtggtgcatctgcaaggacagggttcggcgattcaggtgaagaatgacctttcgggcggagtgttgaacgattggagcaggatcaccatgaatccaaaggtctttaagctgcatccccgctccggagaacttgaggtgctggtggatggtacttacttcatttactcgcaagtttactacattaactttaccgactttgcatcttacgaagtggtggtggacgaaaaaccctttctccagtgcactagatcaatcgaaactggtaagaccaactacaatacttgttacactgctggtgtgtgccttctgaaggccagacagaagatagcagtgaagatggtgcatgcggatatcagcatcaatatgtccaagcataccacgtttttcggagcaattaggctgggagaagcacctgcaagc

SEQ ID NO: 10741 - DNA, 1167 bp, synthetic construct
  misc_feature 1..1167: note = source = /note="Description of Artificial Sequence: Synthetic coding sequence"
  source 1..1167: mol_type = other DNA
atgggttaccctgaggtagagagacgcgaactcctgcccgccgctgccccaagagaacgcggctcccaaggttgtggttgtggtggagcccctgctagagccggtgaaggcaactcctgtctgctgtttttgggattcttcggtctgtcccttgcactgcaccttctgaccctctgctgttatttggagctccgcagtgagctcaggcgtgagcgtggcgccgagagtaggcttggaggcagcggtacacctggtacatccggaaccctctcaagtttgggaggtctggacccagacagtcctattacctctcacttgggccagccttctcccaaacaacaaccactcgagccaggcgaggccgctctccattcagatagccaggacggccaccaaatggctctcctcaacttcttcttcccagacgagaagccatattctgaagaggagtcccgtcgtgtaaggcgcaacaagagaagcaaatctaatgaaggtgctgatggccccgtgaaaaacaaaaaaaagggtaagaaggcaggaccccccggtcccaacggaccacccggccctcccggccctcccggacctcagggaccacccggcatccctggcatcccaggcatcccaggaaccacagttatgggacctccaggcccccctggtcctccaggtccacaaggcccacccggcttgcaaggtccttcaggtgctgccgacaaagccggcacacgcgaaaatcagccagccgtggtgcacctccagggccaaggctccgctatccaggttaaaaacgatctctccggcggtgtgctgaatgattggtctaggatcacaatgaacccaaaggttttcaagctccaccctcgttcaggtgaacttgaggttctcgtcgacggcacctatttcatctattctcaggtgtactacattaacttcaccgatttcgcctcatacgaagtggttgtagatgaaaagcctttccttcaatgtacccgcagtatcgaaactggcaagactaactacaatacctgttacactgccggcgtttgcttgctgaaggccagacagaagatcgccgtcaagatggtccacgccgatatttccatcaacatgtccaaacatacaaccttcttcggcgccataaggttgggagaagctcctgctagc

SEQ ID NO: 10742 - DNA, 1167 bp, synthetic construct
  misc_feature 1..1167: note = source = /note="Description of Artificial Sequence: Synthetic coding sequence"
  source 1..1167: mol_type = other DNA
atgggatacccagaggtggaaagacgcgagctcctgcccgcagccgccccgagggaaagggggtcacaaggctgtggctgtggaggtgcccctgcgagagcaggagaaggaaacagctgcctgctgtttctggggttcttcggactgagcttggccctccacctgttgaccctgtgctgttacctcgaactcaggtctgagcttaggagggaaagaggagccgaatctcgcctgggcgggagcgggacaccaggtacctcagggactcttagctcactgggcggccttgaccccgacagtcccatcacaagccacttgggccagcccagccccaaacagcaacccctggaaccaggcgaggccgccctgcactccgattcacaggacggccatcaaatggctctcctgaacttttttttccctgatgagaagccttatagcgaggaggagtcaaggcgcgttcgcagaaacaagcgatccaagagcaacgagggagcggacggccctgttaagaataagaaaaagggaaaaaaggccgggccccccggccccaacggtcctcctggacccccaggacctcccggcccacagggccctcctggaatacctggcattcctggcatacctgggacaaccgtgatgggcccaccgggccccccagggcctcccggacctcagggccctcccggtctgcaagggcccagcggagctgctgacaaagccgggactcgagaaaaccagcccgctgtggtgcatctgcagggccagggcagtgctatccaggtgaagaatgaccttagtggcggtgtactgaacgattggagcaggattaccatgaatcccaaagtttttaaactgcacccacggtccggagagctcgaagtgttggtggacgggacttattttatctacagtcaagtctactacataaacttcaccgatttcgcttcctacgaagtggtcgtcgatgaaaagcctttcctgcagtgtacgagatctatcgagacaggcaaaacgaattataatacatgctataccgccggcgtatgcctgctgaaagctcgacagaaaattgcagtgaagatggtgcacgctgacatctctataaatatgagcaagcatacaacattctttggggccattaggctgggagaagcgcccgcctca

SEQ ID NO: 10743 - DNA, 1167 bp, synthetic construct
  misc_feature 1..1167: note = source = /note="Description of Artificial Sequence: Synthetic coding sequence"
  source 1..1167: mol_type = other DNA
atgggatacccggaagtggaacgcagagagttgctgccggccgcggctccgcgggagagaggaagccaaggatgcggatgcgggggtgcgccggcccgagcaggcgagggaaactcctgcctgctcttcttgggatttttcggactcagcttggcgctccacctccttactctgtgctgctacctggagctgagaagcgaactgcggcgcgaacgcggcgctgagtcgcggcttggtggatccggaacgccgggaacctccggaaccctgtcgtccctcggaggcctcgatccggactcacctatcacctcgcacctgggacagccttccccgaagcagcagccgctggaaccgggagaggcagccttgcattctgactcacaagacggccaccagatggctctgctgaatttctttttcccggatgaaaagccctactccgaagaggaatcacgccgcgtccgtagaaacaaacgcagcaaaagtaatgaaggagccgatggaccggtcaaaaacaagaagaagggcaaaaaggcgggccctccaggaccaaacggcccgccaggacctccgggcccaccagggccgcagggacctccagggatcccgggcattccgggaatcccaggtactaccgtgatgggcccccctggtccccccgggccgcccgggcctcaagggccacccgggctgcaaggaccatcgggggccgccgacaaggctggcactcgggagaaccagccagcagtggtccacctgcaaggccagggtagcgcaatccaggtcaagaatgacctctcgggaggagttctgaacgactggtcacgcattacgatgaacccgaaggtgttcaaactgcaccctaggtccggtgaacttgaagtgctcgtggacggcacctacttcatttacagccaggtgtactatatcaactttactgactttgcctcgtacgaagtggtcgtggatgagaaacctttcctgcaatgcaccaggtccatcgaaactggaaagactaattacaatacctgttacactgccggtgtgtgtctgctcaaggcccggcagaagatcgccgtaaagatggtgcatgcagatatctcgatcaacatgtcaaagcataccaccttcttcggggctatccggctcggagaggcgccagcgtcg

SEQ ID NO: 10744 - DNA, 1167 bp, synthetic construct
  misc_feature 1..1167: note = source = /note="Description of Artificial Sequence: Synthetic coding sequence"
  source 1..1167: mol_type = other DNA
atgggctatcctgaggtcgagagaagagagctcctgccggcagcagctccgcgggaaagaggaagtcaaggttgcgggtgcgggggcgccccagcaagagcgggcgaaggtaactcttgtctcctttttctcggttttttcggattatcactcgccctccacctgcttacgttatgctgctatctcgaattgcgatccgaactaaggagagaaaggggcgccgagtctaggctgggaggttccgggacccccggcacttccggcactctgagttcgctgggtggcctcgatccggactcccctattacttcccatctcggccaaccatctcccaaacaacagcccctggaacctggggaggccgcattgcattccgactctcaggacgggcatcaaatggccctactgaatttttttttccccgatgagaaaccatactctgaagaggagtcacggcgtgtacgtcggaacaagagaagtaagagcaatgagggcgcggacgggccagtgaaaaacaagaagaaggggaagaaagccgggccgcctggaccaaatggaccccccggccctccaggaccccccggaccccaaggcccccctgggatccccgggattccagggatacctggcacaacggtgatgggaccacctggccccccggggccacccggaccacaagggccccccggcttgcagggaccctctggggcagcagataaggcaggaactagggagaatcaacccgccgtagttcatctccagggccaggggagcgccatccaggttaagaatgatctctccggcggggtcctgaatgactggagtaggatcacgatgaacccaaaggtctttaagctgcaccctcgctcaggcgaattggaggtgctagtcgatggtacatatttcatttacagtcaggtgtactacattaatttcacagacttcgcctcatacgaagttgtcgttgacgagaagccattcctccagtgcacaagatcaatcgaaaccgggaaaacaaattataatacgtgctataccgctggcgtctgcctccttaaggcgagacagaagatcgccgtgaagatggtgcatgcagacatttctatcaatatgtccaagcatactacgttctttggcgcaattcggctgggcgaggctcctgcatcc

SEQ ID NO: 10745 - DNA, 1167 bp, synthetic construct
  misc_feature 1..1167: note = source = /note="Description of Artificial Sequence: Synthetic coding sequence"
  source 1..1167: mol_type = other DNA
atgggctatccagaggtcgagcgcagagagctcttgcctgctgcggctccaagagagagaggatctcaaggctgcggatgcggtggtgcccccgcgcgggctggcgagggcaacagctgcctgctttttttaggcttcttcgggctgtcactggcgctgcatctgctaaccctgtgttgctatctcgagctgcggagtgagcttcgaagagagaggggcgctgaatcaagacttggtgggtccgggaccccaggaacgtccgggacgcttagtagtctgggcggcctggacccagactctcctataacttctcatctcgggcagccatcacccaagcagcagcctctagaaccgggcgaggccgccctgcattcagactctcaggatggacaccagatggctctgctaaatttctttttcccagacgagaaaccgtattcagaagaagagagccgccgggtccgcaggaataagaggagcaagagcaacgagggagcagatggcccagtaaagaataagaagaagggcaaaaaggccggtcccccgggaccaaacggacctccagggccccctggaccccctggaccccagggcccccccgggattccaggaatacctgggattccaggtactactgtgatgggcccgccaggacctcccggacctcctggtcctcaaggaccacctggccttcagggtcctagcggagctgctgataaggctggcacaagagaaaaccagcctgccgtggttcatctgcaggggcagggtagtgctatccaagttaaaaacgacttgtctggcggggtgctgaatgactggagtcgcataactatgaacccaaaggtcttcaagctgcatccgcgatctggggaacttgaggtactggttgacgggacctacttcatttatagccaggtatattacatcaattttaccgattttgcgtcatacgaggtggtcgtagacgaaaaaccatttctgcaatgtactaggagcatcgagaccggtaaaactaattataacacttgctacactgctggagtgtgcctgctgaaggcacggcagaagatcgccgtcaaaatggtgcacgctgacattagtattaatatgtccaaacacacaacatttttcggggcaatccgactgggcgaggctccagcctcc

SEQ ID NO: 10746 - DNA, 1167 bp, synthetic construct
  misc_feature 1..1167: note = source = /note="Description of Artificial Sequence: Synthetic coding sequence"
  source 1..1167: mol_type = other DNA
atggggtatcccgaggttgaacgtcgtgaactgcttccggccgccgcgccccgagagagaggatctcagggctgtggctgtggaggcgcacctgcgagagccggtgagggcaattcctgcttgttgtttctgggcttcttcggcctttctctcgctctgcacctgctgactctctgttgctatttggagctgaggagcgaactcaggcgtgagagaggcgccgagagccgactgggagggagcggaactccagggacatccggcacactctcgtccctcggcggcctggaccccgacagccccatcacatcacatctgggtcagccctcccccaaacagcagccattggagccaggcgaggccgccctgcactcagactcccaggatggccaccagatggcgctactgaactttttttttccggacgagaagccatattccgaggaagagagtcgacgtgtgcgacgcaacaaacggagcaaatcaaacgaaggcgctgatggcccagtcaaaaacaagaagaagggcaagaaagcaggtcctcccggacctaacggcccacccggaccccccgggcctccaggcccccaaggtccccccggcattcccggaatacctgggattccagggaccacagtgatgggccctccggggccccccgggccacctggacctcaaggcccacctggcctccaggggccatctggcgctgccgataaagctgggactcgagagaaccagcccgcggtggtacatctccagggtcagggaagcgccatccaggtcaaaaatgatctctccggcggcgtccttaacgattggtcacgaattaccatgaacccaaaagtgttcaagctgcatccccgttccggcgaattagaagtcttggtggacggcacctactttatctacagtcaggtgtattatatcaatttcacggattttgcttcctacgaagtcgtagtagatgaaaaacccttcttgcagtgtactagatcaatagagactggaaagactaattataacacttgctatacggccggcgtgtgtctccttaaagctagacagaagatcgccgtaaagatggtgcatgccgatatctcaatcaacatgagcaagcacacaaccttcttcggtgcgataagattgggggaggcccccgccagt

SEQ ID NO: 10747 - DNA, 1167 bp, synthetic construct
  misc_feature 1..1167: note = source = /note="Description of Artificial Sequence: Synthetic coding sequence"
  source 1..1167: mol_type = other DNA
atgggataccccgaggtagagcgaagggaacttctgcctgccgccgctccaagagagagaggctcacagggttgtgggtgcgggggcgcgcccgctagggccggagaaggtaattcatgcttactgtttcttgggttctttggcctgagtctcgccctgcacctccttacactctgctgttatctggagctgcggtctgaactccgtcgtgaacggggtgcggagtctcggctaggaggcagtggcacacctgggacttccgggacactttcttcccttggcgggttagaccctgattcgcctatcaccagccacctggggcagccttcgcctaaacaacagcctctggaaccaggagaggccgcccttcattccgacagtcaggatggccatcagatggccctgctcaacttctttttccccgatgagaagccatactctgaagaggaaagccggcgtgtgagacgtaataaaaggtctaaaagcaacgaaggagctgacggcccagtaaagaacaaaaaaaaagggaagaaagccggaccaccgggtccgaacgggcccccagggcctccagggccaccagggcctcagggtccccccgggatcccggggattcccggaattccaggaaccacggtaatggggcccccaggtccacctgggcctcccggtccacagggcccacctggcctccagggaccttcaggagctgccgacaaagctggcaccagggagaatcagcccgcggtggtgcacctgcagggacagggctcagctatccaggtaaaaaacgatctgagcggcggggtgctgaacgattggtctcgcattactatgaaccccaaagtcttcaagctgcaccctcgctctggggaattagaggtgcttgttgatggaacctacttcatctatagtcaggtgtattatatcaactttacagattttgcttcatatgaagtagtggtagacgaaaagccattcttgcagtgtactcgtagtattgagacagggaagaccaactataacacatgttatactgctggagtctgcttgcttaaggccaggcagaaaattgccgtcaagatggtgcacgccgacatctccatcaacatgtcgaagcataccacctttttcggtgctattagactcggggaggcccccgcatca

SEQ ID NO: 10748 - DNA, 1167 bp, synthetic construct
  misc_feature 1..1167: note = source = /note="Description of Artificial Sequence: Synthetic coding sequence"
  source 1..1167: mol_type = other DNA
atgggctacccagaggtagagagaagagagcttctcccggctgctgcaccgcgtgagagaggatcacaaggatgcggttgtggaggagcccctgcacgtgctggagaaggtaactcgtgccttctttttctgggttttttcggcctttcgctggcactgcatctcctgaccttgtgttgttacctcgaacttcgttccgagcttcgcagggaacgtggtgcagagtcccgcctcggaggatcgggcactcccggaacttcaggaaccctttcatccctgggtggactcgatccagattcaccgattaccagtcatctgggccagccttcgcccaaacagcaaccgctggagcctggtgaggccgcgcttcatagcgatagccaagacggtcatcaaatggcacttcttaacttctttttccccgatgagaaaccatatagcgaagaagagtccagaagagtacgtcggaacaagcgtagcaagagcaacgaaggcgcagacggaccagtgaagaataagaagaagggtaaaaaggcagggccccctggaccgaacggtccgcctggaccccccggcccgccaggaccacaagggccgcccggcattccggggataccaggtatccctggtactactgtgatggggcctccaggtcctccagggcctcctggcccgcaaggacccccagggctgcaggggccttcgggagccgcggacaaggcggggactcgggaaaaccaacctgccgtggtgcatctccaaggacagggatcggcaattcaggtcaaaaatgatctgtcgggcggagttttgaatgactggtcacgaatcactatgaatccaaaggtgttcaaacttcacccacggtccggagaacttgaagtcctggtcgacggaacctactttatctacagccaggtctactacattaactttaccgattttgcttcctacgaagtggttgtcgatgaaaagccatttctccaatgcaccaggtctatagaaaccggcaagaccaattacaacacctgttacaccgcaggtgtgtgtctgttgaaggcacgccagaagattgcagtcaaaatggtgcatgcagatatttcgatcaacatgagcaaacacacgacttttttcggcgcaattagacttggagaagccccagcgtca

SEQ ID NO: 10749 - DNA, 1167 bp, synthetic construct
  misc_feature 1..1167: note = source = /note="Description of Artificial Sequence: Synthetic coding sequence"
  source 1..1167: mol_type = other DNA
atgggttacccggaagtcgaacgtagagagctgctgcccgctgccgcgccacgcgaacgaggtagccagggatgtggatgtggcggagcacctgcccgcgctggcgagggaaatagctgccttctctttcttggattcttcggactttccctggcactgcatctgctgactctctgttgttacctcgagcttaggtctgaactccgcagagagcggggagctgagtcgaggctcggtggctccggaacgcctggaactagcggaactctgtctagtctcggaggtctggaccccgattccccaatcactagccatctgggccaaccatcgcccaaacaacaaccactggaacccggtgaggcagcacttcattcggattcgcaggatgggcatcaaatggctctgctcaatttctttttccctgatgaaaagccttactccgaagaggaaagtcgtagagtgcgccgtaataagaggagcaaatccaacgagggtgcagacggacctgtcaaaaacaagaaaaagggtaagaaggcagggccaccaggtcctaacggccctccgggacctccagggccacccggacctcagggacccccagggatacccggtattcccggaattccaggaactactgtcatgggccccccagggccccctggacccccgggtccacaaggtccaccaggccttcagggaccttccggcgcagcggacaaggccggaactagggaaaaccagcccgcagttgtgcacctgcagggacagggttcagcaatacaagtcaaaaacgatctttcgggcggcgtgctgaacgactggtcacgcatcaccatgaacccaaaagtgttcaaattgcaccccaggtccggtgaactggaggtcttggtggatggaacctatttcatatacagccaagtgtactacatcaatttcaccgattttgcgagctacgaagtggtggtggatgagaagccctttcttcagtgtaccagatcaatcgaaaccggaaagaccaactacaatacctgctacactgctggagtgtgccttctgaaagctagacagaagatcgccgtgaagatggttcacgccgatatttcaatcaatatgtcgaagcatactaccttttttggggccattaggcttggagaggcacctgcgtcg

SEQ ID NO: 10750 - DNA, 1167 bp, synthetic construct
  misc_feature 1..1167: note = source = /note="Description of Artificial Sequence: Synthetic coding sequence"
  source 1..1167: mol_type = other DNA
atgggctatcctgaggtagaaagacgcgaacttctcccggcagcggctccgcgtgagaggggaagccagggatgcggatgcggcggggcaccggcaagagcgggcgagggtaactcgtgccttttgtttctggggttttttggtctcagccttgctcttcatcttctaacattgtgctgttatttggaattgcggtcagagcttcgaagagaacgtggagcggaatcgcgtcttggcggatctggtacaccgggtactagcggtaccctatccagcttaggaggtttggatccagactctccaattacttctcatttgggacaaccatcaccaaaacagcaaccgttagaacccggggaagcagcactgcattcggatagccaagatgggcaccagatggcattattgaacttttttttccccgacgagaaaccatattccgaagaggaatcacgcagggtgcgccgtaacaaacgttccaaaagtaacgaaggagcggatggaccggtcaaaaataaaaagaaaggcaaaaaagccggccctccaggacccaatggaccgccaggtccaccaggaccccccggcccgcagggcccaccaggcatccctggcattccgggtatccctgggacaacagtcatgggtccgccgggccctcccggaccaccaggtcctcaggggccgccaggtttacagggaccttcaggtgcggctgataaagcaggcacaagagaaaaccagccagccgtcgtgcaccttcagggccaaggaagcgcaatacaagttaaaaacgatctttcaggtggcgttttgaatgattggagtaggataacaatgaaccccaaagtctttaagcttcatccgcgcagtggagagcttgaagtgctggtggatggcacctactttatttactctcaagtctattatatcaactttaccgattttgctagctatgaagtagtcgtagatgagaagccttttttgcaatgcacccgatccattgagacgggaaaaaccaattacaatacttgctatacggctggcgtttgcctgctgaaggcccgccaaaaaattgccgtgaaaatggtacatgctgatattagcatcaatatgtctaaacatacgaccttttttggcgcaatcagattaggtgaagcgcctgcatct

SEQ ID NO: 10751 - DNA, 1167 bp, synthetic construct; identical to SEQ ID NO: 10720
  misc_feature 1..1167: note = source = /note="Description of Artificial Sequence: Synthetic coding sequence"
  source 1..1167: mol_type = other DNA

SEQ ID NO: 10752 - DNA, 1167 bp, synthetic construct
  misc_feature 1..1167: note = source = /note="Description of Artificial Sequence: Synthetic coding sequence"
  source 1..1167: mol_type = other DNA
atgggttacccggaggtggaaagacgcgagctgcttccggctgccgcacctcgggaacgtggatcccaaggatgcggttgtggaggcgcccccgcacgcgctggagaaggcaattcatgcctcctcttcctgggtttctttggcctgagcctcgccctgcacctgttgaccctgtgctgctacctggaattgcggtcggagctcaggcgggagaggggagcggagtcaagactgggaggaagcgggaccccaggaacctcgggaaccctgagcagcctgggaggtctggacccagattcgcctattacctcgcatctgggacagccgtctccgaagcaacaacctctggaaccgggagaagccgcccttcatagcgactcccaggacggtcatcagatggcactcctcaatttctttttcccagatgagaagccttacagcgaagaggaatcaagacgggtgcggcgcaacaaacgcagcaagtcgaatgagggagccgatgggccggtgaagaacaagaagaaggggaagaaggccgggccacctgggccgaatggaccacctggacctcctggaccgccaggaccgcagggaccacccggcatcccgggtattccgggcattcctggaaccacggtgatgggacctccgggcccgccgggcccccctggcccgcaagggccacctggactccagggaccatccggtgccgctgacaaagctgggacccgcgagaatcagccggcagtggtgcacctccagggccagggatcggccattcaagtgaagaatgacctgagcggaggcgtgttgaatgattggagcagaatcaccatgaacccgaaggtctttaaactccatccacggtcaggagaacttgaagtcctggtggacggaacttactttatctactcccaggtctactacatcaactttactgacttcgcgtcatacgaggtggtggtggatgaaaagcctttcctgcagtgcacccggagcattgaaacgggaaagactaactacaacacgtgttacactgcgggagtgtgcctgctgaaggcacggcaaaaaatcgcggtgaagatggttcacgccgacatctccatcaacatgtccaagcataccactttcttcggggccattaggctcggggaagcgcccgcgtca

SEQ ID NO: 10753 - DNA, 1167 bp, synthetic construct
  misc_feature 1..1167: note = source = /note="Description of Artificial Sequence: Synthetic coding sequence"
  source 1..1167: mol_type = other DNA
atgggctacccggaagtagaacgccgagagctccttcccgctgccgccccacgtgagaggggttcccaaggttgtgggtgcgggggcgcaccagccagggccggagagggaaatagctgtctcctgtttctcggtttttttggtctgagtctggcccttcacctgctcaccctctgttgctacctcgaactgcggtctgaacttaggagggaacgaggcgcggagtctcggctcgggggatctggcacgcctggcacaagtgggactctgagttcactaggcggactcgaccccgatagtcctatcactagccatctcggtcagccatctcccaaacagcagccacttgaaccaggtgaagcggctttgcacagcgatagccaagacgggcaccagatggctttgctgaatttttttttccccgacgagaagccttactctgaggaagaatcacgtagagtgagaaggaacaagcgtagcaagagtaacgaaggggcagacggcccagtcaagaataagaagaaagggaagaaagccgggccgcccggccccaacggtcccccgggaccccctggccctccaggccctcaagggccgcctgggataccagggatcccaggcattcccgggaccactgttatgggccctcccggcccccccggcccccctggtccacaaggcccacctggacttcagggccctagcggagcggctgacaaagcaggtacccgggagaatcagccggccgtcgtgcacttgcaggggcagggaagtgcgatccaggtgaaaaatgatctgagcggtggcgttctgaacgattggtccagaataactatgaacccaaaggtgtttaaactgcacccccgatccggagaactggaagtcttggtggatggcacctactttatttactcccaggtctactacataaacttcactgatttcgcttcctatgaggtagtggtggacgaaaagccttttctgcaatgcacacgatccatagagaccggaaaaacaaactataacacatgctacacagccggcgtttgcctactgaaggctcggcaaaagattgccgtgaagatggtccacgcagatattagcatcaacatgtccaagcatacaactttttttggtgccataagactcggggaggctcccgcctcc

SEQ ID NO: 10754 - DNA, 1167 bp, synthetic construct
  misc_feature 1..1167: note = source = /note="Description of Artificial Sequence: Synthetic coding sequence"
  source 1..1167: mol_type = other DNA
atgggttaccctgaggtggaaagaagggagctgctgcctgctgctgctcctagagagcgcggcagccaaggatgtgggtgcggtggagcccccgctcgagctggtgaggggaacagttgccttcttttcttgggcttctttggactatcccttgcacttcatctgttaactctgtgctgctatctagagttgcggagcgagctccgacgggagagaggcgccgagagtaggcttggagggtctggcacaccggggacatccggtaccctgtcttctctaggaggcctcgatccagactcacccatcacttcacacctgggccagccatccccaaagcagcaaccactggagcccggtgaagctgccttgcacagtgacagccaggacgggcaccagatggcactgttgaactttttcttccccgacgagaaaccttactcggaggaggagtcccgccgggtccgccgcaataagaggtctaagtccaatgagggagcagatggtccagtgaaaaataaaaagaaaggtaaaaaagcgggcccacctgggcctaacggtcctccgggaccacccggcccacccggaccacagggtccccccggcatccccggtattcccggaattccagggaccacagtcatggggccccctggtccccccggacctccaggccctcagggtcccccgggtcttcagggcccttccggtgctgccgataaagcgggaacacgcgagaaccagccggcggtggtccatctacaaggccagggcagcgcgatccaggtcaagaacgatctcagcggaggtgtgctaaacgactggtccagaattactatgaatcccaaggtgttcaagttgcacccacgctcaggcgagctcgaggtcctggtggacgggacctacttcatatattcccaggtttattacatcaacttcacggactttgcatcctacgaggtggtcgtagatgagaagccttttctgcagtgcaccagaagcatcgaaacagggaaaacaaattacaatacctgctacaccgcgggagtctgcctacttaaggcccgacagaaaattgctgtaaagatggtccatgctgatataagcatcaatatgagcaaacacacaaccttttttggagctatccggctaggagaagcccccgcttca

SEQ ID NO: 10755 - DNA, 1167 bp, synthetic construct
  misc_feature 1..1167: note = source = /note="Description of Artificial Sequence: Synthetic coding sequence"
  source 1..1167: mol_type = other DNA
atgggatacccggaggtcgagcgacgcgagctgttgccggccgcggctccgcgggaaagggggtcgcagggatgtggatgcggaggagccccggcccgcgcgggggaaggaaattcctgtctcctgttcctgggatttttcggactgtcactggccttgcacttgttgactctgtgctgctacctggagctgcgtagcgaacttcggcgggaaagaggagctgagagccggctcggaggctcaggcactccgggaacctcgggaactttgtcgtccttgggtggactggatcccgactccccgatcaccagccatttgggtcagccctcccctaagcagcagccgctcgagccgggagaggccgccctccatagcgactcacaagatggccatcagatggcacttctgaacttcttctttccggacgagaagccgtactcagaggaagaatcgaggagagtgcgccggaacaaacggtcgaagtcgaacgaaggagcggatggaccggtcaagaataagaagaaaggaaagaaagctggcccgcccggtccgaatggacctcccggcccacccgggccaccgggcccgcagggcccgccaggcatcccaggaatccctggaatcccgggaactaccgtgatggggccaccagggccccccggacccccgggtccacagggacctccaggcctccagggcccctcgggggccgcagacaaggcaggcacgagagaaaatcaaccagcagtggtgcacttgcagggacaaggatccgccatccaggtcaagaatgatctgagcggaggcgtgctgaacgactggtcgcgcatcactatgaatccaaaggtctttaagctccacccacgctcgggcgaattggaagtcctggtcgacggtacctacttcatctattcgcaggtctactacattaacttcactgattttgcgtcatacgaggtggtggtggacgaaaagccatttctgcagtgtacccgctccatcgaaaccggaaagactaattacaacacctgctacaccgcaggcgtgtgcctcctgaaggcccgccagaagatcgcagtgaagatggttcacgctgacatcagcatcaacatgtccaaacataccactttctttggggccatccgtctgggggaggcccctgcatcc

SEQ ID NO: 10756 - DNA, 1167 bp, synthetic construct
  misc_feature 1..1167: note = source = /note="Description of Artificial Sequence: Synthetic coding sequence"
  source 1..1167: mol_type = other DNA
atgggttacccggaagtagagcgccgcgaactgctgcctgctgccgcgccgcgcgagcggggtagtcagggttgtggttgtggaggcgctccggctcgggctggcgaaggaaacagttgcttgttgttcttgggctttttcggtttgtccctggcactgcacctgttgaccctgtgctgctacttggagctgcgcagcgagctgcgccgtgagcgcggtgccgagagccgcctcggcggctccggtaccccaggcaccagcggcacgctgtctagcctcggtggactggacccagacagcccgattacctctcacttgggacagccgagccctaagcaacagccgctagagccaggagaagctgcccttcattctgactcacaagacggccaccagatggctctgctaaactttttcttccccgacgaaaaaccatactccgaggaagagagccggcgcgtccgtcgtaacaaacgctctaagtctaatgagggcgccgatggccctgtgaagaataaaaaaaaaggcaaaaaagcgggtcctccaggtccaaatgggccaccaggtccacctggcccccctggtccgcaaggtccgccagggatcccgggaattcctggcattcctggcacgactgtgatgggtccaccgggacctccggggccgcctggccctcaggggcccccgggactgcagggtccatcgggagcggccgacaaggcgggcacacgcgaaaaccagccggccgtcgtccatctgcaagggcaggggtcggctattcaggtaaaaaacgacctgagtggtggagtcctgaacgactggtctcgcattaccatgaatccgaaagttttcaaactgcacccacggagcggcgagctagaggtcttggtagacggtacctatttcatctatagccaggtgtattacataaatttcaccgatttcgctagctatgaggttgtcgtggatgaaaaaccgttcctgcaatgtacgcgcagcatcgagaccgggaaaacaaactataatacctgctataccgccggcgtgtgtttactgaaggcgcgccagaagatcgcagttaaaatggtgcatgccgacatctcgattaatatgagcaaacacacgacgtttttcggcgccattcgcctgggtgaagctccggctagc

SEQ ID NO: 10757 - DNA, 1167 bp, synthetic construct
  misc_feature 1..1167: note = source = /note="Description of Artificial Sequence: Synthetic coding sequence"
  source 1..1167: mol_type = other DNA
atgggctaccctgaagtggaaaggagagagctgcttcctgctgccgccccgcgtgaacgcggcagccaaggttgtggatgcggaggtgcacctgccagggcaggagaaggtaactcatgcctccttttcctgggtttctttgggctgtcgctcgcgctgcatcttctgactctgtgttgttacctcgaactgcggtccgaactgagacgtgagaggggagccgaatcccggttgggagggagcggaactccaggcacttcgggcaccctgtcctcactgggaggactcgacccagactccccaattacctcccatctcgggcaaccttccccaaaacagcaaccacttgagcctggggaagcagccctgcattcggattcgcaggatggacatcaaatggcactccttaacttctttttcccagatgagaagccctactccgaggaagaaagcagacgtgtgagacgcaacaaaagaagcaagtcgaacgaaggtgctgatggcccagtcaagaacaagaaaaaaggtaagaaggccggacctcccggcccaaacggcccaccgggccccccagggccaccagggccacaaggtccaccaggaatcccaggaatccccggaataccaggcaccacggtaatgggaccacctggccctcctgggccccctggtccgcagggcccacctggtttgcagggtccaagcggagccgccgataaggcagggactagggaaaatcaaccggctgtggtgcacctccagggacagggtagcgcaatacaggtcaagaacgacctctcagggggagtgcttaacgattggtcccgtatcactatgaatcccaaggtgttcaagctgcatcctcggtccggcgagcttgaagtccttgttgatggtacctactttatctactcgcaagtgtactacattaactttactgattttgcctcatacgaggtggtcgtcgatgagaagcctttcctgcaatgtactcggtcaattgaaactggcaaaactaactacaacacctgttacactgcgggggtgtgcctgcttaaggcacgccaaaagattgcagtcaagatggtgcacgccgatatctccatcaatatgtccaagcataccacgttctttggtgcaattcgtcttggagaggcccctgcttct

SEQ ID NO: 10758 - DNA, 1167 bp, synthetic construct
  misc_feature 1..1167: note = source = /note="Description of Artificial Sequence: Synthetic coding sequence"
  source 1..1167: mol_type = other DNA
atgggttaccctgaggtggagcggcgagagctgcttccggcggctgcacctcgcgagcgcggatcgcaaggatgtggatgtgggggagccccggcccgcgcaggcgagggaaatagctgtctcctttttctcggattcttcggactgtcgctggccctgcatctgctgaccctgtgttgttatttggagttgagatcagagctcaggagggagcgcggggcagaatccaggttgggaggtagcggaaccccggggacttccggaaccctgtcgtcgctgggaggactggacccagattcgccgatcacctcgcacctgggacagccaagcccgaaacagcagcccctcgaaccgggcgaagccgcactgcatagcgacagccaggatggacaccagatggccctgttgaatttcttcttcccggacgaaaaaccgtacagcgaagaagagtcgcgccgggtgcggcggaataagaggtccaaaagcaacgaaggggcggatggaccggtcaaaaacaagaagaagggaaagaaggccggcccacctggtcctaacggtccgccgggaccgccgggcccacccggtccacaaggacccccaggaatcccaggcattccgggaatccctggaactaccgtgatgggcccgccagggccaccagggcccccgggaccccagggaccaccagggcttcaggggccgtcgggcgcggccgataaggcaggaaccagagagaatcagcccgcagtggtgcatctgcaagggcaaggaagcgccatccaagtgaagaacgatttgagcggcggagtgctgaatgactggagcaggatcacgatgaaccctaaagtgttcaagctgcacccgcggtctggcgaactggaggtgctggtggatggcacttacttcatctactcgcaggtctactacatcaacttcaccgacttcgcgtcatatgaagttgtggttgacgaaaagccgtttctgcagtgtacccgctcgattgaaaccggtaagaccaactacaatacttgctacactgccggtgtgtgcctgctcaaggcgcgccagaaaatcgcagtcaagatggtccacgccgatatcagcattaacatgtcaaaacacactactttcttcggagccatacgcctgggagaagcgccagcctcc

SEQ ID NO: 10759 - DNA, 1167 bp, synthetic construct
  misc_feature 1..1167: note = source = /note="Description of Artificial Sequence: Synthetic coding sequence"
  source 1..1167: mol_type = other DNA
atgggttacccggaagttgaaagaagggagctgctccccgcggccgctcctagggagcggggcagtcagggttgcgggtgcggaggtgcacctgcccgcgccggagagggtaactcttgccttctgttcctgggtttcttcggcctctctctcgcgttgcacctacttacgctgtgttgttaccttgaactcagaagcgaacttagacgagaacggggcgccgagagtaggctgggcgggagcggcaccccagggacgagtggaacgctctcgtctctggggggcctggaccctgacagccctataacaagccacttagggcagccctctcccaagcagcagcccttagagcccggcgaagctgcattacactcagactcccaagacggtcaccagatggccctgcttaatttcttctttcccgacgaaaaaccttatagcgaagaagaatcacggcgagtgcggagaaacaaacgatctaaaagtaacgaaggtgctgatggaccggtgaagaataagaagaaaggcaaaaaggcagggcccccgggcccgaatgggcctccaggcccccccggacctccaggaccccaaggccccccaggcatccctggcatacctggcattcctggcacaactgttatgggaccacccgggccgcctggaccaccagggccacagggtccccctggtctgcaggggccgagcggcgccgctgataaagctggcactagggagaaccaacccgccgtcgtgcacctgcaggggcagggctctgcgatccaggtgaagaacgatctgtccggcggagtactgaatgattggtctcgcatcactatgaacccaaaagtcttcaaacttcacccacgaagtggtgagctggaggttttggtagatggcacgtacttcatatatagtcaggtgtattatattaactttaccgatttcgcatcctacgaagtcgtggtggatgagaagccattccttcagtgtactcggagtattgaaactggtaaaaccaattacaatacgtgttataccgctggtgtctgccttctgaaagctaggcagaaaatcgctgtgaagatggtccacgcagatataagtatcaatatgagtaaacatactacattttttggtgctatccggctcggtgaggcacctgcctca

SEQ ID NO: 10760 - DNA, 1167 bp, synthetic construct
  misc_feature 1..1167: note = source = /note="Description of Artificial Sequence: Synthetic coding sequence"
  source 1..1167: mol_type = other DNA
atgggatacccagaagtcgaaaggcgagagctgctcccggctgccgcaccccgggagagggggagtcaaggctgtggctgtggaggggcaccggctcgcgcaggtgaaggaaactcctgtctgctgtttctgggatttttcggcctatctctggctcttcaccttctcactttgtgttgttacttggagttaagatccgagttgcgcagagaaagaggtgccgagagccggctggggggatctgggacaccaggtacttctgggactctttcctcactggggggtctggatccagatagtccaattacgtcacacttaggacaaccgtcaccaaagcagcagcctctggagcctggggaagcagccctccacagtgactctcaagatgggcaccagatggcccttctgaattttttctttccagatgagaagccgtactccgaagaggagtcacggagggtgcggcgcaataagcgcagtaagtcgaacgaaggggcagacggtcctgtcaaaaacaaaaaaaagggtaagaaagctggtcccccaggccccaacggccctcctggaccaccaggacctccaggtcctcaggggccccctgggatcccaggtattccaggaatccccggcaccacagtgatgggacctccaggacctcccggacctcccggaccccaaggaccacctggcctgcagggtccaagcggagccgccgataaagctggcacacgggaaaatcaaccagcagttgtgcatcttcagggccagggctctgccatacaggtaaaaaacgatctgtctggaggcgtgctgaatgactggtctcggatcacaatgaaccccaaggtctttaagctccacccccgcagcggcgagcttgaagtgctcgtcgatggcacatatttcatttactcgcaggtgtattatattaacttcactgacttcgcctcctacgaggtggtggttgacgagaagccattcttgcagtgcacccgctctattgagactgggaagactaattataatacatgttacacggctggggtctgtctcctgaaggcgcgacagaagatcgccgtcaaaatggtgcatgccgatatttcaatcaacatgtctaagcataccactttctttggtgctatccgattgggtgaggcccccgcctcc

SEQ ID NO: 10761 - DNA, 1167 bp, synthetic construct
  misc_feature 1..1167: note = source = /note="Description of Artificial Sequence: Synthetic coding sequence"
  source 1..1167: mol_type = other DNA
atgggctaccctgaagtagaaaggcgggagttgcttccagctgctgcacctcgggagcgcggcagccaaggctgcggctgcggtggcgcgccagctagagccggcgagggcaatagctgccttctgtttcttgggttcttcggattgtcactggcgctccacctgctcacgctttgttgctatctggaactgcgttctgagctcagaagagagcgaggcgcagaatctcggcttggcggatccgggacccctggtactagcggtacccttagtagcctcggtggcttggatcctgactcccctattacctctcatctgggccagcctagccccaaacagcagccactggagcccggcgaagccgccctgcactcagattcgcaggatggccatcagatggccctgttaaacttctttttcccggacgagaaaccttacagtgaagaggaatctcggagagttcggagaaataagcgatccaagagcaacgaaggcgccgacggtcccgtgaaaaacaagaaaaaggggaagaaggcgggcccacccggtccaaacggccctccaggcccacccggccctcctggccctcaggggcctccagggatcccaggcattcctgggatcccaggtactactgtgatggggccccccggcccccccggccctcctggcccacagggacccccaggactgcaggggccaagcggtgcagctgataaggcagggactagggaaaaccaacctgctgtagtacaccttcaggggcagggatcagcaatccaggtgaaaaatgacttgtcaggaggagtactcaacgattggagcaggattacaatgaatcccaaagtattcaagcttcatccccgctccggggaactggaggtgctggtggatgggacctactttatttattcccaggtatattatataaattttacagacttcgcctcctatgaggtggttgtggatgaaaagccatttttacagtgtacaagatctatcgaaacaggcaagactaactacaatacttgctacacggctggtgtatgcctgctgaaggctcgacagaaaatcgccgtgaagatggtgcacgctgacatcagcattaatatgagcaaacataccacattcttcggggctatcagactgggcgaggcacccgcatcc

SEQ ID NO: 10762 - DNA, 1167 bp, synthetic construct
  misc_feature 1..1167: note = source = /note="Description of Artificial Sequence: Synthetic coding sequence"
  source 1..1167: mol_type = other DNA
atgggttacccggaggtcgagcggagagagttgctgccagcagcggctccgcgcgaacgcggctctcagggctgtggttgcggcggcgcacctgccagagcaggagagggtaatagctgtttgctgttcctgggtttcttcggactgagtctggccctgcatctcctgacactgtgctgttaccttgagctgcgtagcgaactgaggcgtgagagaggagcggaatcccgcctgggtggatccggcacaccgggcacaagtggtaccttgtcctcgctgggtggacttgatcccgactcgccgataacgtctcacctgggccaaccgagcccgaagcagcagccactcgagccaggcgaggctgctctgcacagtgactcccaggatggacatcaaatggccctgctgaactttttcttcccggacgaaaagccatactcggaggaggaatctcgcagagtgcgccgtaataaacgaagcaagtcgaacgagggcgccgatggaccagtgaagaacaagaaaaagggcaagaaagcgggacccccgggcccaaatggtccgcccggaccacctggcccgcccggcccccagggtcccccaggaatccccggcatacccggtattcctggcacgactgtcatgggtccacccggtcccccgggtccgcccggaccccagggccctcccggccttcagggaccttccggagcagccgataaggctggcacacgagagaaccaacccgccgtggttcatctgcagggccaaggatccgccattcaagtgaagaacgatctgagtggcggtgtgctcaatgactggtctcgtataactatgaatcccaaggtgttcaagttgcacccgcgcagcggtgagttggaggtgcttgttgacgggacatatttcatctattctcaggtatactacattaactttacagatttcgctagttacgaggtggttgttgacgagaaaccgtttttgcagtgcacgcgcagcatcgaaactggtaagactaactataatacgtgctacacagccggggtgtgtttgcttaaagcgcggcagaagatcgccgtaaagatggtgcatgcggacatatccataaatatgagcaaacatactaccttttttggcgccatccgcctaggcgaggctccggcttcg

SEQ ID NO: 10763 - DNA, 1167 bp, synthetic construct
  misc_feature 1..1167: note = source = /note="Description of Artificial Sequence: Synthetic coding sequence"
  source 1..1167: mol_type = other DNA
atgggctaccctgaggtcgagcggagagagctgctgcctgcagcagccccacgtgagcggggatcgcaggggtgcggatgcggcggcgcccctgctcgcgccggagagggcaattcctgcctcctcttcctgggcttcttcggtctgagcctggcgttgcatttgctgactctgtgttgctacctggagctcagatccgaattgcgcagggagcgcggagcggaatcacgcctgggaggatccggtactccgggtacctcgggaaccctcagctccctgggcggacttgacccagattcccctattactagccacctcggacagccatccccgaagcagcagccgctggaacccggtgaagcggccctccacagcgattcgcaagacggccaccagatggcactgctgaacttcttctttcccgatgagaagccgtactcggaagaagaatcgagacgggtgcgccggaacaagaggtccaaaagcaatgaaggcgctgacgggccagtgaagaacaagaaaaagggtaagaaggccggaccgccgggccctaatggaccgccaggacctccgggtccgccaggtcctcagggaccgcccggaatccccggaattccaggaatcccaggaaccaccgtgatgggcccgcctggacccccgggtccccctggtccacagggaccgcctggtctgcagggaccatccggagccgcagacaaggcgggaactcgggaaaaccaacccgcggtggtgcatcttcaaggccagggatccgccatccaggtcaagaacgatctttccgggggcgtgttgaacgactggtcgcgcatcactatgaaccctaaggtattcaagctgcatcctcggtcaggcgagttggaggtcctcgtcgacggaacctacttcatttactctcaggtgtactacatcaacttcactgactttgccagctacgaagtggtcgtcgacgagaagccttttctgcagtgcaccagatcgatcgagactggtaaaaccaattacaacacgtgctacactgcgggggtctgcctccttaaagcgcggcagaagatcgctgtgaagatggtgcacgccgatatctcgatcaatatgtcgaagcacaccacttttttcggtgcaatccggctgggagaagcgccggcctcc

SEQ ID NO: 10764 - DNA, 1167 bp, synthetic construct
  misc_feature 1..1167: note = source = /note="Description of Artificial Sequence: Synthetic coding sequence"
  source 1..1167: mol_type = other DNA
atgggttacccagaagtggagaggcgggaactcctgcccgcagcagcaccccgagagcgtggctcgcagggatgcggatgtggaggagcacctgcacgggcaggggaaggaaacagctgcctgctgtttttgggttttttcggactttccctggccctgcacctcctgaccctttgttgttacctggaacttagatcagagctgcgccgcgaaagaggagcggaaagccggctcggcggttcgggaacccctggcacctcgggaacgttgtcatcacttggaggcctcgaccctgattcgcccattacttctcatcttggccagccctcccctaaacaacagccactggagcccggtgaagcggcccttcattcagactcccaggatggtcaccaaatggcactgcttaacttcttcttccctgatgaaaagccttacagtgaggaggagagcaggagagtgaggagaaacaagcgttcgaaatccaatgagggcgcagatgggccggtcaagaacaaaaagaagggcaagaaggcgggccctccaggtccaaatggtcctccaggcccacctggaccacctggacctcaaggaccgcctgggattccaggcattccaggaattccgggtaccactgtgatgggtcctccaggacctcccgggccccccggacctcagggtccacccggactgcaaggaccctcgggagccgcagacaaggcagggaccagagagaaccagccagctgttgtgcatctgcagggtcagggatcagcaatccaagtgaagaacgacctttctggtggtgtgctgaatgattggtctaggattacgatgaacccgaaagtattcaaattgcatccccgatcgggtgaacttgaagtgctcgtggacggcacctatttcatatactcgcaagtgtactacattaacttcaccgattttgccagctacgaagtcgtcgtggatgaaaaaccttttcttcagtgtactcgatcaatcgaaactggaaagaccaattacaacacctgttacactgcaggagtgtgccttctgaaggcacgccaaaagatcgccgtgaagatggtgcatgcggatatttcgattaacatgtctaagcacactaccttctttggtgctatacggcttggtgaagcacccgcctcg

SEQ ID NO: 10765 - DNA, 1167 bp, synthetic construct
  misc_feature 1..1167: note = source = /note="Description of Artificial Sequence: Synthetic coding sequence"
  source 1..1167: mol_type = other DNA
atgggctaccctgaagtggagcgtagagaattgctgcctgccgcagcaccacgagaaagaggaagccaggggtgcggctgcgggggagctcctgctcgagccggagagggtaacagttgtctcctcttcctgggattctttggactgtcccttgctttacacctgctgaccctgtgttgttaccttgaactgaggagcgaactaaggcgagaacgaggagcggaatcccgactgggcggaagcggaaccccggggacctccggaactcttagttctctgggcggcctagatcctgattcacccatcacctcacatctcggccagccgagcccaaaacagcagcctctggaaccaggggaagccgcgttgcactcagactcacaggacgggcaccaaatggcattgctgaatttctttttccccgatgagaagccatattcggaagaggaatctcgtcgcgtacgtcggaataagcgatccaagagcaatgagggcgccgatgggccggtgaagaataagaaaaaaggaaaaaaggcgggccctccaggacctaacgggcctcccggacctcccggcccgccgggccctcaggggccccccggcatccctggcatccccgggatcccgggtaccactgtgatggggccgccaggtccccccgggccaccggggccccaggggccccctggccttcaggggccctctggtgcggcggacaaagctggcactagagaaaatcaacccgccgtagtgcacttgcagggccagggatccgcaattcaggtcaaaaatgatttgtccggcggggtccttaacgactggagtcggattaccatgaaccccaaggtttttaaattacacccccgaagtggggagctcgaggtgctggtcgatgggacatatttcatttactcccaggtctattacattaactttaccgatttcgcatcctatgaagtggtggtggatgaaaaacccttcctgcagtgtaccaggtctatagaaacaggaaagacgaactataacacatgctatacagccggagtctgtctccttaaggcgagacaaaagatagctgtcaagatggtgcatgccgatatttcaattaatatgagcaagcacacaacatttttcggtgccatccgcctcggagaggcccctgctagt

SEQ ID NO: 10766 - DNA, 1167 bp, synthetic construct
  misc_feature 1..1167: note = source = /note="Description of Artificial Sequence: Synthetic coding sequence"
  source 1..1167: mol_type = other DNA
atgggctacccggaggtggagcggcgggaactgctgccagccgcggctcctagggagagaggatcccaaggatgcggctgcggcggcgccccagctagagcaggagagggcaactcatgcttgctctttctgggattctttggcctctctctcgccttgcacctgctgactctctgttgctacctcgaactccgctcagagctgcggcgcgaaaggggcgcggagtctcggttgggaggttccggcaccccgggaacttcaggaaccctgtcaagcctgggaggactcgaccctgactccccgattacgtcccatttggggcagccgagccctaaacagcagccgctcgaaccaggagaagctgccctgcactccgactcgcaagatggccatcagatggcccttctcaacttcttttttccagacgaaaagccgtactccgaagaagaatcacgccgcgtccgaaggaataaacggtcgaagtcgaacgaaggagctgatggaccagtcaagaataagaaaaaaggcaaaaaggccgggccacctggacccaatggaccgcctgggcctcctggaccgccgggcccgcaaggcccacctggaatcccaggcatccccggtatcccagggaccaccgttatgggcccgcctggaccaccagggcccccagggccgcaaggacccccagggctgcaagggccttcaggggcagcggataaagccgggacccgcgaaaaccaaccggcagtggtgcacttgcaagggcagggaagcgccatccaggtgaagaatgacttgtcaggaggtgtcctgaacgattggtcccggattactatgaacccaaaggtgtttaagctccatccacggtcaggcgagctggaggtgctcgtggacggcacttacttcatctactcgcaggtctactacatcaacttcactgattttgcgagctacgaggtggtggtggatgagaaaccgtttctgcaatgcacccgatcgatcgaaaccggaaagacgaattacaacacctgctatactgccggagtctgcctcctgaaagcacggcaaaagatcgcagtcaagatggttcacgccgacatctcgatcaatatgtccaagcacaccactttctttggcgctattagactgggtgaggccccagcctca

SEQ ID NO: 10767 - DNA, 1167 bp, synthetic construct
  misc_feature 1..1167: note = source = /note="Description of Artificial Sequence: Synthetic coding sequence"
  source 1..1167: mol_type = other DNA
atggggtatcccgaggtcgagcggcgagaactacttcccgccgcagcaccacgggaacggggatcccagggatgtggatgtgggggggcccctgctagggccggggaaggaaacagttgtctcttgttcctgggattttttggattgtccctagccctgcatttgttaactttatgctgttatttggaactgcgctctgaattgagaagagaaaggggagcagaatctcggctcggaggatccggaactcctgggacttccgggacactgtcctctctcggagggctagatccagattcacccataacatcacacttaggacagccctcacctaaacaacagcccctagaacccggggaagccgccttacactcagattcacaggatggacaccagatggcacttctcaacttttttttccccgatgaaaaaccctatagtgaagaagaatcccgacgggtcagacgcaacaaaagatctaaaagtaacgagggggctgatggacctgtcaaaaataaaaaaaaaggaaaaaaagcggggccccctgggcccaacgggccccctgggccacccggacctcctgggccccagggacctcctgggatacccggaataccagggatcccagggacaacagtgatgggacctccaggacctcccggacctcccggaccccaggggcctcccgggcttcagggaccctctggggccgccgataaagcagggactcgagaaaatcagcccgctgtagttcatctgcagggacagggatcagccatccaagtcaaaaacgatttatctgggggagttctcaacgactggtctaggataactatgaatcctaaagtgttcaaattacacccgcggtcaggagagcttgaagtgctcgtggatgggacatacttcatatattctcaagtttactatataaattttacagattttgcctcctatgaagtcgtcgtggacgaaaagcccttcttacagtgtacacgaagtatagaaacaggaaaaacaaattataatacttgttatactgctggagtctgtcttcttaaggcccgacagaaaatagctgtcaagatggtgcacgcggacatcagtattaacatgtcaaagcatactactttttttggggctattaggctgggggaagcacctgcttcc

SEQ ID NO: 10768 - DNA, 1167 bp, synthetic construct
  misc_feature 1..1167: note = source = /note="Description of Artificial Sequence: Synthetic coding sequence"
  source 1..1167: mol_type = other DNA
atgggttaccctgaggtcgaacgccgcgagctgctgccagccgctgcgccccgggaacgcggatcgcagggttgcgggtgtggaggcgcccctgcacgcgctggtgaaggcaactcgtgcctcttgttcttgggtttctttggactgtccctggcgctgcacctcctcacgctgtgctgctaccttgagcttcggtctgagctgcggcgagagagaggcgctgaatcaaggctcggcggttccggcaccccgggcacctcggggactctgagctcactgggcgggctggacccagattcacctataacttcacacttggggcaacccagccccaagcagcaacctctcgagccaggagaggccgccctgcactcggactcacaagacggacatcagatggcactgctcaactttttcttccccgacgagaagccgtactcagaggaggagtctcgccgcgtgcggcgcaataaacggtccaagtccaacgaaggagcggacggccctgtcaaaaacaagaagaaggggaagaaggctgggccgcccggaccgaacggaccaccgggtcctccggggccacccggaccgcagggaccaccgggaattccgggaatcccaggcatccctggcaccaccgtgatgggaccaccagggccgccagggccgccggggccccagggaccgccgggcttgcaaggaccgtccggagccgctgataaggctggtacccgggagaaccagccggcagtggtgcacctgcagggacagggatcggcaatccaggtgaaaaacgacctttccgggggtgtcctcaacgactggtcccggatcactatgaatccgaaggttttcaaacttcacccgaggtcgggcgaactcgaggtgctggtggatggaacttacttcatctactctcaggtctactatatcaacttcactgacttcgccagctacgaagtggtcgtggatgagaagccgttcctgcagtgcactcgctcgatcgaaactggcaagactaactacaatacctgttacaccgccggcgtgtgtctcctcaaggcacggcaaaagatcgccgtcaagatggtgcacgcagatatatcaatcaacatgtccaagcataccaccttctttggcgcaattcggctcggagaagcgccggccagc

SEQ ID NO: 10769 - DNA, 1167 bp, synthetic construct
  misc_feature 1..1167: note = source = /note="Description of Artificial Sequence: Synthetic coding sequence"
  source 1..1167: mol_type = other DNA
atgggctatcccgaagtcgagcggcgtgaactactcccagcggcggccccccgagagaggggttcccaggggtgtgggtgcgggggtgcccctgctcgggcaggcgaaggaaacagctgtctgttatttttggggtttttcggcctctcactcgctctccacctgctcactctgtgttgctatctggaacttcgttcagagctcagacgtgaacgaggtgctgagtcccgcctcggggggtcagggactccggggacctccggcactctgagtagcctaggcgggctagaccctgacagtcctatcacaagccacctgggccagccaagtccgaagcagcagccactggaaccgggggaggctgcactgcacagcgacagccaggatgggcatcaaatggcgctactgaacttcttttttcccgacgaaaagccctactccgaggaagaatccaggagggtgaggcgaaacaaacgatccaaatctaacgaaggggctgacggcccagtgaaaaacaaaaaaaaaggtaagaaagctggacctccaggaccaaacgggccacctggccccccaggccccccaggaccccagggtcccccaggtatcccaggaattcctggcataccaggcactacggttatgggcccacccggtccccccgggcctcccggcccacaaggcccccctgggttgcagggaccgagtggggccgccgataaagccggaactagggaaaaccagccggcagtagttcatctgcaaggacaaggctctgcgatccaggttaaaaacgatcttagtggcggtgtgctgaatgattggtctcgtattacgatgaaccctaaggtgtttaagttgcacccacgctctggagaactcgaggtgcttgtggacggtacatacttcatctatagtcaggtttattatatcaactttaccgacttcgcttcttatgaggtggtggtagatgagaagcccttcttgcagtgtacacgttccatagaaaccgggaagaccaactacaacacctgttatacagcaggggtgtgtctgctgaaggcacggcagaaaattgctgtgaagatggtccatgctgatatctccattaacatgtcaaaacacacaacctttttcggggcaattcggctgggtgaggcacccgctagt

SEQ ID NO: 10770 - DNA, 1167 bp, synthetic construct
  misc_feature 1..1167: note = source = /note="Description of Artificial Sequence: Synthetic coding sequence"
  source 1..1167: mol_type = other DNA
atgggatacccagaggtggaacggcgcgagctcctgccggctgcggccccgcgcgaacgcggcagccagggttgcggatgcggcggagcccccgcgagagccggcgaaggaaatagctgcctgctgttcctgggtttcttcggattgtccctggccctgcacttgcttaccctctgctgttacctggaactccggtcggagctgcgtcgcgagcgcggagctgagtcaaggttgggtgggagcggaaccccggggacctcaggaactctctcgtcgctgggaggcctggacccagactcccctatcaccagtcatcttgggcagccgtccccaaagcagcagccactcgaaccgggcgaagccgctcttcactccgattcgcaggacgggcaccaaatggctcttctcaactttttctttccggatgaaaaaccctacagcgaagaggagtcgcggagagtgcgccgcaacaagcggtcaaagtcaaatgaaggcgctgacgggcccgtgaagaacaaaaagaaaggcaagaaagcgggcccgccgggacccaacggaccccctggaccgcccgggcctccgggccctcaaggaccgcctggcatccctggaatacccggcatcccggggaccaccgtcatgggaccgccgggaccaccggggccccccggaccgcagggaccaccagggttgcaaggaccgtcaggtgccgccgataaggccggcaccagagagaaccaaccagccgtcgttcatctccaaggccagggatcggcgatccaggtgaagaacgacctgagtggaggggtgctgaacgactggtcgaggattacgatgaaccctaaggtgttcaaactccatccacggtcgggggagctcgaagtgctggtcgacggaacctacttcatctactcacaagtgtactacatcaatttcaccgattttgcatcttacgaggtggtggtcgacgagaagccgttcctgcagtgcaccagatccatcgaaacgggaaagactaattacaacacttgctatactgcgggagtctgtctcttgaaggcgcgccagaagatcgccgtgaagatggtccacgcggacatatccatcaatatgagcaaacacaccactttcttcggggctatcagactgggcgaagccccggcctcg

SEQ ID NO: 10771 - DNA, 1167 bp, synthetic construct
  misc_feature 1..1167: note = source = /note="Description of Artificial Sequence: Synthetic coding sequence"
  source 1..1167: mol_type = other DNA
atgggttatccggaagttgaacgtcgtgaattactaccggcggcggcgccgcgagaacgtggttcgcaaggttgtggttgtggtggtgcgccggcgcgagcgggtgaaggtaattcgtgtctactatttctaggtttttttggtctatcgttagcgctacatttattaacgctatgttgttatctagaattacgatcggaactacgtcgtgaacgaggtgcggaatcgcgtttaggtggttcgggtacgccgggtacgtcgggtacgctatcgtcgctaggtggtttagatccggattcgccgataacgtcgcatttaggtcaaccgtcgccgaaacaacaaccgctagaaccgggtgaagcggcgttacattcggattcgcaagatggtcatcaaatggcgctattaaattttttttttccggatgaaaaaccgtattcggaagaagaatcgcgacgtgtacgtcgtaataaacgatcgaaatcgaatgaaggtgcggatggtccggttaaaaataaaaaaaaaggtaaaaaagcgggtccgccgggtccgaatggtccgccgggtccgccgggtccgccgggtccgcaaggtccgccgggtataccgggtataccgggtataccgggtacgacggtaatgggtccgccgggtccgccgggtccgccgggtccgcaaggtccgccgggtttacaaggtccgtcgggtgcggcggataaagcgggtacgcgagaaaatcaaccggcggttgtacatttacaaggtcaaggttcggcgatacaagtaaaaaatgatttatcgggtggtgtattaaatgattggtcgcgaataacgatgaatccgaaagtatttaaattacatccgcgttcgggtgaactagaagttttagttgatggtacgtattttatatattcgcaagtttattatataaattttacggattttgcgtcgtatgaagtagtagtagatgaaaaaccgtttctacaatgtacgcgttcgatagaaacgggtaaaacgaattataatacgtgttatacggcgggtgtttgtttattaaaagcgcgtcaaaaaatagcggttaaaatggtacatgcggatatatcgataaatatgtcgaaacatacgacgttttttggtgcgatacgtttaggtgaagcgccggcgtcg

SEQ ID NO: 10772 - DNA, 1167 bp, synthetic construct
  misc_feature 1..1167: note = source = /note="Description of Artificial Sequence: Synthetic coding sequence"
  source 1..1167: mol_type = other DNA
atgggatatccggaagtcgaacgaagagaactcctcccggccgcagctccgagggagagaggcagccaagggtgtggatgtggaggcgcccctgcccgggctggagagggcaattcatgcttgctttttctggggttttttggactgtcgctcgccttgcacctcctgactttgtgctgctatctcgaactgcggagcgagcttagaagagagcgcggcgccgaatcacgcctgggcggaagcggaaccccgggaacctcaggtacgctgtcatccctgggtggactggaccctgacagcccgattacgagccacttgggccaaccctcgccaaaacagcagccattggaaccaggagaggccgcactgcattcggattcgcaggacggacatcagatggctctgctgaatttctttttcccggatgaaaagccatactcggaagaggaatcacggcgcgtgcggcggaataagcgttcgaagtccaatgagggcgcagatggacccgtgaagaacaagaagaaggggaagaaagcaggtccgcctggtccaaacggccccccgggcccaccaggaccgccgggtcctcagggaccaccgggcatccctggcatcccggggatcccaggcaccaccgtcatgggccccccaggaccccccggtcctccagggccccagggcccgccggggctccaaggaccatccggcgcggcggacaaggccgggactagggaaaaccaacccgccgtcgtccacctgcagggacaaggctccgcaatccaagtcaaaaatgatctgagcggaggggtgctgaacgactggtcccggatcactatgaatccaaaggtgttcaagctgcatccccgctcaggagaactcgaagtgctggtggacggtacttactttatctacagccaggtgtactacatcaacttcactgactttgcatcgtacgaggtcgtggtggacgagaagccttttctccaatgtactcgaagcatagagacgggaaagaccaattacaacacttgttacactgccggggtgtgcctgcttaaggctcgccaaaagatcgcagtgaagatggtccatgcggatatctctatcaacatgtccaagcacactacttttttcggagctatcagactgggcgaggctccggccagc

SEQ ID NO: 10773 - DNA, 1167 bp, synthetic construct
  misc_feature 1..1167: note = source = /note="Description of Artificial Sequence: Synthetic coding sequence"
  source 1..1167: mol_type = other DNA
atgggatacccggaggtcgagaggcgggagcttttgccagctgcagcacctagagaaagaggaagccagggttgtgggtgtggcggtgcccccgccagagcaggagaaggaaattcgtgtctcctcttcctgggcttttttggacttagccttgcactgcatcttctgacgctttgttgttacctggaacttcgatcggagctgagaagggagcgaggagcggagtcacggcttggtggttccggtacccctggtacttcgggtaccctcagctcgcttggtggactggatcctgattcgccgattacgtcccatctgggccagccatcaccaaaacagcaaccacttgaaccgggggaggcggcgcttcatagcgatagccaggacgggcatcagatggcacttcttaacttcttctttccggatgaaaaaccttacagcgaagaagaatcgaggcgcgttcggcgcaataagcggtctaagagcaatgagggtgcagacggtcctgttaagaacaaaaagaaggggaagaaggcaggccctcctggacccaacgggccacctggcccaccaggacctcctggacctcagggacctcctggtattcccggtattccaggaataccaggcaccaccgtgatgggtccccctggtcctcctggaccacccggacctcaaggtcctcccgggcttcagggtccatcgggagccgcagataaggcaggaacccgcgaaaaccaacccgcagtcgtccaccttcaaggccagggaagcgcaatccaggtgaagaacgatttgtccggaggtgtgctgaatgattggagccggataaccatgaaccctaaggtgttcaagttgcatccccgatccggagaactggaagtgcttgtggatgggacctacttcatctattcccaagtgtactacatcaactttacggattttgcctcatacgaagtggtggtcgacgagaaaccttttctccagtgtacccgctcgatcgaaaccggtaagactaactacaacacttgttacaccgccggggtgtgccttcttaaggctagacaaaagattgcagtcaaaatggtgcacgcagacatttctatcaatatgtccaaacacaccaccttttttggcgcaattagactgggggaagcacctgcctca

SEQ ID NO: 10774 - DNA, 1167 bp, synthetic construct
  misc_feature 1..1167: note = source = /note="Description of Artificial Sequence: Synthetic coding sequence"
  source 1..1167: mol_type = other DNA
atgggctatcctgaggttgaacgccgcgaactcctcccggccgccgcacccagagaacgtggtagccagggatgcgggtgtggaggggctcctgcacgcgccggggaagggaattcgtgcctactttttctaggttttttcggtctttccctcgctctccaccttctgacactgtgctgttacctggaactccgttcagagctacggcgtgagcggggtgctgaaagtcgcttaggaggctcgggaacccccggaacttcgggcactcttagttccctcggtggtctggatcctgattctccgatcacatcccatctaggacagccctctcctaagcaacagccactcgaacccggtgaagcagccctgcatagcgactctcaggacggacaccaaatggctctgttgaatttcttctttcctgacgaaaagccatattcagaggaggaatctcgtcgcgtccgtcgcaacaagcgatcgaaatccaacgaaggagccgatgggcccgtgaagaataagaagaagggaaagaaagctggccctccaggacctaatggacctcccggcccgccaggccctccaggacctcagggtccccctggcatcccaggtatcccaggaatcccgggaactacggtcatgggaccgccgggtcccccaggcccgccgggcccccaagggccacccggactccaggggccatcaggtgcagcagataaggctggtacacgagagaaccaacctgctgtggtccatctgcaaggacaaggctccgcaatccaggtaaagaacgacttatctgggggggtgctgaacgattggagtcgtattacgatgaatccaaaagtattcaagctgcatccgagatccggggagctcgaggtattggtggacggcacatatttcatttattcccaggtttactacattaactttactgacttcgcatcttacgaagtggtcgtggacgagaagcctttcctccaatgcaccagatctattgaaacagggaagactaactacaacacctgctacacggctggagtctgtttgctgaaggcccgccagaagatcgccgtcaagatggtacatgccgatatttctatcaatatgagtaagcacacaacatttttcggtgcgattcggcttggtgaagcgccagcttcc

SEQ ID NO: 10775 - DNA, 1167 bp, synthetic construct
  misc_feature 1..1167: note = source = /note="Description of Artificial Sequence: Synthetic coding sequence"
  source 1..1167: mol_type = other DNA
atgggctaccctgaggtcgagcggcgggagctccttcccgccgccgctcctagggagcgtggctcgcagggttgtggctgcggtggcgcacctgcgcgggcaggagagggtaattcctgcttgctgttcctcggtttctttggtctcagtctggccctccatcttctcactctatgctgctatttggagttgcggagcgagttgcgccgcgagcgtggcgctgagtctcgcctgggtggctcggggacgccgggcactagcggtaccctgtcaagcctgggcggattggatccggattcccccatcaccagccacctaggccagccctcccctaaacagcagcccctcgagcccggcgaggccgcccttcacagcgactcgcaggatggacaccaaatggcccttctgaacttttttttccctgatgagaagccctacagtgaagaggagtcccgcagagtccgccgcaataagcgtagtaagtcaaacgagggcgcggatggcccggttaagaacaagaaaaagggcaagaaggccggtcctcctgggcccaacggcccccccggtccccccggcccccccggcccacaaggtcctcccggcatcccaggcatccccggaatccccggtacaaccgtcatgggacctcctggtccccccggtccacctggcccccagggtcccccaggtttgcagggaccatccggagccgccgacaaggctggcaccagggagaaccagccggctgttgttcaccttcaaggtcaaggctctgctatccaggttaagaacgacctctcgggcggcgtgctaaatgactggtcgagaatcacgatgaatcccaaggtttttaagcttcaccctcgctctggtgagctcgaggtcttggtcgatggaacctattttatctatagccaagtgtactacatcaatttcaccgacttcgcttcttacgaggtcgtcgttgacgaaaagcccttcttgcagtgcacccgctccatagagacaggtaagaccaactacaacacgtgctacaccgccggtgtctgtttgcttaaggcgcgccagaagattgccgttaagatggttcacgctgatatcagcatcaatatgtccaagcacaccacattcttcggcgcaatccgactgggtgaggctccggcgtcc

SEQ ID NO: 10776 - DNA, 1167 bp, synthetic construct
  misc_feature 1..1167: note = source = /note="Description of Artificial Sequence: Synthetic coding sequence"
  source 1..1167: mol_type = other DNA
atgggataccctgaagtcgaacgaagagaactcttgccagctgctgccccgcgggagcggggatcacaaggatgcgggtgtggaggggcgccagctcgggctggagagggcaatagctgcctccttttccttggattcttcggtctgagcctggctctgcatctgctgaccttgtgctgctacctggagctgcgctcagaactcaggcgcgaacgtggcgcagaatccagattgggagggtccgggactccgggaactagcgggactctctcgtccctgggcggactcgacccggactcccctatcacctcgcatctgggacagccatcgccaaagcagcaaccgcttgagccgggtgaagccgcgttgcactcagactcacaagatggacaccagatggcgctcctgaacttctttttcccggacgaaaagccgtattcggaggaggaatcccggcgcgtcagaagaaacaagaggtccaagagcaacgaaggggcagacggcccggtcaagaataagaagaagggcaagaaagccggaccgcctggccctaacgggccacctggcccgcctggaccgccaggccctcaaggacccccgggaatcccgggtatccctgggatcccgggcactactgtgatgggaccgccaggtccaccgggaccaccaggaccccaaggtccacctggactgcaggggccgtcgggagcagcggataaggccggcacccgggaaaatcagccggccgtggtgcacctccaagggcaaggatcagcgatccaggtgaagaacgacctgtcgggtggagtgctcaatgactggtcgaggatcacgatgaatccgaaggtctttaagttgcaccctcgctcgggcgagctggaggtgctcgtggacggtacctactttatctactcccaagtttactacatcaacttcacggactttgcatcctacgaagtggtcgtcgatgaaaaacctttcctgcagtgtaccaggtccatcgaaacggggaaaaccaactacaacacttgctacaccgcgggagtctgtttgcttaaggcccgacagaagatcgccgtgaagatggtgcacgctgatatctcaatcaacatgtcgaaacatactactttctttggagccattcgcctgggtgaagccccagcgtca

SEQ ID NO: 10777 - DNA, 1167 bp, synthetic construct
  misc_feature 1..1167: note = source = /note="Description of Artificial Sequence: Synthetic coding sequence"
  source 1..1167: mol_type = other DNA
atgggttatcccgaggtagagcgtagagagctccttcctgcagccgctcccagagagagaggcagccagggttgtgggtgcggtggagcaccagcaagagctggtgaaggcaattcctgtttgctctttctcggctttttcgggctttctctggctcttcacctgctaaccctttgctgttatctggaacttcgctctgagctccgtagggaaagaggggccgaatcaaggctgggaggatccggtacgcccgggaccagcggcacgctttcctcgctcggaggcctggacccagattccccaatcaccagccacctggggcagccaagcccaaaacaacagcccttagaacccggggaggcagcgttgcacagcgatagtcaggacggtcatcagatggctttgttgaattttttctttcccgacgaaaaaccctacagcgaggaagaaagtcggagagtccggcggaataaaagatcaaaaagtaacgagggagcagacgggcctgtgaagaacaaaaaaaagggcaaaaaggccggccctcccggccctaatggcccccctgggccgcctggtccccccggtccccaggggccgcctggcattcctggcatacctggtatcccgggcaccaccgtcatgggtccaccagggccacccggtccacctgggccccagggacctccggggctccagggacccagcggagcagccgataaagctggaacccgggagaaccaacccgcagtggtgcacctacagggccagggcagcgctatccaggtgaaaaatgatctgtccggaggagttctaaatgattggtcaaggattacaatgaaccccaaggtgtttaagctgcatccccgctcgggagagctagaggtgcttgtggatgggacatactttatctacagccaggtgtactatatcaatttcaccgactttgcctcatacgaagtggtagtagatgagaaacctttcctacagtgtacgaggagcatcgaaactggcaaaacaaattataacacttgctacactgcgggggtttgtcttctgaaggcccggcagaagatcgcggtgaaaatggtccatgctgacatctctattaacatgtcgaaacatactacgttctttggagcaataagactgggtgaggcacccgcaagc

SEQ ID NO: 10778 - DNA, 1167 bp, synthetic construct
  misc_feature 1..1167: note = source = /note="Description of Artificial Sequence: Synthetic coding sequence"
  source 1..1167: mol_type = other DNA
atgggctaccccgaggtggaacgtcgcgaactgcttcccgcagctgcgccccgagaaagaggaagccagggatgtggttgtggtggggcacctgcgcgggcaggagaagggaactcctgccttctgttcctgggatttttcgggctttcgctggccctgcatctcctgaccctgtgctgttaccttgaactgcggtccgagctccgtcgcgaaagaggagctgaatccagattgggaggaagcggtactcctggtacctccggtactctttcgtcccttggtggactggaccctgatagcccgataaccagccaccttggtcagccgtcacctaagcaacagcctctggaaccaggtgaggcagcactgcacagcgacagccaagacggtcatcaaatggcactcttgaacttctttttcccagatgagaagccttacagcgaagaagaatcccggagggtccgtagaaacaaaagatctaagtccaacgagggtgcagatggtccagtgaagaacaagaaaaagggcaagaaagcaggacctcctggtcccaatggacccccaggcccacctggtcctcctggccctcaaggccctcccggtatccccggcattcctggcattccaggcactactgtgatgggtccccctggaccccccggtccccccggtccgcaaggccctccagggctccagggtccatccggtgccgcggacaaggctggtaccagggagaaccagcctgccgtggtgcatcttcagggacaaggctcagcaatccaggtcaagaacgatctctccgggggagtccttaatgattggtcacgtatcacgatgaatcctaaggtgttcaaactgcaccccagatccggagagctcgaagtgctggtggacggaacctacttcatctattcacaagtgtactacatcaatttcacggattttgcttcgtacgaggtggtcgtcgatgaaaaacccttccttcagtgtactagatcgatcgagactggcaagaccaactacaacacctgctatactgcaggagtttgtctcctcaaagcgagacagaagatagcagtcaagatggtccatgctgatatctccattaacatgtcaaagcatactacttttttcggagccattagacttggtgaagctccagcgtct

SEQ ID NO: 10779 - DNA, 1167 bp, synthetic construct
  misc_feature 1..1167: note = source = /note="Description of Artificial Sequence: Synthetic coding sequence"
  source 1..1167: mol_type = other DNA
atgggatacccggaggttgagaggcgcgaactgctgccagctgcggcgcctcgcgagagggggtcgcagggatgcggctgcggcggcgccccagcgagggccggcgaggggaactcatgtctgctgttcctggggttcttcggactcagcctggccctgcacttgctgactctctgctgttacttggaactgcgctcggaactgagacgcgagcggggagcggaaagccggctgggaggttcaggcaccccaggaacctcaggtaccctgtcgagccttggaggcctggacccggacagcccgataacctctcatctgggtcagccgtccccgaagcagcagccgctcgagccgggagaagctgccttgcactcggactcccaggatggacatcaaatggctctcctgaacttctttttcccggacgagaagccgtactcggaggaagaatcacgccgcgtgcgtcgcaacaaaagaagcaaaagcaacgaaggggccgacggaccggtcaagaataagaagaagggaaagaaagcaggcccgccgggaccgaacggaccgcctggtcctccaggacctccaggcccgcaaggcccgccaggaatcccgggaatccctggaatcccagggacgaccgtgatggggcctcctggacccccaggaccaccgggacctcagggaccgcctggattgcagggaccgtcgggcgcagcagataaggccggaactcgcgagaaccagcctgctgtcgtgcacctccaaggccaaggatcagcaatccaggtgaagaacgacctgtcaggtggagtgttgaacgattggtcccggatcaccatgaaccctaaagtctttaaactgcatccgcggtcaggcgaactggaggtgctggtggacggcacctactttatctattcgcaagtgtattacattaacttcacggacttcgcctcgtatgaggttgtcgtggacgaaaagccattcctccagtgtactcggagcatcgaaactggaaaaaccaactacaacacttgctacactgccggggtctgcctcctgaaggcccggcagaaaattgccgtgaagatggtgcacgccgatatctccatcaatatgtccaaacacactactttctttggggccatcaggctcggtgaggccccagcgtca

SEQ ID NO: 10780 - DNA, 1167 bp, synthetic construct
  misc_feature 1..1167: note = source = /note="Description of Artificial Sequence: Synthetic coding sequence"
  source 1..1167: mol_type = other DNA
atgggataccctgaagtcgagcgcagagagctcctgcctgcagccgcaccccgggagcgtgggagccagggctgtggctgcggtggagctcccgcacgagcaggtgaaggaaacagctgccttctgtttctgggatttttcggactttcccttgctctgcaccttctgaccctttgttgttacttggaattgaggagcgagctgagacgcgaacggggtgcagaatctcgactggggggatcagggacccctgggacctcgggaaccctgtcgtcgctgggaggacttgatccagactccccgattacttcgcatcttgggcaaccttccccaaagcaacagcctctggaaccaggtgaagccgcactgcattcggattcacaagatggacatcaaatggccctgctcaacttcttctttccagatgaaaagccctactcggaggaagagtcgaggcgggtccgccgtaacaaaagatcgaaatcgaacgaaggtgcagatggtccagtcaagaataagaagaagggaaagaaggcaggcccgcccggaccaaacgggcctcctgggccccccggacctcctggtccacaaggaccaccaggtatccctgggattcctgggatccccggtactactgtcatgggccctcctggaccacccggaccccccgggccgcagggaccgcctggtctgcaaggtccttcgggcgccgctgataaggcagggactagggagaaccagcccgccgtggtccatctccaaggtcagggatcggcgattcaggtgaagaacgatctttcgggtggcgttttgaacgattggagccgaataactatgaatcctaaggtgttcaaacttcacccaaggtcaggcgaactggaagtgctcgtggacggcacgtacttcatatacagccaggtctactacatcaatttcaccgatttcgccagctatgaagtcgtggtggatgaaaagcctttcctccaatgtactcggtcgatcgaaaccggaaaaactaactacaatacttgttacacggcaggtgtgtgcctgcttaaagcgagacagaaaattgctgtcaagatggttcatgcagacatttcaattaacatgtccaagcacaccaccttctttggcgcaatcagactgggagaagcacccgcaagc

SEQ ID NO: 10781 - DNA, 1167 bp, synthetic construct
  misc_feature 1..1167: note = source = /note="Description of Artificial Sequence: Synthetic coding sequence"
  source 1..1167: mol_type = other DNA
atggggtaccctgaagtcgaaagaagagagctgctgccagcagcagcaccaagggaacgcggatcccaaggttgtggttgcggaggcgcccctgcacgagcaggagaggggaattcctgcctgctgttcctgggttttttcgggctttcgctcgccctccatcttttgaccctgtgctgttaccttgaactgcgatcggagctgagacgtgagcggggagcagagtccagactgggaggttccggtacccctggtacctccggtaccctctcctcgctcggcggactggatcctgacagcccgattacctcacacctgggtcaaccttcacctaagcagcaaccgctggaacctggagaagccgccctccattcagatagccaggatggtcatcaaatggcccttttgaactttttctttccggacgaaaaaccttatagcgaagaagaatcgcgccgcgtgaggcgcaacaagcggtccaaaagcaacgagggagcggatggtccggtcaagaacaagaaaaagggaaagaaggccggtccccccggacctaatgggcctcctggacctcctggccctcccggccctcaaggcccaccaggtattccaggaatccctggaattcccggaactaccgtcatgggccctccgggaccgccaggaccaccgggtcctcaaggacctcctgggctccaaggcccttccggcgccgccgacaaggctggtacccgcgaaaaccaacctgcagtcgtgcatcttcaaggccagggttcagccattcaagtcaagaacgatctcagcggaggagtgcttaacgattggtcccgcatcacgatgaatccaaaagtgtttaaactccatccccgttcgggtgagctcgaagtcctggtcgatggcacgtactttatctactcccaagtgtactacattaactttactgactttgcatcatacgaggtggtggtggacgaaaagcctttccttcagtgtactaggagcattgaaactggaaagaccaactacaacacttgttacaccgctggagtgtgtctcctgaaggcaaggcaaaagatcgcagtgaaaatggtccacgcggacatcagcatcaatatgagcaagcataccaccttctttggagcaattaggctcggcgaagcacctgcctct

SEQ ID NO: 10782 - DNA, 1167 bp, synthetic construct
  misc_feature 1..1167: note = source = /note="Description of Artificial Sequence: Synthetic coding sequence"
  source 1..1167: mol_type = other DNA
atgggataccccgaggtggaaaggcgggaactgctgccggccgccgcgccacgcgagcgcggctcccaaggctgtggatgtggcggggctcccgcacgggccggtgagggaaattcctgcctgctcttcctgggcttcttcggattgtcactcgcgctgcacctcctgactttgtgctgctacctggagctccgctcggagcttagacgcgagagaggagccgaaagccgcctcggaggatcaggaacgccgggaacctcgggaactctctcctcgctcggagggttggatcctgactcacctatcacctcccacctcggacagccttcgccgaagcagcaaccgttggaaccaggcgaagccgctcttcattcagactctcaagacggacaccaaatggccctgttgaacttcttcttcccggacgaaaagccgtactccgaagaggagagccggcgcgtgagaagaaacaagcggagcaagtcgaatgaaggcgcggacggaccggtgaagaacaaaaagaagggaaagaaagcaggcccgccaggcccaaatgggcctcccggtccccccggaccgccgggtcctcagggaccgccgggaattccgggcatcccaggcatccctggcaccaccgtcatgggacccccgggaccacctggtccgccggggccgcaaggacctccgggcctgcaaggaccatcgggggcagcagacaaagcgggcactcgcgaaaaccagccagccgtcgtgcacctccagggccagggctcggccatccaggtgaagaacgatctgtccggaggtgtgctgaacgattggtcgcggattactatgaatccaaaagttttcaagctccatccgcggtcgggagaactggaggtcctggtcgacggcacgtacttcatctactcccaggtgtactacatcaacttcaccgatttcgcatcgtacgaagtggtggtggacgaaaaacctttcctgcagtgcacccgctcaatcgagactggaaagaccaactacaacacctgctacactgccggtgtgtgcctgctgaaggcccggcagaagattgccgtgaagatggtgcacgccgatatctcgatcaatatgtctaagcacactactttcttcggcgcgatccggctcggagaagcacccgcctct

SEQ ID NO: 10783 - DNA, 1167 bp, synthetic construct
  misc_feature 1..1167: note = source = /note="Description of Artificial Sequence: Synthetic coding sequence"
  source 1..1167: mol_type = other DNA
atgggatatccagaagtagaaagaagagaattgttgccagcagcagcacctagagaacgtggatcacaaggatgcggttgtggtggagctcctgcaagagctggtgaaggaaattcttgtttactttttcttggattttttggtctttcacttgctttacatcttttgacattatgttgttatctcgaattacgttctgaattaagaagagaaagaggagctgaaagtagacttggaggatcaggaactccaggaacatctggaacactttcatcattaggaggattagatccagattcaccaattactagtcatttaggtcaaccatctccaaagcaacaaccattagaaccaggagaagcagcattacattcagactcacaagatggtcatcaaatggcattgttaaattttttttttcctgatgaaaagccatattctgaagaagaatcaagaagagttcgaagaaacaaaagaagtaaaagtaatgagggagctgatggaccagttaaaaataagaaaaaaggaaaaaaggctggtcctccagggccaaatggacctccaggaccacctgggccaccaggaccacaaggacctccaggaattccaggtattcctggaattccaggaacaacagttatgggaccaccaggacctccaggaccaccaggtccacaaggtccaccaggtttacaaggaccatcaggagctgctgataaagcaggtactagagaaaatcaaccagcagtagttcatttacaaggacaaggaagtgcaattcaagtaaaaaatgatttatcaggaggtgttttaaatgattggagtcgtataacaatgaacccaaaagtttttaaacttcatccaagatcaggagaattagaagttcttgttgatggaacttatttcatttattcccaagtttattatattaatttcacagatttcgcttcatatgaagtggtcgtagatgaaaaaccatttttacaatgtactcgtagtatagaaacaggaaagacaaactataatacttgttatacagctggagtatgtttacttaaagctagacaaaaaattgcagttaaaatggtccatgctgatattagtattaatatgtcaaaacatacaactttcttcggtgctataagattaggagaagcaccagcatcg

SEQ ID NO: 10784 - DNA, 1167 bp, synthetic construct
  misc_feature 1..1167: note = source = /note="Description of Artificial Sequence: Synthetic coding sequence"
  source 1..1167: mol_type = other DNA
atggggtatcccgaagtcgaacggcgagaactactaccagccgcagctccccgggaaaggggttcacaaggatgtggatgcgggggagcaccagcccgcgcgggcgaggggaacagctgtctgctgtttcttggattcttcggcctaagcctggctttgcaccttcttacgctgtgttgttaccttgaacttagatcagagctgcggcgggaacgtggcgctgaatctcgtctgggaggctccgggaccccagggacaagcggcactctcagctctctgggaggactggacccagatagccccatcacctcccatctgggccagccgtcacccaagcaacagcccctggagccaggcgaggccgccttacacagcgatagccaggacggccatcaaatggcactgttgaattttttcttccctgatgaaaaaccatactccgaggaagaatccagaagagtccgacgaaacaaacgctctaaatccaacgaaggcgcagatggcccagtgaaaaacaagaagaagggaaaaaaggcggggccccctggcccaaacggaccaccagggccaccgggccctccgggaccacagggccctcctggcattcccgggatccccggaatccccgggactacagtgatggggcctcccggcccccccggccctcccggccctcagggtccaccggggttacagggcccatctggagccgccgacaaagctggaacccgcgaaaaccagcctgctgtcgtgcatttgcagggtcagggaagcgccatccaggtgaagaacgatctgtccggcggggtccttaatgactggtcgaggattacgatgaaccccaaagtgtttaagttgcaccctcggagtggcgaactggaggtgcttgtagacgggacctactttatctactcacaagtgtattatattaattttactgactttgcctcatacgaggtggttgtggatgagaaaccatttctgcagtgtacgcgttcaattgaaactggaaagactaattataatacatgttatacagctggggtctgcttactcaaagctcgacagaaaattgctgtcaaaatggtgcatgccgatatctctatcaatatgtccaagcacacgacattcttcggcgccatccggcttggtgaggcccctgcctca

SEQ ID NO: 10785 - DNA, 1167 bp, synthetic construct
  misc_feature 1..1167: note = source = /note="Description of Artificial Sequence: Synthetic coding sequence"
  source 1..1167: mol_type = other DNA
atgggttaccctgaagtggagagaagagaactgcttccggcagcggcacctagagaaagagggagccaaggttgtggttgcggcggtgccccagcacgtgcaggcgaaggcaactcctgtcttttgtttctcgggtttttcggtttgtcgctggcacttcacctgttgacgctttgttgctaccttgagctgcgctccgaactgcgcagagagcggggagcagaaagccgcctgggaggatcaggaacccccggcactagcggtactttgtcctccctggggggactggatccagactcgcctatcacctcgcatcttggacaaccgagccccaaacagcaacctcttgagccaggcgaagccgctttgcattcagatagccaagacgggcaccagatggcattgttgaacttctttttccccgatgaaaagccttactcggaagaggaatcgcggcgggtgagaaggaataagcgatcaaaatcgaacgagggtgctgatggacccgtgaagaacaaaaagaagggaaaaaaggcaggacctcccggtcccaacggcccccctggccctcctgggccacctgggcctcaaggaccacctggaatcccagggattccaggaatacccggaaccactgtcatgggaccaccaggtccacctggccctccaggtccacaaggaccaccgggactgcaggggccatcaggtgcagcggacaaagctggtacccgtgaaaaccaaccagcagtcgtgcaccttcaaggccagggatcagctatccaagtcaaaaatgacttgtctggcggcgtgctgaatgattggtcacgaatcaccatgaaccccaaggtctttaagctccatccccggtcaggcgaactggaggtgctggtggatgggacttacttcatctacagccaggtgtactacattaactttaccgactttgcgtcgtacgaagtggtggtagacgagaagccgttcctccaatgtactaggagcatcgaaactggaaagactaactacaacacgtgctatactgctggagtctgtctgctgaaggcccgtcagaaaatcgcagtcaagatggtgcatgccgacatctcgattaacatgagcaaacataccaccttttttggtgccattagactgggagaggcaccagcatca

SEQ ID NO: 10786 - DNA, 1167 bp, synthetic construct
  misc_feature 1..1167: note = source = /note="Description of Artificial Sequence: Synthetic coding sequence"
  source 1..1167: mol_type = other DNA
atgggctacccggaggtggagagaagggaactcctgcctgcagccgcgccgcgggaacgcgggagtcaggggtgcggttgtggtggcgctccggctcgcgccggcgaggggaacagttgcctgttgttcctagggtttttcgggctgtctctggctctgcacctgctaactctatgctgctaccttgaactccgttctgaacttaggagagagaggggagcagaatctagactgggggggagtggaactcccggcacttccggaacccttagttccctgggaggtctggatccagactccccaataaccagccacctcggacaaccgtcccccaagcagcagccattggagccaggagaggctgcactccacagcgatagccaagatggacatcagatggctctgttaaattttttctttcctgacgagaaaccctactccgaagaagagtctaggcgcgtcagacggaataagcggagtaaatccaatgagggggccgacgggcctgtaaaaaacaagaagaaaggtaagaaagccgggcctcccggtcccaatggcccccccggcccgcctgggcctcctggtccccagggccctccggggatacccggaattcctggtattccaggcacaactgtcatgggccctccgggaccaccaggtccgcctggccctcaggggccaccagggctgcagggcccttctggggcagcagataaagccgggacgcgggagaaccagccagcagttgtccacctgcagggccagggttctgctatccaagtgaaaaacgacctgtccgggggcgtcctcaacgactggtcccggattacaatgaatccaaaagtgttcaaactgcatcctagatccggggaactcgaggtcttggtggacgggacttattttatttattcacaggtgtattacattaactttacagattttgccagttacgaggtggttgtggacgagaagccttttctgcagtgcaccaggtcaatcgaaaccggaaaaaccaactacaatacctgctacacggctggggtatgtctgttgaaagcacgccagaaaatagcggtcaaaatggtgcatgctgatatctccattaacatgtccaaacacactaccttcttcggcgctattcgcctgggcgaggcacctgctagc

SEQ ID NO: 10787 - DNA, 1167 bp, synthetic construct
  misc_feature 1..1167: note = source = /note="Description of Artificial Sequence: Synthetic coding sequence"
  source 1..1167: mol_type = other DNA
atgggatatcctgaagtggagcggagggagctgctacctgccgcagcccctcgagaacgtggatctcagggttgcgggtgtggaggggctcccgcccgggccggcgaaggaaactcgtgcttgctgtttctcggcttcttcggtttgtccctagccctgcacctcctgaccctgtgttgctacctggagttgcggagtgagctccgtagggagcgtggggcggagtcgaggttgggtggttccggtacccctggaacctctggaacgcttagctcactggggggtctcgatccggatagtcccataacttcccatcttggccagccttcaccaaaacaacagccgctggagcctggcgaggctgcactacacagtgacagtcaggacggccatcagatggccctgctcaacttctttttcccagatgaaaaaccctactccgaggaagaatctcgcagggtaagacgcaacaagagatctaaaagcaatgagggcgctgacgggcccgttaagaacaagaagaaaggcaaaaaggctggcccgcccggcccaaacggtccccctggacccccaggaccgcccggcccccaggggccccctgggattcccggcatccctggaatcccaggaacaacagtcatgggacctcctgggccccccgggccccctggaccacaggggccaccaggactgcagggacccagtggcgccgcagacaaggcggggacaagggagaatcagccagcggtggtgcacctccagggccagggcagcgccattcaggtgaagaatgatttaagcggcggagtgttgaatgattggagcaggatcactatgaatccgaaagtgtttaaactgcaccctagatctggcgaactcgaggtcctggttgacggcacgtattttatctacagtcaggtgtattatattaatttcaccgatttcgctagctacgaagtggtggtggatgagaagcccttcctccagtgcactcgatctatcgagaccggcaagactaattataacacatgttataccgccggggtctgccttcttaaggcccgccagaagattgcagtcaagatggttcatgccgatatctcaattaacatgagtaaacatacaaccttctttggcgcaatcaggcttggtgaggccccagccagc

SEQ ID NO: 10788 - DNA, 1167 bp, synthetic construct
  misc_feature 1..1167: note = source = /note="Description of Artificial Sequence: Synthetic coding sequence"
  source 1..1167: mol_type = other DNA
atgggataccctgaggtggaaaggcgggagcttcttcctgcggcagcacctagggaacgagggagccaaggttgtggatgcggaggcgcaccagcacgcgccggggaaggaaactcatgcctgctctttctgggcttttttggcctctcacttgcgctgcatctccttaccctgtgttgttaccttgaacttcgatcagagctgcgtagagaacgtggagccgagtcccgcctgggtgggagcggtacccccggaacgtccggaactctctcatcgcttggaggacttgatcctgattcacctattactagccacctcgggcaaccttctccaaaacagcaacctttggaacccggagaagcagcactgcactccgatagccaggacggacaccagatggcgctcctgaacttctttttcccagatgagaagccatactcggaggaagaaagcagaagagtgagaagaaataagagatcgaagtcaaatgaaggtgcagatggcccagtgaagaacaagaaaaagggcaagaaagcgggacccccggggccaaacggaccacctggcccccctggccccccaggtccacaaggaccacctgggattccgggaatcccggggattccagggaccactgtcatgggcccacctggtccgcctggaccgccaggacctcaaggccctcctggattgcaaggcccaagcggagcggccgataaggccggaacccgcgaaaaccaaccagcagtcgtgcatctgcaaggtcagggctcggcgattcaagtaaagaacgacctttccggaggcgtgcttaacgattggtcccggattactatgaaccctaaggtgttcaagctgcatccccgctcgggtgagctcgaggttctggtcgatggtacttactttatctattcacaagtgtactacattaactttaccgatttcgctagctacgaggtggtggtcgatgaaaaaccatttttgcagtgcaccaggtccattgaaaccggtaagactaactacaatacttgttacaccgctggcgtctgcctgcttaaggccaggcaaaagattgcggtcaagatggtgcatgcagacatttcgataaacatgtccaagcacaccacctttttcggtgcaatcaggcttggagaggcgcccgcttcc

SEQ ID NO: 10789 - DNA, 1167 bp, synthetic construct
  misc_feature 1..1167: note = source = /note="Description of Artificial Sequence: Synthetic coding sequence"
  source 1..1167: mol_type = other DNA
atggggtacccagaagttgaacgtcgggagctgttgcctgcagccgcgcctagagaacggggcagccagggttgcggctgtggtggagcgccagcacgcgctggagaaggtaactcatgccttctttttctcggattctttggcctgtcgcttgctctccaccttctgaccctttgttgttatcttgaacttagatcggaattgcgcagagaaagaggcgctgaatcaaggcttggggggtccggaacccctggaacgtccggaacgctcagctccctgggaggacttgaccccgattccccaattacttctcacctcggtcagccaagccccaagcaacagcctctcgaacccggcgaggcagcgctgcactctgattcccaggacggccaccaaatggcccttctgaacttcttttttcctgacgaaaaaccatactcagaagaagaaagccgccgcgttaggagaaacaaaagatcgaagagcaacgagggagcagatgggcctgtgaagaataagaagaagggaaagaaggccggcccacctggccctaacggtccccccggtccaccgggtccgccaggaccacaagggccacccgggatccctgggattcctggcattccaggtaccacggtgatgggtccccctgggccaccaggtcctcctggacctcaaggccctccaggcctccaaggtccttctggggcagcggataaggctggtacccgtgaaaatcaaccggccgtggtccatctccagggccagggaagcgccatacaagtgaagaacgacctgtcagggggagtcttgaatgattggtcacgtataacgatgaaccccaaggtgtttaaactgcatccccggtcgggagagctggaagtgctcgtggacggcacctacttcatttactcgcaggtgtactatatcaactttactgatttcgcatcatatgaggtggtggtcgatgagaagccatttctgcagtgcactcgatcaattgagactggcaagaccaactacaacacttgttacaccgcaggagtctgccttctgaaggcacgtcagaagatcgcagtcaaaatggtgcatgccgacatttcaataaacatgtcgaagcatactaccttctttggggcaatacgcctcggcgaagcacctgcgtca

SEQ ID NO: 10790 - DNA, 1167 bp, synthetic construct
  misc_feature 1..1167: note = source = /note="Description of Artificial Sequence: Synthetic coding sequence"
  source 1..1167: mol_type = other DNA
atgggatacccagaagtggagcgaagggagctgctgccagccgccgcccctcgcgaaaggggctcccagggatgcggctgcggaggagcaccggcgcgggcaggcgagggcaattcctgcctgttgttcctgggattcttcggtctttcactggccctgcacctcctcactctctgttgctacctggaacttcgcagcgagttgcgacgagagcggggagccgaatctcgcctgggaggaagcggcactccggggacttccgggactctgtcgtcactgggaggacttgatcctgactcaccgattacttcgcatctgggccagccatccccgaagcagcaacccctcgagccgggagaagccgccttgcattccgatagccaggacggacaccagatggccctcctgaacttcttctttccagacgagaaaccctactcggaagaagaatccagacgcgtgagacgcaacaagcggagcaaatccaatgaaggggccgacggaccagtcaagaacaagaagaaaggcaagaaggctggtccgccgggaccaaatgggccgccgggcccgccaggccctccgggcccacaaggcccaccaggtataccgggcattcccggcattcccggtaccaccgtcatggggcctccagggccgcccggtcccccgggaccgcaaggaccacctgggctccaaggcccgtcgggcgcggccgacaaagctggaacccgggagaaccagccggcagtagtgcatctccagggacaggggagcgcaatccaggtgaagaacgatctctctggaggggtccttaacgactggtctaggatcaccatgaatccgaaggtctttaagctccacccgcggtcaggagagttggaggtcctggttgatggaacctatttcatctacagtcaagtgtactacatcaacttcaccgatttcgcgagttacgaagtggtggtggacgaaaaacctttcctgcaatgcactagatcaatcgagactggcaagacgaactacaacacctgctataccgctggtgtgtgtttgctcaaggcacggcagaagatcgctgtgaaaatggtgcacgctgacatttcgatcaatatgagcaagcacaccaccttttttggcgcgatccgactgggggaggcgcctgcgtcc

SEQ ID NO: 10791 - DNA, 579 bp, synthetic construct
  misc_feature 1..579: note = source = /note="Description of Artificial Sequence: Synthetic coding sequence"
  source 1..579: mol_type = other DNA
atgggggtccacgaatgtcctgcttggttgtggctgttattgagtctgctgagtttgcctttggggctccccgtattgggtgcgcccccccggctgatctgcgactcacgtgtacttgagaggtacctactggaggcgaaggaagctgaaaacatcaccacagggtgcgccgagcactgcagcctcaacgagaacatcactgtgccagataccaaagtgaatttttacgcctggaaaagaatggaagtgggtcagcaagccgtcgaagtgtggcagggattagcactattgagtgaagcagtgctcaggggccaagctttgctggttaattcctctcagccatgggagcccctgcagctgcacgtggataaagccgtgtccgggcttcgttccctgacaaccttgctgagagcgctaggagcacaaaaagaagccatcagcccccctgacgcagcgagcgccgcacccctccgtacgatcactgcagacacctttcgtaagctcttcagggtttactccaattttctaagaggaaaactgaaactttacacaggcgaggcgtgtagaaccggcgaccgg

SEQ ID NO: 10792 - DNA, 579 bp, synthetic construct
  misc_feature 1..579: note = source = /note="Description of Artificial Sequence: Synthetic coding sequence"
  source 1..579: mol_type = other DNA
atgggtgtgcacgagtgtccagcttggctctggctgctcctgtccctgctgagcttgccgcttggcctcccggtgctcggggctccgcctaggctgatctgcgacagccgcgtcctggagcgctacttgctggaggcaaaggaggcggagaacatcacgaccggatgtgcggagcactgctccctgaacgaaaacatcactgtgccggatactaaagtgaacttctacgcttggaagcggatggaggtcggacagcaggcagtggaagtctggcaaggactggccctgctctcggaagcggtgctgcgcggccaggcgctccttgtgaattcttcccagccgtgggaacccctgcagctccacgtcgacaaggccgtctcgggactccggtcgctcactactctgctgcgggccctcggagctcaaaaggaagccatttccccgcctgatgccgcctcagccgctcccctccgaactatcacggcggacacgtttcgcaagctgttccgcgtgtacagcaactttcttagaggcaaactgaagctgtacaccggtgaggcttgccgcacgggagataga

SEQ ID NO: 10793 - DNA, 579 bp, synthetic construct
  misc_feature 1..579: note = source = /note="Description of Artificial Sequence: Synthetic coding sequence"
  source 1..579: mol_type = other DNA
atgggcgttcacgagtgcccggcatggctttggctgctgctcagcctcctgagcctgccgctgggcctgccggtgctcggagccccgcctcggttgatttgcgattcgagagtgctggaacgctatttgctggaggctaaagaagcggagaacatcaccactggatgtgcggagcattgctcgctgaacgaaaacatcactgtgccagacactaaggtgaacttctacgcttggaagcgaatggaagtgggacaacaggcggtggaggtgtggcagggtctggccctcttgtcagaagcagtgttgcggggtcaggcactcctggtcaattccagccagccttgggagccgctgcaactccacgttgacaaagccgtcagcggattgaggagccttaccaccttgctcagggccctcggggcgcagaaggaggcgatctcacctccagatgcagcgtccgctgcaccgcttcggaccatcactgcggacacctttcggaagctctttagggtgtactcgaatttcctccgcggtaaactgaagctctacacgggcgaggcgtgccgcacgggagataga

SEQ ID NO: 10794 - DNA, 579 bp, synthetic construct
  misc_feature 1..579: note = source = /note="Description of Artificial Sequence: Synthetic coding sequence"
  source 1..579: mol_type = other DNA
atgggggtgcatgaatgccctgcgtggctgtggttgctgttgtcgttactgtcccttcctctaggcctccccgtactcggtgcacctccccgcctgatttgcgattccagagtgctagagcgctacctgttggaggcgaaggaagcggagaacattacaacaggatgcgcagagcattgcagtctgaacgagaacataacagtgcctgacacaaaggtaaacttttatgcttggaagaggatggaagtggggcaacaggcagtggaggtatggcaaggcttggctctcctatcggaggctgttctgcgcgggcaggccctgcttgtaaactctagccaaccatgggagccactccagttacatgtggataaagctgtgtcagggctgcgctcgctgacaactctcctcagggctctgggggctcaaaaagaggcgatttccccaccagacgcagcatccgctgctccactgagaacaatcaccgccgatacgtttcgaaaactctttcgtgtgtacagcaatttcctcagagggaagctgaagctgtataccggcgaggcgtgtagaaccggggaccgt

SEQ ID NO: 10795 - DNA, 579 bp, synthetic construct
  misc_feature 1..579: note = source = /note="Description of Artificial Sequence: Synthetic coding sequence"
  source 1..579: mol_type = other DNA
atgggggtgcacgaatgccctgcttggctgtggctactcctgagcctactgtctctgcccctgggcctacccgttctgggggctccaccccgtttgatttgtgattcacgggttctggagagataccttctggaagctaaggaggcagagaacattacgacagggtgcgctgagcattgctcattgaacgaaaatattactgtgcccgacacaaaagtaaacttctacgcttggaagcggatggaagtcggccagcaggcggtggaggtgtggcaggggcttgccttactttcagaagccgtgctgagggggcaggcactgcttgtcaatagtagtcaaccatgggagcccctgcaacttcacgtggacaaagccgtgtctggcttgcgatctctgacaacacttttgagggctctaggggctcagaaagaagcaatctcccctcctgatgccgcttccgccgcccctcttaggactatcaccgccgatactttccggaaacttttccgggtgtactctaatttcctgcgtggaaaactgaagctgtacactggggaagcctgtagaactggtgatcga

SEQ ID NO: 10796 - DNA, 579 bp, synthetic construct
  misc_feature 1..579: note = source = /note="Description of Artificial Sequence: Synthetic coding sequence"
  source 1..579: mol_type = other DNA
atgggcgtgcatgagtgtcctgcatggctttggctgcttctttccctgctgtcgctcccattggggctgccagtgcttggagcgccgccccggctgatctgtgattcaagagtcctggagaggtacttgctcgaagctaaggaggcggaaaacataaccaccggatgcgctgaacattgcagccttaacgagaatatcactgtgcctgataccaaggtgaacttttacgcatggaagaggatggaagtcggacaacaggcagtggaagtctggcagggactggcactcctctctgaagctgtgctgagaggtcaagccttgcttgtgaactcatcacagccctgggagcctcttcaacttcatgtggacaaagcagtctcgggtctgagaagccttaccaccctgctccgggcactgggagcgcaaaaagaggcaatttcccctcctgatgctgcatccgcggcaccactgcggaccattactgcagacacgtttaggaagttgttccgggtgtattccaattttcttagaggaaaacttaaactgtatactggtgaggcatgtagaaccggtgatcgg

SEQ ID NO: 10797 - DNA, 579 bp, synthetic construct
  misc_feature 1..579: note = source = /note="Description of Artificial Sequence: Synthetic coding sequence"
  source 1..579: mol_type = other DNA
atgggtgttcatgaatgtcccgcctggctttggctactcctctccctgttgtcgcttccgttaggcctgccagttctgggtgctccccctcgccttatctgtgattcgcgagtgctcgaaagatatttgctggaagcaaaggaggccgagaatatcacgaccggctgtgctgagcattgcagtctcaatgaaaacatcaccgttcctgacacaaaggtcaatttttacgcatggaagcgtatggaagtgggtcagcaggcggtcgaagtctggcagggccttgcactcctgagtgaagctgtccttcgcgggcaagctctgttggtcaactcgtcgcagccgtgggagcccctgcagttgcatgtggacaaagcggtgtcgggcttacgtagtctgacgacccttctgagggcacttggagcccagaaggaggcgatttcgccaccagacgccgcctcggcagcgccacttagaaccatcacagccgacacttttcgaaagctattcagagtgtactccaatttcctgcgtggtaagctgaagctttatacaggcgaggcctgccgtaccggagatcga

SEQ ID NO: 10798 - DNA, 579 bp, synthetic construct
  misc_feature 1..579: note = source = /note="Description of Artificial Sequence: Synthetic coding sequence"
  source 1..579: mol_type = other DNA
atgggcgtccatgagtgccccgcctggctgtggctgctcctgagtctcctgagtctgccactgggtctccccgtgttaggcgcgcccccgagactcatttgtgattcccgggttctggagcggtatctgctggaggccaaggaggcggagaacatcacgacaggctgtgctgaacactgctcgctaaacgagaatattacggtacccgataccaaggtgaatttttatgcctggaagcgcatggaggttggtcagcaagccgtggaagtgtggcagggactggcattactctccgaggctgtgttgagaggtcaggcactgctggttaactcctcccagccttgggagcctttgcagttgcacgtggataaggctgtttctggacttcgatcgttaactacgctcctgcgcgctctaggcgcgcagaaagaggccatttccccacccgacgccgccagcgctgccccgttgcgtacgatcacggccgataccttccgcaaactcttccgggtttacagtaacttcctgaggggcaagcttaagctctacaccggagaggcctgtaggaccggtgatcgg

SEQ ID NO: 10799 - DNA, 579 bp, synthetic construct
  misc_feature 1..579: note = source = /note="Description of Artificial Sequence: Synthetic coding sequence"
  source 1..579: mol_type = other DNA
atgggcgtgcacgaatgccccgcatggctgtggctgctgctgtcactgctctccttgcctctgggactgccggtccttggtgccccaccacgccttatctgtgacagccgcgtgctggaaaggtacctcctggaggccaaggaagccgaaaatatcaccactggatgcgcagaacactgctcccttaacgagaacattactgtgccagacactaaggtgaatttttacgcctggaagcgaatggaagtggggcaacaggcggtcgaggtttggcagggactcgcactccttagcgaagccgtcttgagaggacaggccctgctggtcaactcgtctcagccgtgggagccgttgcaactccatgtggataaggctgtgtccgggctccgcagcctgactactctcttgcgggcgctcggagctcaaaaagaggcgatctcacctccggacgcggcctcggcagccccgctgcggaccatcacggcggacaccttcagaaagctgttccgggtgtactcgaacttcctgaggggcaagctgaaactctacaccggcgaggcttgccgcaccggagatcgg

SEQ ID NO: 10800 - DNA, 579 bp, synthetic construct
  misc_feature 1..579: note = source = /note="Description of Artificial Sequence: Synthetic coding sequence"
  source 1..579: mol_type = other DNA
atgggagtgcacgagtgtccagcatggctgtggctgctcctctccctcctgtccttgcccctgggtctccctgtgctcggcgcgcccccccgcctgatctgcgacagtagggtcttggagcgctatttgcttgaagccaaagaggcggaaaatatcaccacgggatgcgctgagcactgctctcttaatgaaaacatcactgtcccggataccaaagtaaatttctacgcctggaagagaatggaggtgggacaacaggctgtggaggtttggcaaggcctggccctccttagcgaagccgttctgagaggacaagccctgctggttaacagctcacagccgtgggagcctctgcagcttcacgtcgataaagctgtgagtggccttcgctctcttaccacactcttgagagcgctcggtgcccagaaagaagccatctccccgccagatgctgcctccgccgctcctctgagaaccatcacggccgacacctttaggaagctgtttagggtctactcaaactttctgagaggaaagctcaagctctacactggagaggcctgtaggaccggtgatcgc

SEQ ID NO: 10801 - DNA, 579 bp, synthetic construct
  misc_feature 1..579: note = source = /note="Description of Artificial Sequence: Synthetic coding sequence"
  source 1..579: mol_type = other DNA
atgggggtccacgagtgccccgcttggctctggctcctcctttccttgctttcgctcccactgggactgccggtcctgggggctccgccccgcctgatctgtgacagccgggtcctggaacggtaccttctggaggctaaagaggctgagaacattacgaccggatgcgcagagcactgttccttgaatgagaatatcactgtgccggatactaaagtgaacttctacgcgtggaaaagaatggaagtgggacagcaagcagtggaggtttggcagggactggcgcttctgagcgaagcagtcctgcggggccaagccctgctggtgaactcgtcccagccatgggaaccgcttcagctccacgtcgacaaggcggtgtccggactccggtcactgactaccctcctgagggctctcggtgcgcagaaggaggcgatttccccaccggatgccgcgtccgcagccccgcttaggactatcactgctgatactttcagaaagctgttcagggtgtacagcaatttcttgcgaggaaagctcaagttgtatactggagaagcgtgccggaccggcgaccgt

SEQ ID NO: 10802 - DNA, 579 bp, synthetic construct
  misc_feature 1..579: note = source = /note="Description of Artificial Sequence: Synthetic coding sequence"
  source 1..579: mol_type = other DNA
atgggcgtgcatgaatgccccgcctggctctggctcttgctgagtttgttgtctctgccgctcggacttcccgtcctcggggctccgcccaggctgatttgtgatagccgcgtcctcgagcggtatctcttggaggccaaggaggctgagaatatcactacggggtgtgccgagcattgttccctgaacgagaacatcacggtcccagacactaaggtcaacttctacgcatggaaaaggatggaagtgggccagcaagccgtggaagtctggcaaggtctcgccctcctgagtgaggccgtactgcgcggacaggcacttttggtgaactcaagccagccatgggagcccctgcagctccacgtggacaaagctgtcagcggactgcgaagcctgaccacgctgttgcgagcactcggggctcaaaaggaggccatatccccgcctgacgctgcgtccgctgccccacttagaacaataacagcggacacgtttcgaaagttgttcagagtgtactcaaacttcctgcgcggaaagctcaagctctatactggcgaagcttgcaggaccggagaccgc

SEQ ID NO: 10803 - DNA, 579 bp, synthetic construct
  misc_feature 1..579: note = source = /note="Description of Artificial Sequence: Synthetic coding sequence"
  source 1..579: mol_type = other DNA
atgggagtgcatgagtgtcctgcttggctctggctcctcctgagtcttttgtcgctgccactggggctgccagtgctgggtgcgccccctcggctcatctgtgatagcagagtgctcgagcgttatctgctcgaggcaaaggaagcagaaaacatcactacgggatgcgccgaacactgtagcctgaatgagaacattactgtgccagacactaaggttaacttctacgcctggaagcgtatggaggtgggtcaacaggctgtcgaagtgtggcaaggactcgcccttctctccgaagcagtgctgcggggacaagcacttctcgtcaattcgtcacaaccctgggaacctcttcagctgcatgtggacaaagcggtatcggggctcaggagcttgactacccttctcagagcgcttggggcccagaaggaggctatttcaccacctgacgcggcttcggcagccccactcagaaccatcaccgcagatacctttcgcaaattgtttcgcgtctacagcaacttcttgcggggcaaattgaaactgtacaccggcgaggcctgccggacgggagatcga

SEQ ID NO: 10804 - DNA, 579 bp, synthetic construct
  misc_feature 1..579: note = source = /note="Description of Artificial Sequence: Synthetic coding sequence"
  source 1..579: mol_type = other DNA
atgggcgtgcacgagtgcccggcatggctgtggcttcttctctccctgctgagcctgcctcttgggctgccagtgctgggagcaccaccaagactcatttgtgattccagagtcctcgaacgatacctccttgaagctaaagaagcggaaaacatcacgaccggctgcgcagagcactgctctctgaatgaaaacattaccgtgcccgatacgaaggtcaacttttacgcatggaagagaatggaagtcgggcaacaagccgtggaagtctggcaaggactggcactcctgtcagaagccgtcctccggggacaggcccttttggttaactcgtcacagccttgggagccgctgcagctgcacgtcgataaagcagtctccggactccgctcactgaccaccctgcttagggcgcttggcgcacaaaaggaggcaatctccccacccgacgccgcatccgctgcaccacttcggactattactgcagataccttccgcaagctcttccgcgtctactcaaactttcttcggggtaagctgaaactttacaccggagaagcatgtagaaccggggataga

SEQ ID NO: 10805 - DNA, 579 bp, synthetic construct
  misc_feature 1..579: note = source = /note="Description of Artificial Sequence: Synthetic coding sequence"
  source 1..579: mol_type = other DNA
atgggagtgcatgagtgtccggcctggttgtggttattactttccctgctttctcttccgcttggcctccccgtcctgggtgctccgccgcgtttaatatgtgacagtcgggtcctggaacgttatctcttggaagccaaggaagctgagaatatcacaacgggctgcgctgagcactgctctcttaacgagaacatcacggtcccggatactaaagtgaacttttacgcttggaaacggatggaagtcggacaacaggctgtcgaagtatggcaaggactcgctctgttgtcagaagcggttctccggggacaggcactgcttgttaattcatcacaaccttgggaaccgttacaacttcatgtggataaggccgtttctggtcttaggtcactgactactcttctgcgtgcgcttggagcacagaaagaagccattagtccaccagatgctgcaagcgccgctccccttagaaccattacagcagacacctttcgcaaactgtttcgggtatattcaaacttcctccggggtaaactcaagctatataccggagaagcgtgtcgtactggggatcgc

SEQ ID NO: 10806 - DNA, 579 bp, synthetic construct
  misc_feature 1..579: note = source = /note="Description of Artificial Sequence: Synthetic coding sequence"
  source 1..579: mol_type = other DNA
atgggggtccacgagtgcccagcatggctttggcttctactgtctctgctgagcctgcccctgggcctgcccgtgctgggcgctcctccgagactgatttgtgactcccgagtgctcgagcgttatctgctggaagccaaggaagcggaaaacattacaacaggatgcgccgagcactgctcgctgaacgagaacatcacagtgccggatacgaaggtcaacttttacgcctggaaacggatggaggtggggcaacaggctgttgaggtttggcaagggttggctctcttatcagaggccgtgttgcgggggcaggcacttcttgttaactcttcccagccctgggagccccttcagctgcacgtggataaggctgtgagcgggttgaggtcactgacgactcttctacgcgctctcggcgctcaaaaggaggcgatctcgccccccgatgccgctagcgcggcaccattaaggactattaccgccgatacattcagaaagctgttcagggtctactctaatttcctcaggggcaagctcaaattatataccggggaagcctgcagaacgggagatcgt

SEQ ID NO: 10807 - DNA, 579 bp, synthetic construct
  misc_feature 1..579: note = source = /note="Description of Artificial Sequence: Synthetic coding sequence"
  source 1..579: mol_type = other DNA
atgggagtgcatgaatgtccagcctggctctggctcctgctgagtctattgagcctacccttgggtcttcccgtccttggcgctccgccccgcctcatttgtgattcacgggttttggaacgatatctcctggaagccaaagaggccgaaaacattacgacgggatgcgcggagcattgctctcttaacgagaacatcaccgtcccagatacgaaagtaaacttttatgcatggaaaagaatggaggtgggccagcaggcagtggaggtctggcagggcttggctctgctgtctgaggcagtgctgcggggacaggcactgttggtgaattcgtcacagccgtgggagccactacaattgcacgtggacaaggccgtttctggcctccgcagtttgaccactcttcttcgggcactcggggcacagaaggaagccatttctccccctgacgcggctagtgcagctccactacgaaccattaccgcagacacgttcagaaagctgttccgagtctattcaaattttctcagaggtaagttaaaactgtacaccggcgaagcctgcaggacaggcgatcgc

SEQ ID NO: 10808 - DNA, 579 bp, synthetic construct
  misc_feature 1..579: note = source = /note="Description of Artificial Sequence: Synthetic coding sequence"
  source 1..579: mol_type = other DNA
atgggagtacacgaatgccccgcatggctgtggctgctcttgagtctgctgtccctaccactcggactgcctgtgctcggagccccaccacgcctgatttgcgactcgagggtcctggagcgttacctgctggaggccaaggaggctgagaatataaccaccggttgtgcggaacactgtagtctcaacgaaaatatcactgtacccgacacaaaagtaaatttttacgcctggaagagaatggaggttggtcaacaggccgtggaagtgtggcagggacttgccctgctctcggaagcagtgcttcgtgggcaggcactcctagttaatagctcacagccgtgggagccccttcaactacatgtcgacaaggccgtctccggactacgctctctgacaacgctgctccgggccctgggtgcccagaaggaagctatttcccccccagacgccgcaagtgccgccccattgaggacgataacagccgatactttcaggaaactcttccgtgtgtattccaatttccttcgggggaaactgaagctttatacaggtgaggcatgtaggaccggggaccgg

SEQ ID NO: 10809 - DNA, 579 bp, synthetic construct
  misc_feature 1..579: note = source = /note="Description of Artificial Sequence: Synthetic coding sequence"
  source 1..579: mol_type = other DNA
atgggagtgcacgaatgtccagcatggctgtggctcctgctgagcctcctgtctctcccactcggcctgcccgttctcggcgccccgccgcgtttaatttgcgattctagagtactggagaggtacttgcttgaggccaaagaagcggaaaatataactacgggatgcgcggaacactgcagtctcaacgaaaatatcacagtgcccgacacgaaggtcaatttttacgcatggaaaaggatggaggttgggcagcaagctgtagaggtttggcaagggttggccctgctgtcggaggcagtgctgcggggccaagccctcctcgtgaactccagccagccatgggagccactacaactccacgtcgataaagctgtgagcggactacgcagtctgacaacactgctacgtgcactgggggcgcagaaggaggcaatcagccctccggacgcagcttcggctgcacctctcagaactatcacagccgacacctttaggaagctctttagggtgtacagcaactttctgcgcgggaaactgaaactttatacaggggaagcatgtaggaccggagacaga

SEQ ID NO: 10810 - DNA, 579 bp, synthetic construct
  misc_feature 1..579: note = source = /note="Description of Artificial Sequence: Synthetic coding sequence"
  source 1..579: mol_type = other DNA
atgggagtgcacgaatgcccggcgtggctgtggctgcttctgtcactgctttcactgcctctgggactccctgtcctgggtgcgccaccgaggctgatctgtgactcaagggtgctggaacgctatctgctggaagccaaagaggcagaaaacattaccactggatgcgccgagcattgctcgctcaacgagaatatcaccgtccccgacactaaggtgaacttctacgcctggaagcggatggaagtcggacagcaggccgtggaagtgtggcaagggttggcgctcctctccgaggccgtgcttcgtggccaggcccttctcgtgaactcgtcacaaccatgggagcctcttcaactgcatgtggataaggcggtgtccgggctccggtcgctgacgactctccttcgggccttgggagcccagaaggaggcgatctcgccgccggacgctgcatcagccgcgccgctgagaaccatcactgcagatacgttcaggaaactgtttcgcgtgtactcaaatttccttcggggaaagttgaaactgtacactggtgaagcctgcagaactggggatagg

SEQ ID NO: 10811 - DNA, 579 bp, synthetic construct
  misc_feature 1..579: note = source = /note="Description of Artificial Sequence: Synthetic coding sequence"
  source 1..579: mol_type = other DNA
atgggcgtccacgaatgcccagcttggctctggctattgttatccttattgtctctcccactgggcctgcctgtattgggcgccccccccagactgatttgtgactccagagtgctcgagagatatctgctggaagcaaaggaagccgagaatataacaactggctgtgctgagcactgcagtctcaatgaaaacattacggtgccggacacaaaagttaacttctatgcctggaaacggatggaagtcggccaacaagccgtggaggtgtggcaaggccttgcattgctgtcagaagcagtgcttagaggacaggcgctccttgtgaattcatctcagccctgggagcccttacagttacacgtggataaggccgtctcgggcttacgcagtttaactaccctgttaagagccctgggcgctcaaaaggaagctatttccccccccgatgctgccagtgctgctcccctcagaacgatcaccgcagatacctttcgtaagctgttccgtgtgtattccaattttctcagagggaagctgaaactctacactggtgaggcatgtcgaaccggcgataga

SEQ ID NO: 10812 - DNA, 579 bp, synthetic construct
  misc_feature 1..579: note = source = /note="Description of Artificial Sequence: Synthetic coding sequence"
  source 1..579: mol_type = other DNA
atgggagtccacgaatgtcctgcatggctctggcttctgctgtcgctgctgagcctgccacttggactgccggtgcttggtgcacccccaagactgatctgtgattcacgggtcctggaacggtaccttttggaagcaaaggaagccgagaatatcaccaccggttgcgcggaacattgttcactgaatgagaacataaccgtgccagatactaaagtcaatttctacgcatggaaaaggatggaagtcggtcagcaggccgtggaggtgtggcaaggtctggcactcctgtccgaagcagtgctcagagggcaggccctgctcgtcaactcctcgcaaccgtgggaacccctgcaactccatgtggataaggcagtgtcggggctgaggtccttgactaccctgctgcgtgctctcggagcacagaaggaagctatttcgccccctgacgcagcatcggccgcaccactgagaactattaccgcggacacctttagaaaactttttagggtctactcgaactttctccggggtaagctcaagctctacaccggggaagcctgccgcaccggagatagg

SEQ ID NO: 10813 - DNA, 579 bp, synthetic construct
  misc_feature 1..579: note = source = /note="Description of Artificial Sequence: Synthetic coding sequence"
  source 1..579: mol_type = other DNA
atgggagtgcacgagtgcccagcttggctgtggctgcttctgtctctcctttcacttcccctcgggctacccgtgctcggggctcccccccggctgatatgcgactcgcgcgtgttagaaaggtaccttctcgaagccaaggaagcagagaacattactacaggatgcgctgaacactgctcccttaatgaaaacattacagtcccggacacaaaggtgaatttttacgcttggaaacggatggaagtgggacagcaggccgttgaggtgtggcagggactcgccctcttgtcggaggcagtcttgaggggccaggcgctgctggtgaattcatcacagccatgggaaccactgcagcttcacgtggataaagctgtatctggtcttaggtccttgacaactttgttacgggcgttaggagcacagaaagaggctatctcacctccagacgccgcctctgccgctcccctaagaaccataacggccgacacgtttcgtaaattgttccgtgtgtactcaaacttcctgcggggaaaattaaaactgtacaccggcgaggcatgccgcacgggggataga

SEQ ID NO: 10814 - DNA, 579 bp, synthetic construct
  misc_feature 1..579: note = source = /note="Description of Artificial Sequence: Synthetic coding sequence"
  source 1..579: mol_type = other DNA
atgggagtccatgagtgccccgcatggctgtggctgctgctcagcctgctttcgctgccgctcggactccccgtgctcggagcaccaccacgcctgatttgcgacagtcgggtgctggaacggtacctcttggaagcgaaggaagctgagaacatcaccactggctgcgcggaacattgttcgctcaacgaaaacatcactgtccccgatactaaggtgaacttttacgcctggaagcgcatggaggtgggacaacaggccgtggaagtgtggcagggtctggccctgctgtccgaggcagttctgaggggacaggccctcttggtgaactcgagccaaccatgggaaccgctgcagctccacgtggataaagcggtgtccggattgagatccctcacgaccctgctgcgagctctgggagcgcagaaggaggcgattagcccgccagatgcggcctcggcggccccattgcgcaccatcaccgccgacacctttcggaagctgtttagagtctacagcaacttcctccggggtaagctcaaactgtacaccggggaagcatgccgcaccggcgataga

SEQ ID NO: 10815 - DNA, 579 bp, synthetic construct
  misc_feature 1..579: note = source = /note="Description of Artificial Sequence: Synthetic coding sequence"
  source 1..579: mol_type = other DNA
atgggcgtgcacgagtgcccagcctggctctggctgttgctgtccctcttgtccctgccactgggattgcctgtgcttggcgctcctcctcgcctgatttgcgactccagggtcttggagcgatacctgctggaagccaaagaagcggaaaatataaccaccggctgcgccgagcactgctcattgaacgagaacatcaccgtgcccgacaccaaggtgaatttttacgcatggaagaggatggaagtaggccagcaggcagtcgaggtgtggcaggggctggctctcctgagcgaagccgttcttagggggcaggcgctgcttgtgaattcaagtcagccgtgggaaccactgcagctgcacgtggataaggccgtaagcggcctcaggagtctcacaactctcctccgagcgctgggagcccagaaggaggctattagtccccccgacgccgcctctgctgccccgctcaggactatcaccgccgatacattccgaaagctctttagagtctatagtaactttctgcgcggaaagcttaagctgtacacaggtgaggcctgtcggacaggggatcgg

SEQ ID NO: 10816 - DNA, 579 bp, synthetic construct
  misc_feature 1..579: note = source = /note="Description of Artificial Sequence: Synthetic coding sequence"
  source 1..579: mol_type = other DNA
atgggggtgcatgaatgcccagcgtggctgtggttgcttctgtccctgctgtctctgcctctgggcctgcctgtgttaggtgcccctccccggttgatctgtgacagtcgggtgctagaacgctatctgcttgaagccaaggaagcagaaaacatcaccaccggctgcgccgagcattgctctttaaacgagaacatcacagtccctgacacaaaagtgaatttttacgcttggaagcgaatggaagtaggtcagcaagcagtggaagtttggcaagggctggcacttctgtccgaagccgttttgcgcggccaagcactcctggtcaactcttcccagccctgggaacccctgcaactgcatgtcgataaggccgtctccggcctgaggtccctgaccacactgctcagggcactgggtgcgcaaaaggaggccatcagtccaccagatgccgccagtgctgcgccactccgcaccataactgcagacacgttccgaaagctttttcgcgtgtatagtaattttttacgcgggaaattgaaactatataccggagaggcctgtcggacgggagacaga

SEQ ID NO: 10817 - DNA, 579 bp, synthetic construct
  misc_feature 1..579: note = source = /note="Description of Artificial Sequence: Synthetic coding sequence"
  source 1..579: mol_type = other DNA
atgggcgtgcatgagtgtcccgcatggctctggctgcttctgtcccttctttctcttcctctgggactcccagtcctcggtgcacctccaaggctgatttgtgattcacgagtcctggaaagatacctgcttgaagcaaaggaagctgaaaacattaccactggatgcgctgagcactgtagcctgaacgaaaacataactgtgccagataccaaggtgaacttttacgcctggaagcgaatggaagtggggcagcaggccgtggaagtttggcaaggtctggcccttttgagcgaagcagtgcttagggggcaagcacttcttgtcaactcaagccagccgtgggaaccactccaactccacgtggataaggctgtcagtggactgagatcgctgaccactcttctgcgggcactcggagcccagaaagaagcaatatcgccccccgacgccgcatcggccgctccccttcggactatcacggcggatacctttcggaagctgtttcgggtgtactcaaacttcttgcgcggtaagttgaagctgtacactggagaggcgtgccgcacgggagataga

SEQ ID NO: 10818 - DNA, 579 bp, synthetic construct
  misc_feature 1..579: note = source = /note="Description of Artificial Sequence: Synthetic coding sequence"
  source 1..579: mol_type = other DNA
atgggagtacacgaatgtcctgcctggctgtggctgctgttaagcctgctttcactcccgctggggctgccagttttaggtgccccgcctcggttgatatgcgatagccgcgttttggaacgctatcttcttgaagcgaaagaggccgagaatatcaccaccggctgcgctgaacactgttctctcaatgaaaatattaccgtgccggacactaaagtcaatttctacgcttggaagcgaatggaggtcggccagcaggcggtggaagtgtggcagggtctggccctgctgagcgaggcagttttgcgcggccaggctctgctggttaactcaagccaaccgtgggagccgctgcagctgcacgttgataaagccgtctccggcctccgctccctgactactctgctgcgcgctctcggcgctcagaaagaagcaatcagccctccggacgcggccagcgcagcaccactgagaaccatcaccgcggacacatttcgcaagctgtttcgcgtttacagcaatttcctgcgtggcaagctaaagctctacacgggtgaggcctgtcgcaccggggaccga

SEQ ID NO: 10819 - DNA, 579 bp, synthetic construct
  misc_feature 1..579: note = source = /note="Description of Artificial Sequence: Synthetic coding sequence"
  source 1..579: mol_type = other DNA
atgggcgtccacgaatgtccagcatggctgtggctgttgctctccctcttgagcctgccgcttggcttgcctgtgttgggtgcgcctcctcggctgatctgcgactcccgggtcctcgaaagatacctgctcgaagccaaggaagctgaaaacatcaccaccggatgcgcagaacattgctccctgaatgaaaacattaccgtgccggacaccaaggtgaatttctatgcctggaagcggatggaggtgggccagcaggcggtcgaggtctggcagggtctggccctgttgtccgaggccgtcctgcgcgggcaggccctgctggtgaactcgtcgcagccgtgggagccactgcagctgcatgttgataaagcagtgtctgggctcaggtccctgaccaccctgttgcgcgcgcttggagcccaaaaggaggctatctcacccccagacgctgcgtccgccgcaccgcttaggaccatcactgccgataccttcaggaaattgtttcgggtgtactccaacttcctgcggggtaagctgaagctgtacaccggcgaggcgtgccgcactggcgatcgt

SEQ ID NO: 10820 - DNA, 579 bp, synthetic construct
  misc_feature 1..579: note = source = /note="Description of Artificial Sequence: Synthetic coding sequence"
  source 1..579: mol_type = other DNA
atgggtgtgcacgagtgccctgcatggctctggctattgctgtctttactgtccctgcccctaggtctgcctgtgttgggggcccccccgaggctcatttgtgattcaagagtcctagagcggtacctcctggaggctaaggaggccgagaatattactacagggtgcgccgaacattgctccctgaacgaaaacattacggtgccagacacaaaagtgaacttctacgcatggaagcgaatggaagtgggccagcaggcggtggaggtctggcagggcttagcgttgctgtccgaggccgtactgcgcggacaggctctcctcgttaattctagccagccatgggaaccgctgcaactccacgtagacaaagccgtatcggggctgagaagtctgaccaccctgctgcgggcactgggagctcagaaagaagctatttcaccccctgatgcggccagcgcggcacccctgcggacgattaccgccgacactttccgcaaactgttccgagtttatagtaactttctccgaggaaagctgaagctgtataccggtgaagcctgcagaaccggtgatcgg

SEQ ID NO: 10821 - DNA, 579 bp, synthetic construct
  misc_feature 1..579: note = source = /note="Description of Artificial Sequence: Synthetic coding sequence"
  source 1..579: mol_type = other DNA
atgggagtccacgaatgtccagcttggctgtggctcctgctctccctactctctcttccattagggctccccgtattaggggctccacccaggctgatatgtgattccagggttttggaaagatatctgctggaagctaaagaagctgaaaacataactactggatgtgccgagcattgctctctcaatgaaaatatcacagtaccagatacaaaggtaaacttttatgcatggaaacggatggaagtggggcagcaagctgtggaagtatggcaggggcttgcccttctctctgaagccgtccttcgggggcaggccctactcgttaactctagtcagccatgggaacccctacagctccacgtcgataaagcagtatccgggctccgtagtcttacaacattattaagagctcttggggcacaaaaggaagccatcagtccacccgatgctgcgagtgccgcacccctccgaactattactgcagatacattcagaaagctttttcgggtgtattccaatttcctgaggggaaaacttaagttgtatactggagaagcttgccggactggagatcgg

SEQ ID NO: 10822 - DNA, 579 bp, synthetic construct
  misc_feature 1..579: note = source = /note="Description of Artificial Sequence: Synthetic coding sequence"
  source 1..579: mol_type = other DNA
atgggcgtccatgagtgccccgcatggctctggctcctgctttctctgctgagtctaccgctcggcctgcccgtcctgggcgcccctcctcgcttgatatgcgattcccgcgtgttggaaagatacctgcttgaagccaaggaggccgagaacattaccactggctgcgccgagcactgctccctcaacgagaacatcaccgtcccagacactaaggtgaatttctacgcctggaagcgcatggaggtggggcagcaagccgtcgaagtttggcagggtctggcattgctgagtgaggcggtcctgcggggacaggcccttctggtgaactcatcccagccctgggagccgctgcaacttcacgtggataaagcggtgtccggccttagaagcctgaccaccctactccgagcattgggagcccagaaggaggccatttccccgccggacgccgcttcagcggcccccctacgaacaataactgcggatacttttcgcaagctcttccgggtgtattccaactttctgagagggaagctaaaactttacaccggggaagcatgcagaactggagatagg

SEQ ID NO: 10823 - DNA, 579 bp, synthetic construct
  misc_feature 1..579: note = source = /note="Description of Artificial Sequence: Synthetic coding sequence"
  source 1..579: mol_type = other DNA
atgggtgtgcacgaatgtcctgcatggctgtggttgttactgtcactgctgagcctccccctcggactccccgtgctgggggcgcctcccaggctgatctgcgactctagagttttagagaggtacctgctagaagctaaggaggctgagaacatcaccacaggttgtgcggaacactgcagccttaatgagaatataactgtccccgataccaaggttaacttttatgcctggaagcggatggaagtaggacagcaagccgtggaagtgtggcaaggcctggctctgctaagcgaggcagtgcttcgagggcaggccctcctggtcaactcttcccagccttgggaacctctacagttgcatgtggacaaagcagtgagcggcttgaggtctctgacaaccctgttgcgggccctgggggctcagaaggaagccatttcaccccccgatgcggcgagtgctgctccactgaggaccatcacagcagatacgttcaggaaactttttagggtgtacagcaacttccttcgtggaaagctgaaactgtatacgggcgaggcctgtagaaccggggatcgt

SEQ ID NO: 10824 - DNA, 579 bp, synthetic construct
  misc_feature 1..579: note = source = /note="Description of Artificial Sequence: Synthetic coding sequence"
  source 1..579: mol_type = other DNA
atgggtgtgcatgaatgccctgcttggctgtggctgctgttgtctctgttatccctgccacttggcctgcccgtgttgggggctccccccaggttaatctgcgattcacgtgtgcttgagcggtatctgctggaggctaaagaggcggagaacattaccaccggatgcgccgagcattgtagtctgaatgaaaatatcactgtgcctgacactaaagtgaatttctacgcctggaagagaatggaggtgggacagcaggcagtagaggtatggcagggcctggccttattgtcagaagccgtgctgagaggacaagcactgctggtgaactctagccagccttgggagcccttgcagctgcacgttgacaaagcagtgagcggtctgaggtccttgaccactcttctccgagctctgggagcccaaaaggaggctattagtcctccagacgccgccagcgccgcaccactgcgaacaattactgcagacacatttcgtaagctctttcgggtctacagcaactttctccgtggtaagttgaagttatatacaggggaagcatgccgtaccggagatcgg

SEQ ID NO: 10825 - DNA, 579 bp, synthetic construct
  misc_feature 1..579: note = source = /note="Description of Artificial Sequence: Synthetic coding sequence"
  source 1..579: mol_type = other DNA
atgggtgtacatgaatgtccggcgtggctatggctactattatcgctactatcgctaccgctaggtctaccggtattaggtgcgccgccgcgattaatatgtgattcgcgagttttagaacgatatttattagaagcgaaagaagcggaaaatataacgacgggttgtgcggaacattgttcgttaaatgaaaatataacggttccggatacgaaagttaatttttatgcgtggaaacgtatggaagttggtcaacaagcggtagaagtatggcaaggtttagcgctattatcggaagcggttctacgaggtcaagcgctattagttaattcgtcgcaaccgtgggaaccgctacaattacatgtagataaagcggtttcgggtttacgatcgttaacgacgctactacgagcgttaggtgcgcaaaaagaagcgatatcgccgccggatgcggcgtcggcggcgccgctacgtacgataacggcggatacgtttcgtaaattatttcgtgtttattcgaattttctacgaggtaaattaaaactatatacgggtgaagcgtgtcgtacgggtgatcga

SEQ ID NO: 10826 - DNA, 579 bp, synthetic construct
  misc_feature 1..579: note = source = /note="Description of Artificial Sequence: Synthetic coding sequence"
  source 1..579: mol_type = other DNA
atgggtgtgcacgaatgccctgcatggctgtggctgctgctgtcactgctgtctcttccgctcggactgccggtcttgggtgctccaccaaggctgatttgcgattcgcgggtgctggaacggtacctgttggaagctaaggaggctgaaaacataaccaccggatgcgccgaacattgttcgcttaatgaaaacattaccgtgccagacaccaaagtcaacttttatgcctggaaaagaatggaggtggggcagcaagcagtggaggtgtggcagggcttggccctcctctctgaggcggtcctccgcggacaggccctcctggtcaattcgagccagccgtgggaaccgctccaacttcacgtggacaaggcggtaagcggactccgcagtttgacgaccttgctgcgggcactgggcgcacagaaagaggctatctccccgcctgacgccgcctcggccgcacctctccgaactatcactgctgacactttcagaaagctgttccgcgtgtattccaatttcttgcgcggcaagctgaagctgtacactggggaagcctgccggacgggagatcgg

SEQ ID NO: 10827 - DNA, 579 bp, synthetic construct
  misc_feature 1..579: note = source = /note="Description of Artificial Sequence: Synthetic coding sequence"
  source 1..579: mol_type = other DNA
atgggagttcacgaatgtccagcgtggttatggctcctgctcagtctgttatccctgcctctcgggctaccagtgcttggcgcgcccccaagattgatttgcgattcacgggtgctcgaacgatatcttcttgaggcgaaggaggccgagaatatcactacgggctgtgcagaacactgtagccttaacgaaaacattacagttccagacactaaagtgaatttctacgcttggaagaggatggaagtgggccagcaggcagtggaggtgtggcagggactggcgctgctatccgaggctgtgcttcggggacaagccctattagtgaattcaagccagccatgggagcccctccagctgcatgtggacaaagccgtctctggtctcagatctctgaccacccttctaagagctctgggagcacaaaaagaggcgatctctccacccgatgctgcctctgcagcgcctctcagaaccattacagcggacacatttcggaaactatttagggtgtattctaactttctgagaggcaagctgaaactgtacacaggcgaggcttgtagaaccggggacagg

SEQ ID NO: 10828 - DNA, 579 bp, synthetic construct
  misc_feature 1..579: note = source = /note="Description of Artificial Sequence: Synthetic coding sequence"
  source 1..579: mol_type = other DNA
atgggcgtgcatgaatgtccagcttggctgtggttgctcttgtcccttctatctttacctctgggtctcccggtgctgggagcgccccctcgactgatctgcgattcaagggtcctcgaacgttatttactggaagctaaggaagcggagaacatcactactgggtgtgctgaacactgcagtcttaacgaaaacatcacagtcccggacactaaagtgaatttctacgcctggaagcgcatggaagtggggcagcaggcagtggaggtctggcaggggcttgctctactcagtgaggccgtcctcagaggtcaggcactgttggtcaactctagtcagccttgggagcccttacagttgcacgttgataaagctgtgagcggcttgaggagtctgacgactctgctccgcgcactcggcgcccaaaaggaagcaatctcccctccggatgcagcttccgccgccccgctgaggaccattactgctgatacatttcggaaattattccgagtgtattccaactttctgcggggcaaacttaagttgtacactggggaagcctgccgcacaggggatcgg

SEQ ID NO: 10829 - DNA, 579 bp, synthetic construct
  misc_feature 1..579: note = source = /note="Description of Artificial Sequence: Synthetic coding sequence"
  source 1..579: mol_type = other DNA
atgggagtccacgaatgcccggcgtggctctggttgttgctctcactgctcagccttccactgggactgcctgtgttgggagctccaccgcgcctgatttgtgattcacgcgtcctcgagaggtacctgttggaagccaaggaggcggagaatatcaccacgggatgtgcggaacattgctccctgaatgagaacatcaccgtcccggacaccaaggtgaacttttacgcctggaaaagaatggaagtgggacaacaggcggtggaagtgtggcaagggctcgccttgctgtccgaggcagtgctgaggggacaggcgctgctggtgaattccagccagccgtgggagcccctgcaactgcacgtggataaggccgtgagcggtctgcgatcactgactaccctgcttcgcgccctgggtgcccaaaaggaggccatctcgcccccagacgcggcatcagccgcccctctccgcaccatcaccgctgatactttccggaagctcttcagagtctactcgaatttcctgcgcggaaagctcaagctgtacactggtgaagcgtgccgcaccggtgaccgc

SEQ ID NO: 10830 - DNA, 579 bp, synthetic construct
  misc_feature 1..579: note = source = /note="Description of Artificial Sequence: Synthetic coding sequence"
  source 1..579: mol_type = other DNA
atgggcgtgcatgagtgtcccgcatggctgtggcttttattgtccctcctgagcctcccacttggcctgcccgtgctgggtgcacctccgagactgatatgcgattctcgagtgctggagcgatacctactcgaagccaaggaggccgaaaacataacaacagggtgcgccgaacactgctcactgaacgagaatattacagtgccggataccaaggtgaacttctacgcatggaaaagaatggaagtgggacagcaagcagtcgaagtttggcagggtctcgctctgttatctgaggctgttctgcgagggcaggctcttctcgtcaattcatcccagccgtgggaacccctgcagctacacgttgacaaagcagtgtctggcctgcgctcacttactaccttgttgagggcccttggggctcaaaaagaagccatctcgccccctgatgctgcgtcagccgcgccgttaaggaccatcactgcagatacattccgcaaactgtttcgcgtgtactcaaactttctgagaggaaagctgaagctgtatacaggggaggcatgccggaccggagaccgg

SEQ ID NO: 10831 - DNA, 579 bp, synthetic construct
  misc_feature 1..579: note = source = /note="Description of Artificial Sequence: Synthetic coding sequence"
  source 1..579: mol_type = other DNA
atgggcgttcacgagtgccctgcttggctttggctgctgctctcgctcctcagcctgccgctcggcttgcctgtgctgggagccccgccacgtctcatctgcgattctcgggttcttgagcggtatcttcttgaagccaaggaagccgaaaacatcacgactggatgcgcggaacactgcagcttgaacgagaatatcaccgtgcccgacaccaaggtgaacttttacgcgtggaagagaatggaagtcggccagcaggccgtggaggtctggcaggggctggccctgctgtcagaggcagtgctgcgcggacaagccctgctcgtcaattccagccaaccctgggagccgctgcaattgcatgtggataaagcggtttcgggactccgttcacttaccacccttctccgtgcactcggtgctcagaaagaagctatttccccaccagacgctgcttctgcggcgccgctgcgcactatcaccgcagacactttccggaaactcttccgggtgtactcgaacttcctgcgaggcaagttgaagttgtacacgggagaagcatgtcgcactggcgacagg

SEQ ID NO: 10832 - DNA, 579 bp, synthetic construct
  misc_feature 1..579: note = source = /note="Description of Artificial Sequence: Synthetic coding sequence"
  source 1..579: mol_type = other DNA
atgggggttcatgaatgcccggcttggctttggctgctgttgtccctcctgtccctgccgctcggactgcctgtgctgggagcacccccgagactgatctgcgattcaagggtgctcgagcggtacctgctcgaggcaaaagaagccgagaacatcaccactggctgcgcggaacattgtagcctcaacgagaatatcacggtcccagacaccaaagtgaatttctacgcctggaagagaatggaggtgggacagcaggccgtggaggtgtggcagggactcgcgcttctgtccgaagccgtgctgcggggacaagcgctgctggtgaattcatcccagccttgggagccgctgcagctgcatgtggacaaggctgtgtcgggactgagaagcctgacgaccctcctgcgcgcgctgggagcacagaaggaagcgatctcgccaccagacgccgcctcagccgctccactcagaaccatcactgccgataccttccggaagttgttccgggtgtactctaacttcttgcgcggaaaactgaagctctacaccggcgaagcctgccgcactggtgatcgc

SEQ ID NO: 10833 - DNA, 579 bp, synthetic construct
  misc_feature 1..579: note = source = /note="Description of Artificial Sequence: Synthetic coding sequence"
  source 1..579: mol_type = other DNA
atgggcgtgcacgaatgtccggcatggctctggctgcttctttctctcctgtctctgccgctgggactgcctgttctcggcgcaccacccagattaatttgtgacagtcgagtgctggaacgatatctgctggaagccaaggaggctgagaacattacaaccgggtgcgcagaacactgttcgttgaatgaaaacataacggtacctgacactaaggtcaacttttacgcctggaagcgaatggaagtcgggcagcaggccgtcgaggtgtggcaggggctggctctcttgtctgaggctgtcctgaggggacaggccctgctagtcaatagctcacagccttgggagcccctccagctgcacgtggataaagcagtgtccggtttgcgatcccttacgactctcctgagagccctgggggctcagaaggaggctatttctccaccagacgccgcatcagccgcaccactgagaacaattacagctgatactttcaggaaactgttcagagtctattcaaatttcctgaggggaaagctgaaactgtatacaggagaggcttgcagaacaggcgaccga

SEQ ID NO: 10834 - DNA, 579 bp, synthetic construct
  misc_feature 1..579: note = source = /note="Description of Artificial Sequence: Synthetic coding sequence"
  source 1..579: mol_type = other DNA
atgggtgtgcatgaatgtcctgcctggctctggctgctgcttagtctgctgtcactgccactggggttgccagtgctcggcgcacctcctagactgatatgcgattctagggtactggaacgctacctgctagaagcaaaggaagccgagaatataaccaccgggtgcgctgaacactgctctctgaacgaaaatatcactgtgcccgacactaaagtgaatttctatgcttggaaacgaatggaggtaggccagcaggctgttgaagtgtggcaggggctggccctactgagcgaggcagttctgaggggccaggccttactggtgaacagcagccagccatgggaacccctgcagctgcatgtggataaggctgtgtccggcctgcgctctctgacaaccctgctcagggctctgggcgctcagaaggaggcaatcagcccccctgacgccgcctccgccgcccccctgcggacaattacagctgatacatttcggaagctttttcgggtgtacagcaactttctgaggggtaagctcaagctgtatactggggaggcctgtcgcactggtgaccga

SEQ ID NO: 10835 - DNA, 579 bp, synthetic construct
  misc_feature 1..579: note = source = /note="Description of Artificial Sequence: Synthetic coding sequence"
  source 1..579: mol_type = other DNA
atgggtgtgcatgaatgtcctgcttggctctggttgcttctctctctcttgagcctcccgttgggactacctgttcttggggctccccctcgattgatttgcgatagtcgtgtgctggagaggtatcttttagaagccaaggaagccgaaaatattaccaccggatgcgccgaacattgcagtttaaacgaaaacataaccgttcccgatacaaaggtaaatttctatgcatggaaaaggatggaagtcggtcaacaggctgttgaagtttggcagggacttgccctcttaagtgaagcagtcttaaggggacaggcattacttgttaattcgtcacaaccttgggaaccactccaacttcatgtcgacaaggcagttagtggtctgcgatcattgacaacactacttagggccttgggcgcacaaaaggaggctatctcacctcccgatgcagcgtctgcggccccgctcagaactattaccgctgatacattccgaaagttgtttagagtttattccaatttcctccgtggaaaactcaagttgtatacaggagaggcttgtcgtaccggtgataga

SEQ ID NO: 10836 - DNA, 579 bp, synthetic construct
  misc_feature 1..579: note = source = /note="Description of Artificial Sequence: Synthetic coding sequence"
  source 1..579: mol_type = other DNA
atgggcgtgcatgagtgtcctgcatggttgtggctgctgcttagccttctctcacttccacttggactgcctgtgttgggagcacctcctcgtcttatttgtgattcccgagtcctcgaaaggtacttgctcgaagcgaaggaagcagagaacatcactactggttgtgcagagcattgctcgctgaatgagaacattacggtcccggacactaaggttaacttttacgcatggaaaagaatggaagtgggtcaacaggcagtcgaagtgtggcagggattggcgcttctgtccgaggcagttctgagaggacaagcgcttttggtgaatagctcgcagccgtgggaaccactgcaacttcacgtggataaagctgtgtcagggctccgatctctgacgacccttctgcgggcgcttggtgcgcaaaaggaagctatatcgcccccggatgctgcatccgcagcaccactgagaaccatcaccgcagatactttccggaagctctttcgtgtgtacagcaacttccttcgcggtaaactgaagctctacaccggagaagcgtgcagaaccggggaccgg

SEQ ID NO: 10837 - DNA, 579 bp, synthetic construct
  misc_feature 1..579: note = source = /note="Description of Artificial Sequence: Synthetic coding sequence"
  source 1..579: mol_type = other DNA
atgggcgttcacgaatgccccgcgtggctctggctcttgctgtctttactcagcctgccactgggcctcccagtcctgggagccccaccaaggctcatctgtgactcccgagtgcttgagaggtatctgctggaggctaaagaggccgaaaacatcactacgggatgcgctgaacattgctccctgaacgagaacataacggtgcccgacaccaaggtaaatttctatgcctggaagagaatggaggtaggccagcaagcagttgaggtgtggcaagggttagccctcctgtctgaggcagttttaagagggcaggctctgctggttaatagcagtcagccgtgggaaccgcttcagttacatgtggacaaggccgttagcggcctaaggtccctgaccaccctcctgcgggcactgggagcgcagaaagaggcgatcagcccacctgatgccgcctcagccgcacccctcaggaccataacagctgataccttccgaaagctttttcgcgtgtactccaacttccttcgaggaaagctcaagctgtatacaggggaagcctgcaggactggcgacaga

SEQ ID NO: 10838 - DNA, 579 bp, synthetic construct
  misc_feature 1..579: note = source = /note="Description of Artificial Sequence: Synthetic coding sequence"
  source 1..579: mol_type = other DNA
atgggtgttcatgaatgccccgcatggctgtggctccttctcagcctgctgtcattacccctgggcctacctgtactgggcgccccccccaggttgatctgcgattctcgggtgcttgagaggtatcttctcgaagctaaagaggccgagaatataacaacgggctgcgcagaacactgtagcctgaacgaaaacatcacagtcccagatactaaagtcaacttctatgcctggaagagaatggaagtaggccaacaagcagttgaggtgtggcagggactggctctcctgtcagaggccgtcctccgggggcaagcgctgctagttaacagttctcaaccatgggagcccctgcagctgcacgtcgataaggcagtgagtggactgcgaagtctgaccaccttgttaagagccctgggtgctcagaaagaagccataagcccccccgacgctgcctctgcggctcctcttaggaccataacagcggacacatttcgcaaactattcagggtttacagtaattttttacgggggaaactgaagctttacactggcgaagcctgccggactggagataga

SEQ ID NO: 10839 - DNA, 579 bp, synthetic construct
  misc_feature 1..579: note = source = /note="Description of Artificial Sequence: Synthetic coding sequence"
  source 1..579: mol_type = other DNA
atgggagtgcatgaatgtcccgcatggctttggctccttctctcgctgttgtcgcttccacttgggctgccggtgcttggtgcccctccgcggctgatctgtgattctcgagtgctggaaagatatctccttgaagccaaggaagccgaaaacattactaccgggtgtgccgagcattgctctctcaatgaaaacattaccgtgcctgacaccaaggtcaacttttatgcttggaagcgtatggaagtgggacagcaagcagtggaggtttggcaaggactcgccctcctttccgaggctgtgctccggggtcaggccctgctggtgaattccagccaaccttgggagcctcttcaactccacgtggataaagcggtgtccggtctgagatcgcttactacgctcctgcgcgcgttgggggcacaaaaagaggcgatttccccacctgacgcagcaagcgccgccccactgcgcactatcactgctgatacgtttcgcaagctgtttagagtttactcaaactttcttagaggtaaacttaagctctacaccggcgaagcgtgtcggactggtgaccgg

SEQ ID NO: 10840 - DNA, 579 bp, synthetic construct
  misc_feature 1..579: note = source = /note="Description of Artificial Sequence: Synthetic coding sequence"
  source 1..579: mol_type = other DNA
atgggcgtgcacgagtgtccagcatggctctggctgctcctctccctccttagcctgcccctgggactgcccgtcctcggagccccgccccggcttatatgtgatagtagggttttagagagatatctgctcgaagccaaggaggccgagaatatcaccaccggctgcgccgagcactgttcccttaatgaaaacataactgtgcctgacacaaaagtgaatttctacgcctggaaaaggatggaggtgggccagcaggccgtggaggtttggcagggcttggcactgctctcggaggctgtccttcgagggcaggctctcctggtgaatagtagtcagccttgggagcccctgcagctgcacgtggataaggctgtaagtgggctgagaagtctcactacattactgagggctctaggcgcacagaaggaggctatctcacccccagatgctgcctctgcagccccgttgaggaccatcacagctgacacttttaggaagttgtttagagtgtacagtaatttcctgcgggggaagcttaaactgtacactggagaagcttgtcgcaccggcgacagg

SEQ ID NO: 10841 - DNA, 579 bp, synthetic construct
  misc_feature 1..579: note = source = /note="Description of Artificial Sequence: Synthetic coding sequence"
  source 1..579: mol_type = other DNA
atgggcgttcacgagtgtcccgcctggctttggctcctgctttcccttctgtcattgccactcggcctcccagtactcggtgcaccaccccgtctgatctgcgacagcagggtgcttgaacgctacttattagaagccaaagaggctgaaaatataaccaccggatgtgctgaacattgttcattgaacgaaaacatcacagttcccgacacaaaagtgaatttctatgcctggaaaagaatggaggtcggacagcaagccgtggaagtttggcagggcctggccctgctgagcgaagcagtgctgcgaggccaggccctcttggtaaattcaagccaaccatgggaacccctccaactgcacgtcgataaagccgtgagcgggctgcggtctttgaccacccttcttagggcactaggagcccaaaaggaggcaatcagtccacctgatgctgccagcgccgcgcctctgagaacaattacagcggacacttttcggaaattattccgcgtgtatagcaacttcctcagagggaaattgaagctgtacaccggcgaagcttgtagaactggggacagg

SEQ ID NO: 10842 - DNA, 579 bp, synthetic construct
  misc_feature 1..579: note = source = /note="Description of Artificial Sequence: Synthetic coding sequence"
  source 1..579: mol_type = other DNA
atgggcgtgcatgagtgtcctgcgtggctctggcttctgctttccctcctgtccctgccactggggctgcccgtcctcggagccccaccacgtcttatctgcgactcccgcgttcttgaacggtatcttctggaagcaaaggaagcagagaacataaccactggctgcgccgaacattgttcactcaacgaaaacatcactgtgcctgacacgaaggtcaacttttacgcgtggaagagaatggaagtgggtcaacaggcagtggaagtctggcaaggtcttgctcttctgagcgaagcagtgctgcggggtcaggccctgctcgtgaactcctctcagccgtgggagcccttgcagctgcacgtggacaaggctgtctccggactcagaagcctcactactctccttcgagcccttggagcccaaaaggaggcaatttcgcctcccgatgccgcatcggccgcgccactgaggacgattactgcagacaccttccgcaagctgtttcgcgtgtattctaatttcctccgcgggaaacttaaactgtacactggagaggcgtgtaggaccggggatagg

SEQ ID NO: 10843 - DNA, 579 bp, synthetic construct
  misc_feature 1..579: note = source = /note="Description of Artificial Sequence: Synthetic coding sequence"
  source 1..579: mol_type = other DNA
atgggagtgcatgagtgccccgcgtggctgtggctcctgctctcactcctgtccctgccactgggtctcccagtgctcggtgccccaccacgtctcatttgcgattctcgggtactggagcgctatctgctggaagccaaagaagccgaaaacataaccaccggctgcgctgaacactgcagcctcaacgagaacattaccgttcccgacaccaaggtaaacttctacgcctggaagcgcatggaggtgggacagcaggctgtggaggtttggcagggcttggcccttttgagtgaggctgtcttaaggggccaggctcttctggttaattcatcacagccatgggagcccttacagcttcacgttgacaaggctgtgtccggtctgcgttccctgacaactcttctccgggcattaggcgctcaaaaggaggcgatctcgccccccgacgcggcctccgccgcccccctacgcacgataactgcagatacattccggaagctattcagagtgtatagcaactttctccgggggaagctgaaattgtatacaggagaggcttgccgcaccggcgaccga

SEQ ID NO: 10844 - DNA, 579 bp, synthetic construct
  misc_feature 1..579: note = source = /note="Description of Artificial Sequence: Synthetic coding sequence"
  source 1..579: mol_type = other DNA
atgggcgtccatgagtgccccgcgtggttgtggctcctgctttcgctgctttcactgcctctcggcctgccagtgctcggagccccgcctcggttgatctgcgattcgagagtactggaacggtacctccttgaggcgaaggaagctgaaaacattactactggatgtgcagagcactgcagcctcaacgagaacatcaccgttcctgataccaaggtgaacttttacgcatggaagcgcatggaagtcggacagcaggctgtggaggtgtggcagggactggccctgctctcagaggcagtcctgcgcggacaggccctgctggtgaacagctcccagccctgggagccactgcagttgcacgtcgataaggccgtctcgggcctgagatcgctgacgactcttctcagagcgctgggagcccaaaaggaggccatctcgccgcctgacgctgcctccgctgctccactgcgaactatcacggccgacactttccggaaactgttccgcgtgtattctaacttcctgcggggcaaactcaaactctacaccggagaagcctgccgcaccggagatcga

SEQ ID NO: 10845 - DNA, 579 bp, synthetic construct
  misc_feature 1..579: note = source = /note="Description of Artificial Sequence: Synthetic coding sequence"
  source 1..579: mol_type = other DNA
atgggagtgcatgagtgcccagcctggctctggctgcttctctcgctgctttccctgccccttggccttcctgtgttgggggcaccgcccagactgatctgcgactcacgtgtcttggagaggtacctgttggaagcaaaagaggcggagaatatcaccaccggttgcgccgagcactgcagccttaacgaaaacattacggtgccggacactaaggtcaacttctacgcgtggaagcggatggaagtgggccaacaggcggttgaagtatggcaggggctggctctgctttccgaagccgtgctcagaggacaagctctcttggtcaactcgtcgcagccttgggaaccgctgcagctgcacgtggataaggccgtgtcaggcttgcgatccctgaccaccctgctgcgggccctgggagcacaaaaagaagcaatctcaccgccagacgcagcttctgcggcgccgctgcgcaccatcaccgccgacacttttcgcaagttgttccgtgtctacagtaatttcctccgcggaaagctgaaattgtacacgggagaggcatgtcgcactggtgatcgg

SEQ ID NO: 10846 - DNA, 579 bp, synthetic construct
  misc_feature 1..579: note = source = /note="Description of Artificial Sequence: Synthetic coding sequence"
  source 1..579: mol_type = other DNA
atgggcgtgcacgagtgtcccgcctggctttggttgcttctgtcgctccttagccttcctctcggcctgccggtgttgggtgcacctccacgtcttatctgcgattcacgggtgctcgaacgatacctgttggaagcaaaagaggccgagaacattaccactgggtgtgcagaacattgttcgctgaatgagaatatcaccgtgcctgacaccaaagtcaacttttacgcatggaagcgaatggaagtgggccagcaagctgtggaggtgtggcaaggtttggccctcctgtccgaggcagtgcttaggggacaggcactgcttgtgaactcctcgcaaccttgggaacctctgcagctccacgtcgataaggcagtctccggcctgcggtcgctcacgaccctgctgagagccctcggcgcccaaaaggaagcaattagccctccggatgccgcctcggctgccccgcttcggactatcaccgcagatacgttccggaagctgtttcgagtgtacagcaactttctcagaggtaaattgaagctgtacacgggagaagcctgcagaactggtgacaga

SEQ ID NO: 10847 - DNA, 579 bp, synthetic construct
  misc_feature 1..579: note = source = /note="Description of Artificial Sequence: Synthetic coding sequence"
  source 1..579: mol_type = other DNA
atgggcgtccacgaatgtcctgcctggttgtggctcctcctgtctctacttagcctacctctcggcttacctgtcctgggcgcaccacctcgcctgatttgtgacagccgcgtgctcgagcggtatctactagaggcaaaggaggccgagaacattaccaccggatgcgccgagcactgttccctaaacgaaaacattacagtgccggataccaaggtgaacttctatgcctggaagaggatggaagtggggcaacaggccgtggaggtgtggcagggactcgctctcctgtcagaagcagtgctccgaggtcaggcactacttgttaacagctctcagccatgggagccactccagctgcatgtggacaaggctgtgtcgggcctccgctccctcacgacgttactgagggcgcttggcgcccagaaggaagctataagcccacctgacgcagcctctgcggcccctctcagaactatcactgccgacactttcaggaagctctttcgcgtgtattcaaattttttgcgaggtaagttaaaactatatacaggcgaagcctgccggaccggcgaccgg

SEQ ID NO: 10848 - DNA, 579 bp, synthetic construct
  misc_feature 1..579: note = source = /note="Description of Artificial Sequence: Synthetic coding sequence"
  source 1..579: mol_type = other DNA
atgggcgtgcacgagtgccctgcatggctctggctgctcctttccctgctttccctgcctctgggcctccctgtgcttggagccccgccccgcctcatttgcgattccagagtgcttgaacgataccttcttgaggcaaaggaggcggaaaacatcaccaccgggtgtgcagaacactgttctctgaatgaaaacatcactgtgcccgatacgaaggtgaatttctacgcttggaagcgaatggaagtgggacaacaggcagtcgaagtgtggcaaggacttgccctgctctccgaagcggtgcttagaggccaggcactcctggtcaactcatcgcagccctgggaacctcttcagctgcatgtggataaggccgtgtcaggcctgcgctcgctgactaccctgctcagagcattgggcgcacagaaggaggcaatatcgccaccggacgcagcaagcgcagcccccttgagaacgatcactgccgacacctttagaaaactctttagagtgtatagcaacttcttgagggggaagctcaagctgtacacgggtgaagcctgccgcaccggagataga

SEQ ID NO: 10849 - DNA, 579 bp, synthetic construct
  misc_feature 1..579: note = source = /note="Description of Artificial Sequence: Synthetic coding sequence"
  source 1..579: mol_type = other DNA
atgggtgttcatgaatgtcctgcatggctttggttgttgttaagtttattatctttacctttaggtttacctgtattaggtgctcctcctagattaatatgtgattcaagagttcttgaaagataccttttagaagcaaaagaggctgaaaatattacaactggatgcgctgaacattgttcattaaatgaaaatattacagttccagatactaaagtaaatttttatgcttggaaaagaatggaagttgggcaacaagcagttgaagtttggcaaggacttgcattactttcagaagctgttttaagaggacaagctttacttgttaattcttctcaaccatgggaacctctacagttgcatgtagataaagctgtttctggacttcgaagtcttacaactcttcttagagctttaggagcacaaaaagaagctatttcaccaccagatgccgcttcagcagctccattaagaacaattacggctgatacatttagaaagttatttagagtttatagtaattttcttagaggtaaattaaaattatatactggggaagcatgtcgaacaggtgacaga

SEQ ID NO: 10850 - DNA, 579 bp, synthetic construct
  misc_feature 1..579: note = source = /note="Description of Artificial Sequence: Synthetic coding sequence"
  source 1..579: mol_type = other DNA
atgggcgtgcacgagtgtcctgcatggttgtggctactgttgagcctgctgtccctccctctgggccttcctgtgctgggcgccccccctcgattaatctgtgattctagggtactcgagaggtaccttttagaagctaaggaagctgagaacattaccacagggtgcgctgagcactgcagcttaaatgagaacattacagtccccgataccaaggtgaacttctatgcctggaagagaatggaggtgggccagcaggccgttgaagtctggcagggattggcgctgctctctgaagctgtgctgcgcgggcaggctcttctagtaaacagcagtcagccttgggaacctctccaattacatgtcgacaaggcagtctcagggttgaggagtctgactacattgctcagggccctcggggcacaaaaagaggctatttcgccgcccgatgctgcctccgccgcacctctgcggacgatcactgcggatacattccgcaaactgtttcgcgtctatagtaacttcttgcggggcaaattaaaactgtataccggagaggcctgccggaccggcgatcgt

SEQ ID NO: 10851 - DNA, 579 bp, synthetic construct
  misc_feature 1..579: note = source = /note="Description of Artificial Sequence: Synthetic coding sequence"
  source 1..579: mol_type = other DNA
atgggagtgcatgaatgcccagcgtggctgtggctcctcttgagcctcctgtcgctgccgctcggcctgcctgtgctgggcgcaccgccacgccttatctgcgactcccgggtcctggaacgctacctgctggaggccaaggaggcagaaaacattactaccggatgcgccgaacactgcagcctgaatgaaaacatcactgtgccggacaccaaggtcaacttttacgcttggaaaaggatggaagtcggtcagcaagcagtggaggtctggcagggactcgccctgctgtccgaagcagttcttcggggtcaagcactgctcgtgaacagctcccagccgtgggagccgcttcaactgcatgtcgacaaggctgtctccggcctgagatccctcactaccctgctgcgcgctttgggagcacagaaggaggcaatctcacctccggatgccgcgagcgccgcgccgctgaggactattacggcggacaccttccggaagctgtttcgggtgtacagcaactttctgcgcggaaaactgaagctgtacactggagaagcatgccggactggagatcgc

SEQ ID NO: 10852 - DNA, 579 bp, synthetic construct
  misc_feature 1..579: note = source = /note="Description of Artificial Sequence: Synthetic coding sequence"
  source 1..579: mol_type = other DNA
atgggggtgcatgagtgtcctgcctggctgtggctcctgttgagtttgctcagtctgcctttgggtctcccagtcctcggggcccctcctaggctcatctgcgactccagagtcctggaacggtacctgctggaggccaaggaagcggaaaacattacaaccggatgtgcagagcactgctctctcaatgaaaacatcactgtgcccgacacaaaagtgaatttttacgcgtggaagagaatggaagtgggccagcaagccgtggaggtctggcaggggttggcgctgttgtcagaagctgtcctgagaggtcaggcattgctagtgaactcttctcagccctgggaacctttgcagctgcacgtggacaaggccgtctctgggctgagatccctgaccacactgttgagagcattgggggcccagaaagaggcgatctctccacccgacgccgcctctgccgcgccattaaggaccatcaccgccgatacttttaggaagctgtttcgcgtctactcaaattttctgagaggaaagttgaagctatacacgggggaagcctgccgcacaggcgacaga

SEQ ID NO: 10853 - DNA, 579 bp, synthetic construct
  misc_feature 1..579: note = source = /note="Description of Artificial Sequence: Synthetic coding sequence"
  source 1..579: mol_type = other DNA
atgggggtgcacgagtgtcccgcttggttgtggcttctgctctcccttttgtctctgccgctgggcctgccggttcttggtgcccccccccggctgatatgcgactctagagtcctagaacgctatctcctggaggctaaggaggcagagaacattacgactggctgcgctgaacattgtagtctgaacgaaaatatcaccgttccagatacgaaggtgaacttctacgcgtggaagaggatggaggtggggcaacaagccgttgaagtgtggcaagggctggctttgctctccgaagccgtccttaggggacaagcactgttggtcaactcatctcagccatgggagcccctccagcttcatgtcgataaggccgtgagtggcttgaggtcactcacaacgttgttgagggccctgggtgcgcagaaggaggcaatcagtccacctgatgccgcctctgcagccccactgcgaaccattaccgcagatacatttaggaagctcttcagggtctactctaactttttgagagggaagctaaagttatataccggtgaagcctgcagaaccggcgatagg

SEQ ID NO: 10854 - DNA, 579 bp, synthetic construct
  misc_feature 1..579: note = source = /note="Description of Artificial Sequence: Synthetic coding sequence"
  source 1..579: mol_type = other DNA
atgggcgtgcacgaatgccccgcttggctttggctcctgctatctctgttgtcgctgcccctaggactgcctgtgctcggagcaccacccagacttatctgcgattctcgagtgcttgaaaggtatctgctcgaggctaaggaagctgagaatatcacaaccggctgcgccgagcactgcagcctcaacgagaacatcactgtgcctgacactaaagtgaacttctacgcatggaaacgcatggaggtggggcaacaggctgtcgaagtctggcagggtctggcgctgctgtccgaagccgtgctcagaggacaagctctgctcgttaacagctcccaaccgtgggagcctttgcaattgcacgtcgacaaagctgtctccggattacgctctctcactactctcctgcgggctctcggcgcccagaaagaagctatatcccctccagatgctgcttcagcagcccccctcaggaccattacagccgacacatttagaaaactttttagggtgtacagcaacttcctgcggggaaaacttaagctctatacaggagaagcttgtaggacaggcgaccgg

SEQ ID NO: 10855 - DNA, 579 bp, synthetic construct; identical to SEQ ID NO: 10811
  misc_feature 1..579: note = source = /note="Description of Artificial Sequence: Synthetic coding sequence"
  source 1..579: mol_type = other DNA

SEQ ID NO: 10856 - DNA, 579 bp, synthetic construct
  misc_feature 1..579: note = source = /note="Description of Artificial Sequence: Synthetic coding sequence"
  source 1..579: mol_type = other DNA
atgggcgtgcacgagtgtcctgcatggctgtggttgttgttgagcctgctgtcattgccactgggcctccctgtgctgggtgctccacctcgtttgatttgtgacagccgcgtgctggagcgctatctcttggaagccaaggaagccgagaacatcacaacaggatgtgccgaacactgctcactcaacgagaatattaccgtaccagacaccaaggtgaatttttacgcctggaagaggatggaagtgggtcagcaggccgtcgaagtttggcagggtctggctttgctcagcgaggcagtactgagaggtcaggccctcctggtaaatagctcccaaccctgggagcctctccagttgcacgtcgacaaggctgtgtctggtctcagatccttgacaacccttcttagggctctgggcgctcagaaagaagctatcagcccccccgacgctgcttccgctgctccactccgcactatcaccgctgacacttttaggaaactctttcgtgtttactctaacttccttcgcggtaagcttaagctgtatacaggtgaggcctgcagaaccggtgacagg

SEQ ID NO: 10857 - DNA, 579 bp, synthetic construct
  misc_feature 1..579: note = source = /note="Description of Artificial Sequence: Synthetic coding sequence"
  source 1..579: mol_type = other DNA
atgggggtccacgagtgcccggcgtggttatggctgttgctgtcactcctgagccttcctctcggtctgcctgtcctcggcgctccccctcgcctgatttgtgatagcagggtgctggaaagatatctcttggaagctaaggaagccgagaacatcactactggttgcgcagagcactgtagcctgaatgagaacatcacggttcccgataccaaggtaaatttttatgcatggaagcgaatggaagtcggccaacaagccgtcgaggtgtggcagggtctggcattattatcggaggccgtgttgagaggtcaggcactgctggttaatagcagccaaccatgggagcctctgcaactgcacgttgacaaagctgtgtctggcctgcgttccctgaccactctgctccgggcactcggcgcacaaaaggaagcaatcagccctcctgatgctgcctctgccgcccccctgcgtactataaccgccgacacattccgcaagctttttcgggtttacagtaacttcctacgcgggaaactgaagctctatacgggcgaagcttgccggacaggcgataga

SEQ ID NO: 10858 - DNA, 579 bp, synthetic construct
  misc_feature 1..579: note = source = /note="Description of Artificial Sequence: Synthetic coding sequence"
  source 1..579: mol_type = other DNA
atgggagtccacgagtgcccagcctggctgtggctgctgctgtccctcctgtccttgccgttgggactgccggtcctgggcgcaccgcctagactcatctgcgattcacgcgtgctggaacggtaccttttggaagcgaaggaagccgaaaacatcaccactggatgcgccgaacattgcagcctgaatgaaaacattactgtgcctgacactaaggtgaacttttacgcctggaagcggatggaggtgggacaacaggccgttgaggtctggcaggggctggctctcctgagcgaggcggtccttcgcggccaggccctgctggtaaacagcagccagccgtgggagccgcttcagctccatgtggacaaggccgtctcaggattgcgatcactgacgaccctgctccgggctctgggagcccaaaaggaagccatttctccaccggatgccgcctcggcagcgcctctccgcactatcactgccgacacgtttaggaaactttttcgggtgtactcgaatttcctgcggggaaagctgaaactttacaccggcgaagcgtgtagaaccggcgatagg

SEQ ID NO: 10859 - DNA, 579 bp, synthetic construct
  misc_feature 1..579: note = source = /note="Description of Artificial Sequence: Synthetic coding sequence"
  source 1..579: mol_type = other DNA
atgggtgtgcatgaatgccccgcctggctgtggctgttgctgtcccttttgtccctgccacttggactccccgtgcttggggccccacctcgtttgatttgtgactctcgtgtgcttgaacgttacctgctcgaagcaaaggaggcagaaaacattaccaccggatgtgctgaacactgctcgcttaatgaaaacattacggtccccgatactaaggtgaatttctatgcatggaagagaatggaagtgggtcaacaggccgtggaagtttggcaaggcctggcccttctgtcggaggccgtcctccggggacaagcacttcttgtgaactcgagccagccgtgggagccacttcaactgcacgtggataaagcagtgtccgggttgagatcccttaccaccctccttagggcactgggggcacaaaaagaagcaatctccccacctgatgcagctagcgcggcaccacttcgaactattaccgcagatacgtttagaaaactttttcgcgtgtactccaacttccttcggggaaaacttaaactttacactggtgaagcatgtcggactggcgacaga

SEQ ID NO: 10860 - DNA, 579 bp, synthetic construct
  misc_feature 1..579: note = source = /note="Description of Artificial Sequence: Synthetic coding sequence"
  source 1..579: mol_type = other DNA
atgggagtccatgaatgtcccgcttggctctggcttctcctttcgctgctttcattgccgctcggactgccggtgctgggcgcaccgcctcgactgatttgcgactcgcgggtgcttgaaagatacctgctggaagcaaaggaggcagaaaacatcacgaccgggtgcgctgagcattgtagccttaacgaaaacatcactgtgccagatactaaggtgaatttctacgcatggaagaggatggaggtcggtcagcaggcagtggaagtctggcaaggactcgcacttctgtccgaagcagtcttgcgtggccaagccctgcttgtgaatagctcgcaaccttgggaacccctgcaacttcacgtcgataaagctgtgtcaggtctgaggtccctcactactcttctcagagctttgggcgcacagaaagaggcgatttcgccacctgacgccgcatcggccgccccccttcgcaccatcaccgccgatacgttccgtaaacttttccgggtgtacagcaacttcctgcggggtaaacttaagctgtacactggagaggcatgccggaccggagatagg

SEQ ID NO: 10861 - DNA, 579 bp, synthetic construct
  misc_feature 1..579: note = source = /note="Description of Artificial Sequence: Synthetic coding sequence"
  source 1..579: mol_type = other DNA
atgggtgtccacgaatgtcctgcgtggctttggcttttgctttcgctgctgagcctgccactcggccttcccgtgttgggagctccaccaaggctgatatgcgattcacgcgtccttgaaaggtatcttcttgaggcaaaagaagccgaaaacatcactaccgggtgtgcagaacactgtagcttgaatgaaaacattactgtgccggacaccaaggtgaatttctatgcgtggaagcgaatggaggtcggtcagcaagcagtggaggtgtggcaaggactggcactgcttagcgaggcagtgctgagaggacaggcactgttggtcaactcctcgcagccttgggaaccacttcaactccacgtagacaaagctgtctcaggtttgagatcgctgacgaccctgctgagagcacttggggcacaaaaggaggcgatttcaccccccgacgcagcatcggcagcgcctctgcggaccattaccgccgatacttttcgcaagttgtttagagtgtactccaactttctgcgaggaaagctgaaattgtacactggagaggcatgccgtacgggcgatagg

SEQ ID NO: 10862 - DNA, 579 bp, synthetic construct
  misc_feature 1..579: note = source = /note="Description of Artificial Sequence: Synthetic coding sequence"
  source 1..579: mol_type = other DNA
atgggggtgcatgagtgcccagcttggctttggctgttgctctcgctgctgtccctgcctctgggccttcccgtgcttggcgcccctccaaggcttatttgcgattccagagtgttggaacgataccttctggaagcgaaggaggcagagaacattactacggggtgcgcagagcattgttcgctgaacgaaaacattaccgtgccagataccaaggtcaacttctacgcatggaagagaatggaagtgggacaacaagccgtcgaagtgtggcagggcctggctttgctcagcgaagcggtcttgcgcggccaagcactgctcgtgaattcttcccagccctgggaaccactgcaactgcatgtcgacaaggccgtgtcaggcttgcgaagccttaccactcttcttcgcgcccttggagcccaaaaagaggccatttccccgcctgatgcagcctccgccgcacctctccgcactatcaccgcagacacctttaggaagctgtttcgcgtgtacagcaattttctccgcggtaagctcaagctctatacgggcgaggcatgcagaaccggagatcgg

SEQ ID NO: 10863 - DNA, 579 bp, synthetic construct
  misc_feature 1..579: note = source = /note="Description of Artificial Sequence: Synthetic coding sequence"
  source 1..579: mol_type = other DNA
atgggagtccacgagtgtcccgcttggctgtggctgttgctttccctcctctcccttcctcttggtctgccggtgctcggtgcgccaccgagactgatttgtgacagcagagtgttggaaaggtacctgttggaagctaaggaggcagagaacatcaccaccggttgtgccgaacattgctccctgaacgaaaacatcactgtgccagataccaaggtcaatttctacgcctggaagaggatggaagtcggccagcaagctgtggaagtgtggcagggcctggcgctcctgagcgaagccgtgctgcggggacaagccctcctcgttaactcaagccagccctgggaaccgctgcagctgcatgtggataaggcagtgtcgggactccgctcgctgaccactctcctgagggcacttggagcgcagaaagaggccatctcgccacccgacgccgcctctgcagccccactccggaccattaccgcggacactttcaggaaactcttccgggtgtacagcaactttctgaggggtaagttgaagctctacactggcgaggcctgtcgaactggggaccgc

SEQ ID NO: 10864 - DNA, 579 bp, synthetic construct
  misc_feature 1..579: note = source = /note="Description of Artificial Sequence: Synthetic coding sequence"
  source 1..579: mol_type = other DNA
atgggagtgcatgagtgtccagcatggttgtggctgcttttgtctcttctgtcactcccgcttggcctgcccgtgctgggggcacctcctagactgatttgtgattcacgggtcctggaacgataccttctggaagcaaaggaggcagaaaacattacgacgggttgcgcggaacattgttcgctgaacgagaacatcactgtgccagacaccaaggtgaacttctacgcatggaagcgtatggaagtgggacagcaagcagtcgaagtgtggcagggtcttgcattgctttccgaggcagtccttagagggcaagccctgctggtcaactcgtcgcaaccatgggaaccccttcagctgcatgttgacaaggcagtttccggactgcgcagccttaccactcttcttagagcactcggtgcacagaaggaagcaattagccctcccgacgccgcatcagcagcacccctccggaccatcaccgcggataccttcaggaagctcttcagagtgtattcgaactttttgagagggaaactcaagctgtacactggggaagcctgtcggacgggagatcga

SEQ ID NO: 10865 - DNA, 579 bp, synthetic construct
  misc_feature 1..579: note = source = /note="Description of Artificial Sequence: Synthetic coding sequence"
  source 1..579: mol_type = other DNA
atgggagttcatgaatgtccagcttggctatggctcttgctctctttgttgtcattaccacttggcttaccagttctgggagcacctccaagacttatttgcgactctcgtgtgttggaacgttatcttcttgaggctaaagaggcggaaaatataacaactggatgtgcagaacattgttcgcttaacgaaaacattacagtgccagatacaaaggttaatttttatgcttggaaacggatggaagttggacaacaagctgtggaggtttggcaaggccttgcgctcctttcagaagcagtattaagaggccaggcactacttgttaatagttctcagccatgggagccacttcaactccatgtggataaagccgtcagtggattacgttcgcttactacacttcttcgcgctctcggagcccagaaagaggccatttcacctcctgatgcagcctcagccgctccgttgagaacaattacagcagataccttccggaagttattccgtgtctattcaaattttttgcgtggaaaactgaagctctatacaggagaagcttgtcgcactggagaccgt

SEQ ID NO: 10866 - DNA, 579 bp, synthetic construct
  misc_feature 1..579: note = source = /note="Description of Artificial Sequence: Synthetic coding sequence"
  source 1..579: mol_type = other DNA
atgggcgtgcatgaatgtcctgcctggctatggcttctcctcagcctgctgagtctccccctgggcttaccagtgttgggcgccccccctcgcctgatatgtgatagtcgggtcctagaacgataccttctcgaggccaaggaagcggaaaacatcaccacagggtgtgcagagcattgctctttgaacgaaaatataaccgtgcctgatacaaaggttaatttctatgcatggaagcggatggaggtcggacagcaggccgtagaggtgtggcaggggctagccttgcttagtgaggcagtgctgcgcggacaggctctgctggtgaacagctcgcagccatgggagcccttgcagctgcatgtggacaaggccgtatccggcctgcgttccttgaccacccttctcagagccctgggcgctcagaaggaggcaatctctcccccagatgccgcctccgccgctcctttgcggactatcacagcagatacgtttcggaagcttttcagagtgtactcaaactttctgaggggaaagcttaagctctacacaggggaggcgtgtcgcacaggggatcga

SEQ ID NO: 10867 - DNA, 579 bp, synthetic construct
  misc_feature 1..579: note = source = /note="Description of Artificial Sequence: Synthetic coding sequence"
  source 1..579: mol_type = other DNA
atgggggttcatgaatgtcccgcgtggctgtggttgctcctgagcctcctctctctgccactagggttgcccgttctgggggctcctccaaggttgatatgcgactcccgggtgcttgagcggtacttgctagaggctaaggaggctgaaaatattacgaccggctgcgcagagcattgtagcctcaatgaaaacataacagtaccagatactaaggtgaatttttatgcatggaagcgtatggaggttggccaacaggcggtcgaagtctggcaggggcttgcacttttatccgaggcggtgctcaggggtcaggctctgctcgtgaattcaagccagccgtgggagcctctgcagttgcatgtggacaaggccgtgtccggacttcgctctttgacaaccctgctccgggccctaggagctcagaaggaggctatttctcctcctgatgcagctagcgccgctcctctcaggacaattaccgcagatacattcagaaagttgttcagagtgtattcaaacttccttcgtgggaagctgaaactgtatacaggagaggcatgtagaacgggtgataga

SEQ ID NO: 10868 - DNA, 579 bp, synthetic construct
  misc_feature 1..579: note = source = /note="Description of Artificial Sequence: Synthetic coding sequence"
  source 1..579: mol_type = other DNA
atgggtgtgcatgagtgcccggcttggctctggttgctgctgagtctgctgagtctcccactgggtctgcccgttcttggtgctccgccacgcctcatttgcgactcccgcgtcttggaacgttacctcctggaggccaaggaggccgaaaacatcaccaccggctgtgctgagcattgttctctcaatgagaacattacagtcccggataccaaggtcaacttctacgcgtggaagcgcatggaggtcggccagcaggccgtcgaggtctggcagggtctggccctgctgtctgaggcggtcctccgtggccaagccctcttggttaactcctcccaaccgtgggagcctttgcagctgcacgtagataaggcggtcagtggcctgcggtcgctgaccaccctgttgcgtgctctgggcgctcagaaagaggccattagcccgcccgatgctgcctccgccgccccactccgtactatcactgccgacacgtttcgcaagctcttcagggtctatagcaacttcctgcgtggcaaacttaagttgtacacaggtgaggcgtgtcgcaccggagaccga

SEQ ID NO: 10869 - DNA, 579 bp, synthetic construct
  misc_feature 1..579: note = source = /note="Description of Artificial Sequence: Synthetic coding sequence"
  source 1..579: mol_type = other DNA
atgggtgtgcatgagtgtccggcatggctctggctcctcctctcactgctgagcttgccactgggactgcccgtgctgggggcgccgcctcgcttgatctgcgacagcagagtgctcgagagataccttcttgaggcgaaagaagccgagaacatcactaccggttgcgccgaacactgctcccttaacgagaacataaccgtgccggatactaaggttaacttctacgcatggaagcgcatggaggtcggacaacaggccgtggaggtgtggcagggactggcgctgttgtcggaagccgtgctgagaggacaagcactgctggtgaattcatcgcagccctgggaaccactccagcttcacgtggataaggcggtcagcggcctgagatcgctgacgactctgctgcgcgctttgggagcccaaaaagaagctatctcgccgcccgacgccgcctctgcggcccccctcagaaccatcactgcagataccttccggaagctgtttcgggtgtactcgaacttcctgagaggaaagctgaagctgtacacgggcgaggcgtgcaggacgggcgatcgg

SEQ ID NO: 10870 - DNA, 579 bp, synthetic construct
  misc_feature 1..579: note = source = /note="Description of Artificial Sequence: Synthetic coding sequence"
  source 1..579: mol_type = other DNA
atgggtgtccatgagtgtcccgcttggctctggcttttactgtctcttctctctttacccctggggctgccagtgcttggtgcaccgccaaggctaatatgtgactctcgggtgctggaaaggtacctgttagaagctaaagaagccgagaacatcacaactggatgtgctgaacattgctccttgaacgagaacatcacagttccagatacaaaagtgaacttctatgcttggaagaggatggaggttggacagcaggccgtcgaggtttggcaggggctcgcactgctcagtgaggcggtgctacgcggtcaggccctgttagtcaactcctcccagccctgggagccactgcaattgcacgtggacaaggcagtgagcggattaaggagccttaccacgctactgcgcgctctgggggctcagaaagaggcgatctctcctcctgacgctgcaagcgctgcccccctgagaaccatcacagcggacacattcaggaagttgttccgcgtgtatagtaattttcttcgggggaagctcaaactgtacaccggcgaggcctgtaggactggagaccgg

SEQ ID NO: 10871 - DNA, 579 bp, synthetic construct
  misc_feature 1..579: note = source = /note="Description of Artificial Sequence: Synthetic coding sequence"
  source 1..579: mol_type = other DNA
atgggtgtccacgagtgtccggcctggctgtggctgctcttgtcgctcctctcactgccactgggcctgccggtcctcggagccccacctagactgatttgtgactcccgggttctggaaaggtaccttctcgaagcgaaggaggccgagaacattactaccggatgcgccgagcactgctccctgaacgagaatatcaccgtcccagataccaaggtgaacttttacgcctggaagagaatggaagttggacagcaggcggtggaggtgtggcagggactggcattgctctcggaggccgtgctgcgggggcaggcgttgctggtcaactcatcacagccgtgggagccactgcagcttcatgttgacaaagcagtgtccggacttcgatcgctgactactttgctgcgggctctgggcgcgcagaaagaagcaatctccccgcccgacgcagcgtccgctgccccgctccgcactatcactgcggacacttttagaaagttgttcagagtgtactcgaacttcctgcgaggtaaacttaagctgtacaccggagaagcgtgccggactggcgatcgc

SEQ ID NO: 10872 - DNA, 579 bp, synthetic construct
  misc_feature 1..579: note = source = /note="Description of Artificial Sequence: Synthetic coding sequence"
  source 1..579: mol_type = other DNA
atgggagtgcatgagtgtccagcctggctgtggctgctgcttagtcttctgagcctgccgctcggcctgccggtgttgggggccccccctcgactcatatgtgattctagagttctggagaggtacctcctggaggccaaagaggcggaaaatatcactacaggttgtgctgagcattgctccctgaacgagaacataacagtgcctgacacaaaggtaaacttttacgcgtggaaaaggatggaggtggggcagcaggctgtggaggtgtggcagggattggcgctgcttagtgaggcggttctccgcggacaggccctccttgtgaatagctcccaaccatgggaaccacttcagcttcacgtggacaaggccgtatctggactgcgctccctcaccacgctgcttcgggcactgggggcccagaaggaggccatcagccctccagacgcagcatctgccgccccgctgcgaaccattaccgctgatacttttcgaaaactttttagagtctattccaacttcttgaggggtaagctgaaactttacactggggaagcctgtcgaaccggggaccgc

SEQ ID NO: 10873 - DNA, 579 bp, synthetic construct
  misc_feature 1..579: note = source = /note="Description of Artificial Sequence: Synthetic coding sequence"
  source 1..579: mol_type = other DNA
atgggagtgcacgaatgcccggcctggctctggcttctgctgtcccttttgtccctgccgctgggattgcccgtgctgggagctccgcctcgcctgatctgcgactcacgcgtgcttgagcgctacctgctggaggccaaagaggcggagaacatcaccactggatgcgcggagcactgtagcctgaatgaaaatatcactgtcccggacactaaggtcaatttctacgcatggaagaggatggaagtgggtcaacaagcagtggaggtctggcaaggactcgccctcttgtcagaagccgtgctgcgggggcaggcccttctcgtcaattcgtcccagccgtgggagccactgcaactgcacgtggacaaggcggtcagtggcctgcgctcgctgaccaccctcctgagggcactcggtgcgcagaaggaggcaatttcaccccctgacgccgcctcggccgctccgctgcggactatcactgctgacactttccggaagctgttccgcgtgtacagcaatttcctgagaggaaagttgaaactgtacactggcgaggcctgtagaaccggcgaccgg

SEQ ID NO: 10874 - DNA, 579 bp, synthetic construct
  misc_feature 1..579: note = source = /note="Description of Artificial Sequence: Synthetic coding sequence"
  source 1..579: mol_type = other DNA
atgggggtacatgaatgccccgcctggctgtggctacttctttcacttctgagtctcccactggggctaccagttctgggggcacccccacgcctcatatgtgactccagggttctggaacgatatcttctagaggccaaagaggccgagaacataacaactggatgtgcagaacattgttcacttaacgaaaatatcacagtgccagatacaaaggtgaacttctatgcctggaagaggatggaagttgggcagcaggctgttgaggtttggcagggactggccttactgtctgaagctgttctgagggggcaggccttacttgttaattcatcacagccttgggagccactgcagctccatgtagataaagcagtgagtggattacggagtctgactacactccttcgcgctttaggggcccagaaagaagccatctccccccctgatgccgcctctgccgcgcccctccggacaataacagcagatactttcaggaaactgttccgcgtttattcaaacttcctgagaggaaaactgaaactttatacaggggaggcctgccggacaggggatagg

SEQ ID NO: 10875 - DNA, 579 bp, synthetic construct
  misc_feature 1..579: note = source = /note="Description of Artificial Sequence: Synthetic coding sequence"
  source 1..579: mol_type = other DNA
atgggagtccatgaatgtccagcctggctctggctcttgctctcccttctctcactgccacttggactgccggtgctcggtgcaccgccccggcttatctgcgattcgcgtgtcctggagagatacctgctcgaagccaaggaagctgagaacataaccaccggttgcgcagagcactgctcccttaacgaaaacatcaccgtccccgatactaaagtgaacttctatgcatggaaacgaatggaagtgggacaacaagcagtcgaggtgtggcagggacttgcacttcttagcgaagcagtgctcagaggtcaggcactgctggtgaatagctcacagccttgggagccactccaactgcatgtggacaaggcggtgtccgggctgaggtccctcacgactcttcttcgcgcccttggagctcagaaagaagcgatctcgcctcccgacgcagcctcagccgcaccgctcagaaccataacggcagacacgtttaggaagctgtttagagtgtactctaatttcctccgaggtaaacttaagctgtacactggagaagcatgtaggaccggagatagg

SEQ ID NO: 10876 - DNA, 579 bp, synthetic construct
  misc_feature 1..579: note = source = /note="Description of Artificial Sequence: Synthetic coding sequence"
  source 1..579: mol_type = other DNA
atgggcgtccatgagtgcccagcctggctgtggctgcttctttcgcttctttccctgcccttgggactgcccgttctgggagcaccaccccggcttatatgtgattcgagagtgctcgagcgttacctgctggaggcaaaggaagctgaaaacattactactgggtgcgcagaacactgtagcctcaacgaaaacatcaccgtcccagatactaaagtgaacttctacgcgtggaagcgaatggaagtgggacagcaggcagtggaagtgtggcaagggctcgcccttctttcagaagcagtgctcagaggtcaagcccttcttgtcaactcttcgcagccatgggagcccctgcagctgcacgtggataaggcagtgtctggtctgagatccctgactactctgctgagggccctgggagcacaaaaggaagcaatttccccgcctgatgctgcatctgctgcaccccttcgtacgattaccgcagatacctttagaaagctcttccgcgtctattcgaattttctccggggcaaactcaaactgtacaccggagaggcctgtcgcactggggaccga

SEQ ID NO: 10877 - DNA, 579 bp, synthetic construct
  misc_feature 1..579: note = source = /note="Description of Artificial Sequence: Synthetic coding sequence"
  source 1..579: mol_type = other DNA
atgggcgtgcacgaatgccccgcttggttgtggctcctgttatccctgctgagcttaccactggggctccccgtcctgggcgcccctccaagactgatctgcgattcaagggtacttgagcgatacctgctcgaggccaaggaagccgagaacattactaccggctgcgctgaacactgttccctgaacgagaatattacggtgcccgatacgaaggtgaacttctatgcctggaagcgtatggaggtcgggcagcaagcagtggaggtttggcagggccttgcattactttctgaggcggtcctgcgaggacaggccctccttgtcaacagctctcagccatgggaaccccttcagctgcacgtggacaaagctgtgtctggccttcggtctctcactacattgttacgggcactgggagctcagaaagaggcaattagtccaccagatgccgcctccgccgcaccactgcgcaccatcaccgccgatactttcagaaaactgtttcgcgtatatagcaacttcctacgaggcaagttgaagctttatactggtgaagcttgcaggacgggagatcga

SEQ ID NO: 10878 - DNA, 618 bp, synthetic construct
  misc_feature 1..618: note = source = /note="Description of Artificial Sequence: Synthetic coding sequence"
  source 1..618: mol_type = other DNA
atgtgtgagcctgctccccctaagcccacacaatctgcttggcatagcttcccagagtgcccagccctgctgctcttgctgtctctcttgcttcttcccctggggctcccagtgctgggagccccaccacggcttatatgtgactccagggtcctggaaaggtatattctcgaggcaagagaagctgaaaacgtgaccatgggctgtgcccaaggctgcagcttctccgaaaacatcaccgtgcccgatacaaaggtgaatttctacacctggaaaaggatggatgttggacagcaggcgctggaggtatggcaggggttagcactccttagcgaagctatcctcagggggcaagctctcctcgcaaatgccagccagccaagcgaaacaccacaactccatgtggacaaggccgtgtcaagcctgagatcgttgacgtctttgttgagagctctgggagcacagaaagaagccatgagcctgccggaagaggcctctccagccccactccggacttttacggtggataccctgtgtaaactttttcggatctattcaaactttctgcgtggaaagcttactctgtacacaggcgaagcgtgcaggcgcggagatagg

SEQ ID NO: 10879 - DNA, 618 bp, synthetic construct
  misc_feature 1..618: note = source = /note="Description of Artificial Sequence: Synthetic coding sequence"
  source 1..618: mol_type = other DNA
atgtgtgagcctgcgccacccaagcctacgcaaagcgcatggcactccttccccgagtgtccggcacttcttctgctgctctctctgctcctccttccactgggccttcctgtcctcggtgcccctccaagattgatctgtgacagccgtgtcttggagcggtacatcctggaagccagagaagcagaaaacgtgactatgggatgcgcacaggggtgcagtttttctgagaacattaccgtgcctgacaccaaagtgaacttttacacctggaaacgtatggatgtggggcagcaagccttggaagtttggcaaggacttgcacttctttcagaggcaattctgcgcggtcaggctcttctggcaaacgcctcgcaaccatccgagactccccagcttcatgtagacaaggcggtgtcgtcgctccggtcgcttacgtcccttcttcgcgcactcggtgcacaaaaggaagccatgagcttgcctgaagaagcatctcccgcgccactgcgaacttttactgtggataccctctgtaagctgttcagaatttactccaacttcctgcgtggaaagctgactctctacaccggagaagcgtgtcggcgtggcgataga

SEQ ID NO: 10880 - DNA, 618 bp, synthetic construct
  misc_feature 1..618: note = source = /note="Description of Artificial Sequence: Synthetic coding sequence"
  source 1..618: mol_type = other DNA
atgtgtgaaccagcccccccgaagccaacacagagtgcttggcactcctttccagaatgccccgctctgttgctgttgctctcccttctgttgctgcccctgggcctgcccgtgttgggcgccccccctcgcttgatctgtgattctcgcgtattggaacggtatattctggaagcgcgagaagctgagaacgttacgatgggatgcgcccaaggctgtagtttttctgagaacattaccgtccccgacactaaagtgaatttctacacctggaagcgaatggacgtaggacagcaggcgttggaggtgtggcagggacttgcactcctgtctgaagccatcctgcgggggcaggccctcctggctaacgcctctcagccctccgagacaccccagctccacgtggacaaggctgtctctagcctgaggtcactgacttctctgctcagggcactcggggcccagaaggaggctatgagcctccccgaagaagcaagtccggccccattgcggactttcaccgttgatactctttgcaagctctttcgcatttattctaactttctgcgggggaaactgacattgtataccggggaggcctgcaggaggggagataga

SEQ ID NO: 10881 - DNA, 618 bp, synthetic construct
  misc_feature 1..618: note = source = /note="Description of Artificial Sequence: Synthetic coding sequence"
  source 1..618: mol_type = other DNA
atgtgtgagccagcccctccgaaacctacgcaatcggcctggcattcctttcccgaatgtccagcgctgctgcttctcctctcactgctccttcttccgttgggactgccagtgctgggagcgcctcccagattgatttgtgactcgcgggtgctcgaaagatacattcttgaggccagggaagcagaaaacgtgacgatgggttgcgcacaaggttgttcattcagcgagaacatcactgtccccgacaccaaggtcaacttctatacctggaagaggatggatgtggggcaacaggccctggaggtgtggcaggggcttgctctgctttcggaagcgattctccgcggccaagcactgctggcaaacgcctcccagccaagtgaaaccccacagctccatgtggataaggcagtctcctcactccgctccctgacgtcactccttcgggcgcttggggcgcaaaaggaggcaatgtcgcttccagaagaagcatcacctgcaccacttagaacctttactgttgacaccctgtgtaaactgttcaggatctactcaaatttcctgagaggtaaactgactctttacaccggggaggcatgccgcagaggtgacagg

SEQ ID NO: 10882 - DNA, 618 bp, synthetic construct
  misc_feature 1..618: note = source = /note="Description of Artificial Sequence: Synthetic coding sequence"
  source 1..618: mol_type = other DNA
atgtgtgaaccagcaccccctaagccgacccagtcagcatggcatagcttcccagagtgcccagctctcctgctcctgctttccctgctcctcctgccactgggactgccagtgctcggagctccgccgcgcctgatctgcgattccagagttctggaaagatacatcctggaggcacgcgaagcagaaaacgtcaccatgggatgcgcccaaggatgcagcttctcggagaacattactgtgccggataccaaggtgaacttctacacttggaagcggatggatgttggtcagcaggctctggaggtgtggcagggcctcgctctgctctccgaggcgattctgcgcggacaagccttgctcgcgaatgcttcccagccatccgagactccgcagctgcacgtggacaaggccgtgtcgtcgctgcgctcgctgactagcctcctgcgcgcgctgggagcgcagaaagaggccatgtcgctgcctgaggaagcctcgccagcgcctctgcgcacttttaccgttgatactctctgcaagctgttccggatctactcaaacttcctgcgcggaaaactcaccctgtacaccggcgaagcctgtcggagaggagacagg

SEQ ID NO: 10883 - DNA, 618 bp, synthetic construct
  misc_feature 1..618: note = source = /note="Description of Artificial Sequence: Synthetic coding sequence"
  source 1..618: mol_type = other DNA
atgtgtgagcctgctcccccgaagcctactcaatccgcttggcacagcttccccgagtgtccagctctgctgctgttactgtcactgctccttctccctctcggtctgcccgtgctgggcgctccacctaggttgatctgcgattcgcgagtgctcgaacgctatatcctggaggcacgcgaggccgaaaatgtgactatgggttgcgctcagggctgctccttcagtgagaacatcactgtgcctgacacgaaagtgaacttctacacctggaaaagaatggacgtgggtcaacaggcgctggaagtctggcaggggctggccctcctctccgaggctattctaagaggccaagccctgctggccaacgcgagccaacctagcgaaacccctcagctccatgtagataaagctgtctcctctctgagatccctgactagtctattgagggctcttggagcacagaaggaggctatgtctctgccagaggaagcttcaccagcgcccctccgtaccttcaccgtcgatacactctgtaagttattccgaatttattctaacttcctgaggggaaagctcaccctgtataccggggaggcttgtcggcggggggacagg

SEQ ID NO: 10884 - DNA, 618 bp, synthetic construct
  misc_feature 1..618: note = source = /note="Description of Artificial Sequence: Synthetic coding sequence"
  source 1..618: mol_type = other DNA
atgtgtgagccagcgccgccgaagcccacccaatcagcctggcactcattcccggagtgcccggcacttctgctgcttctgtccctgctgctgctcccactcggtttgccagtcctcggtgcgccacctaggcttatctgcgacagccgcgttctggagcggtacatcctcgaagcgagggaggccgaaaatgttaccatgggatgtgcccagggctgctcgttctcggaaaacatcaccgtgcccgacaccaaagtgaatttctacacctggaagcgaatggacgtgggacaacaggcccttgaggtgtggcaaggactggccctcctctcggaagcaatcctgcgagggcaggccctgctggccaacgccagccaaccgtcggaaaccccccaattgcacgtggacaaggccgtgtcgtctttgcgcagcctgacttcactcttgagagcactcggagcacagaaggaagccatgtcgctgccggaagaggcgagtcctgctccgctgcgcactttcactgtggacactctgtgcaagctgtttaggatctactccaatttcctgcgcggcaaactgactctgtacactggagaagcctgtcgccgcggtgaccgg

SEQ ID NO: 10885 - DNA, 618 bp, synthetic construct
  misc_feature 1..618: note = source = /note="Description of Artificial Sequence: Synthetic coding sequence"
  source 1..618: mol_type = other DNA
atgtgcgagccggccccgcccaaaccgactcagtccgcatggcacagcttccctgaatgcccggcactcctgctcctgctttctctgttgctgctgccactgggcctgccagtcctcggagctccgccgcgcctcatctgcgactcgcgtgtgttggaacgctacatcctcgaggctagggaagcggagaacgtgaccatgggatgcgcacagggatgtagcttttcggagaatatcaccgtgccggataccaaagttaacttctacacgtggaaaagaatggatgtcggacagcaggccctggaagtgtggcagggactggccctcctctccgaagcgattctgcgcggccaagctcttctcgcgaacgcctcacagccctcggagactccccagctccacgtggacaaagccgtgagctcgctcagaagcctgaccagcctgctgcgggcactgggggcacaaaaagaagccatgtcgctgccagaagaggcgtctccggcgccattgagaacgttcaccgtggataccctctgcaagctgtttcggatctactcgaatttcctgcggggcaagctgaccctgtacaccggagaggcgtgccgccgcggggaccgc

SEQ ID NO: 10886 - DNA, 618 bp, synthetic construct
  misc_feature 1..618: note = source = /note="Description of Artificial Sequence: Synthetic coding sequence"
  source 1..618: mol_type = other DNA
atgtgtgagccagcaccacctaagcctacgcaaagcgcatggcactcctttccagagtgtccagctctcctgttgttgctcagcttgctgctgctgcccctgggcctgcctgtactgggagcacctcctaggctcatttgtgactcacgcgtactcgaacgctatattctggaagcacgcgaggctgagaacgtgaccatgggatgtgctcaggggtgctctttctccgagaacataactgtcccagatactaaggtgaatttttatacctggaagagaatggatgtagggcagcaggcactggaagtgtggcagggcttggccttgttgagtgaggcaattctgagggggcaggctctgctggctaacgcgtcccagccctcagagacaccgcagctgcacgtggataaggctgtaagttctctgaggtctcttaccagcctgcttagagcactgggagcacagaaggaggccatgtcactgccagaagaggcgagccccgcacccctgcgcactttcactgtggacaccttgtgtaagctgttcaggatttactctaactttctgaggggtaagcttactctttataccggagaggcctgccgacgcggggaccgc

SEQ ID NO: 10887 - DNA, 618 bp, synthetic construct
  misc_feature 1..618: note = source = /note="Description of Artificial Sequence: Synthetic coding sequence"
  source 1..618: mol_type = other DNA
atgtgtgaaccagcaccaccaaagccgactcagtcagcctggcattcatttcctgagtgtccagctctactcctgcttctttccttgttactgctgcccctcggactgccagtactcggcgcacctccccgactgatctgcgattcaagggtcctggaaagatacatcctcgaggcgagagaagctgagaacgtgaccatggggtgcgcacagggctgttcatttagcgaaaacatcaccgtgccagacactaaggtaaatttttatacgtggaagcggatggacgtgggacagcaggccctcgaggtgtggcaaggcctggctctgttgagcgaagctatccttcgaggtcaggcgctgttggcaaatgcgagtcagccgtctgaaactcctcagctccatgtggataaggcggtgagttcgctccggtctttgacgtctctcctgagggccctgggggctcagaaggaagctatgtctctgcctgaggaggccagcccagctcctcttcgcacctttaccgtcgacaccttgtgcaaactcttcaggatctattcaaacttcctgaggggcaagctcactctgtacactggagaggcttgcaggcgaggtgatagg

SEQ ID NO: 10888 - DNA, 618 bp, synthetic construct
  misc_feature 1..618: note = source = /note="Description of Artificial Sequence: Synthetic coding sequence"
  source 1..618: mol_type = other DNA
atgtgtgaacctgccccccctaagccgacacagtccgcctggcatagctttcctgagtgtcccgcgcttttattgttgctatcgttgctgttactccccttgggcctgcccgtgttgggcgctcccccgcgcctgatttgcgattcccgcgtacttgagagatatatcctggaagcaagagaagccgaaaacgtcaccatgggctgcgcacagggctgctccttcagcgagaacatcacagtccccgacaccaaggtaaacttttacacctggaagaggatggacgttggacagcaggcattggaagtctggcaaggcctggctttgctcagtgaggcgatactgaggggtcaagcccttctcgccaacgcttcacaaccctccgaaaccccccagttgcatgtggacaaagctgtgtcatccctgcgaagcctgacgagcttgctgcgggccctaggggcccagaaagaagcaatgagcctgcccgaagaggcgtctccagctcctctgcgaaccttcaccgtggacacactttgtaagctcttccggatttattccaactttctgaggggaaagctgacgctgtacaccggcgaagcgtgtaggagaggagaccgc

SEQ ID NO: 10889 - DNA, 618 bp, synthetic construct
  misc_feature 1..618: note = source = /note="Description of Artificial Sequence: Synthetic coding sequence"
  source 1..618: mol_type = other DNA
atgtgcgaacctgcccctcctaaacctacccaaagcgcgtggcacagctttccggaatgcccggcgcttctgctcctgctgagcctcctgctcctaccactgggactgccagtgttgggtgcgccgcctcggctgatttgtgacagccgagtactggagcggtatatcctggaggctcgcgaagctgaaaatgtcaccatgggctgtgcacagggatgcagcttctccgagaacattaccgtcccggacaccaaagtcaatttctacacttggaaacggatggatgttggtcagcaggcactggaagtgtggcaaggactcgcccttctgagcgaggcgatcctgcgcggccaggcattgctggcaaatgcttcacaacctagcgagactccgcagctgcatgtggataaagccgtgagctcactgcgtagcctgaccagcctgttgcgtgcgctgggcgcccagaaggaggcaatgagcctgccggaagaagccagtcccgcgcctctgcgcacctttacagttgacacactctgtaaactgttccggatctattctaacttcttacgcggtaaactgaccctgtacaccggcgaagcctgccggcgcggcgacagg

SEQ ID NO: 10890 - DNA, 618 bp, synthetic construct
  misc_feature 1..618: note = source = /note="Description of Artificial Sequence: Synthetic coding sequence"
  source 1..618: mol_type = other DNA
atgtgtgagcctgcgccccccaagcccacccaatcggcgtggcacagcttccctgaatgccccgctctccttctgttgctgtcacttctgctgctccccctcggcctcccggttttgggcgcccccccacggttaatttgcgattcccgcgttttagagcgctatatcttggaggcccgggaggctgagaatgtcactatgggttgtgcgcagggttgctcctttagcgagaacattaccgtacccgacacaaaggtaaacttctacacatggaagcgcatggatgtgggacagcaagcgctggaggtctggcaggggttagctctgctctccgaggctatcctgcggggccaagctctgttggctaacgcttcgcaaccgtctgagaccccccaactgcacgtggacaaggctgtgtcgtcactacgctcccttacaagtcttctccgcgcactcggagcccaaaaggaggctatgtccctcccagaagaagcctcccccgcccctctccgcaccttcaccgttgataccctttgcaaactgttcaggatctacagcaactttctccggggcaagttgactctctacaccggtgaggcttgcagacggggtgaccgg

SEQ ID NO: 10891 - DNA, 618 bp, synthetic construct
  misc_feature 1..618: note = source = /note="Description of Artificial Sequence: Synthetic coding sequence"
  source 1..618: mol_type = other DNA
atgtgtgagcctgctccccctaaaccaactcaatctgcatggcactctttcccagaatgccctgctctgctgctgctcctgtcactcctcttactgcccctgggcctgccggtgcttggggcaccaccgcgcctgatttgcgattctagagtgctggagaggtatatactagaagctcgggaagccgagaacgtaaccatgggttgtgcccaaggatgtagtttctccgagaacattaccgtgcctgatacgaaggtaaatttctatacatggaagcggatggacgtcggacagcaggcactggaggtttggcaaggccttgctttgctgagtgaagcgatcctgaggggacaggcgttgctggccaatgcaagccaaccttcagagactcctcagctgcatgtggataaagcagtcagcagtctgagatcactgactagcctgctacgcgccctcggagcccagaaagaagcgatgagccttcctgaagaggcatctcccgcacccctgcgcacctttacagtcgataccctctgtaaacttttccggatttactctaatttcctgagaggcaagctgaccctgtatacaggtgaggcgtgtcgtcgaggcgatcga

SEQ ID NO: 10892 - DNA, 618 bp, synthetic construct
  misc_feature 1..618: note = source = /note="Description of Artificial Sequence: Synthetic coding sequence"
  source 1..618: mol_type = other DNA
atgtgtgaaccggcgccgccgaaaccgacgcaatcggcgtggcattcgtttccggaatgtccggcgttactattactattatcgctactattactaccgttaggtttaccggtattaggtgcgccgccgcgattaatatgtgattcgcgtgttctagaacgatatatattagaagcgcgtgaagcggaaaatgtaacgatgggttgtgcgcaaggttgttcgttttcggaaaatataacggttccggatacgaaagtaaatttttatacgtggaaacgaatggatgttggtcaacaagcgctagaagtttggcaaggtctagcgctattatcggaagcgatactacgaggtcaagcgctattagcgaatgcgtcgcaaccgtcggaaacgccgcaactacatgttgataaagcggtatcgtcgttacgttcgttaacgtcgctactacgtgcgttaggtgcgcaaaaagaagcgatgtcgctaccggaagaagcgtcgccggcgccgttacgaacgtttacggtagatacgctatgtaaattatttcgtatatattcgaattttctacgaggtaaattaacgctatatacgggtgaagcgtgtcgtcgtggtgatcgt

SEQ ID NO: 10893 - DNA, 618 bp, synthetic construct
  misc_feature 1..618: note = source = /note="Description of Artificial Sequence: Synthetic coding sequence"
  source 1..618: mol_type = other DNA
atgtgtgaacccgctcctccgaagccaactcagagcgcctggcacagtttcccagaatgccccgcacttttgctgctgctctctcttctgctcctgcccctgggccttcctgtgctcggagcccccccccggctgatttgtgactctagagttcttgagcgatatattcttgaagcccgggaggcggagaatgtgaccatgggctgcgcacaaggctgttctttcagcgagaacatcaccgtcccggacacaaaggtaaacttttatacttggaagaggatggatgttggacagcaggccctcgaggtgtggcagggcctcgccctgttaagcgaagccattctgcgggggcaagcacttctggctaatgcctcccaacctagcgagactcctcagttgcacgtcgacaaggcggtaagcagtttgcgcagtctgacaagcctgttgagggcactgggcgctcagaaagaagcgatgtccttgccagaggaggcaagccccgccccgctgcgaaccttcacggttgacaccctctgcaagctttttcgaatctactcgaactttcttcgaggcaaattgactctatatacaggcgaagcgtgcaggcggggtgaccgc

SEQ ID NO: 10894 - DNA, 618 bp, synthetic construct
  misc_feature 1..618: note = source = /note="Description of Artificial Sequence: Synthetic coding sequence"
  source 1..618: mol_type = other DNA
atgtgcgaaccagcacctcctaagccaacccaatccgcatggcatagctttccagaatgtcctgcactcctgcttttgctttcgctccttttgcttccactgggccttcctgtgctgggcgctccgcctcgcctgatttgtgattcccgtgtgctggagagatacatactggaagcgcgtgaagccgagaacgtcaccatgggatgcgcacagggatgtagcttttcggaaaacatcactgtgcctgacactaaggtcaacttttacacttggaagaggatggatgtgggacagcaagcactggaagtgtggcagggacttgcgctcctttcggaggcaattctgagaggccaggctctgctggcaaacgcgtcccaaccatccgagactcctcaactccacgtggacaaggcagtctcctctcttcgctcacttacctccctgctgcgggcactgggtgcacaaaaagaggccatgtctctgcctgaggaagcctcccctgcacctctccgcacttttactgtggacaccctgtgcaaactttttagaatctactccaactttcttcgcggaaagttgaccctgtacaccggagaagcctgcagacggggtgacagg

SEQ ID NO: 10895 - DNA, 618 bp, synthetic construct
  misc_feature 1..618: note = source = /note="Description of Artificial Sequence: Synthetic coding sequence"
  source 1..618: mol_type = other DNA
atgtgtgaacctgcgcctccaaagcccactcagtcggcatggcattcctttccagaatgtcctgcactgctcctccttctgtccctgcttctcctcccgttgggattgccagtccttggtgcgccaccaagactcatctgtgattcaagagtccttgagaggtatattcttgaagcacgggaagcagaaaacgttactatggggtgtgcacaaggttgcagcttcagcgaaaacatcaccgtgcctgacaccaaggtgaacttttacacgtggaagcgcatggatgtgggacaacaggccctcgaggtgtggcagggactggcattgttgtcggaagccattcttagaggccaagccttgctcgcaaacgcatcgcaacctagtgaaacgcctcaactccacgtcgataaagcagtctcatccctccgctccctcacttcgcttttgcgggcacttggtgctcaaaaggaggcgatgtcccttccagaagaggcctcccctgcaccactgaggactttcaccgtggataccctctgtaagctctttaggatctacagcaattttcttcgggggaaactcacgctgtacactggagaagcgtgccgaaggggagatagg

SEQ ID NO: 10896 - DNA, 618 bp, synthetic construct
  misc_feature 1..618: note = source = /note="Description of Artificial Sequence: Synthetic coding sequence"
  source 1..618: mol_type = other DNA
atgtgtgagcccgcgccacctaaaccaacccagagcgcatggcattctttcccggagtgccccgctcttttgctgctcctctcactcctgctgcttcccctgggcttgccagtgctgggtgcccctccgcgacttatttgcgactcgagagtgctggaacgctacatcctggaagctcgcgaggcggaaaacgttaccatgggctgcgctcagggatgctccttctccgaaaacattactgtgccggacactaaagtgaacttttacacttggaaacgtatggatgtcggacaacaagccctcgaagtgtggcagggcctggcgctcctctcggaggccatcctccgcgggcaagcactgcttgccaatgcgtcgcaaccatccgaaactccacagctgcacgttgataaggccgtctccagcttgcggagcctcacctcgctgctcagggcactcggtgcccagaaagaagctatgagtctgccggaagaggcctcaccggctcctctgcgtaccttcaccgtagacactttgtgcaagctgtttaggatctattccaatttccttagaggaaagctgacgctttacaccggagaggcgtgtcggaggggggatcgg

SEQ ID NO: 10897 - DNA, 618 bp, synthetic construct
  misc_feature 1..618: note = source = /note="Description of Artificial Sequence: Synthetic coding sequence"
  source 1..618: mol_type = other DNA
atgtgcgaacccgcaccgccaaagcctacccagtcagcctggcattcgtttcctgagtgccctgcacttctgttgcttctcagccttctgctgcttccactgggactgccagtgcttggggctccccccagactgatctgtgactccagagttttggaaagatacatactggaagcgagggaggcagaaaacgtcacgatgggttgtgcgcagggatgctcattctccgagaatatcacggtcccggatacgaaggtgaacttttacacttggaaaagaatggatgtcgggcaacaggcactcgaagtgtggcaagggctcgcactgcttagcgaggcaatactgcggggccaagcgctccttgccaatgcaagccagccgtccgagactccgcagctccatgtggataaggcggtgtcctcgctcagatccctcacttccctccttagagcactgggtgcccagaaagaggcgatgtccctgcctgaagaagcatccccagcacccctgcgcacgtttaccgtcgataccctttgtaagttgttcaggatctactcaaactttctgcgcggcaaattgaccctttacaccggagaagcatgtcgacggggggaccgt

SEQ ID NO: 10898 - DNA, 618 bp, synthetic construct
  misc_feature 1..618: note = source = /note="Description of Artificial Sequence: Synthetic coding sequence"
  source 1..618: mol_type = other DNA
atgtgtgagccagctcctccaaagccaacccagtcagcctggcacagctttcccgagtgccctgctctcctcctgcttctgtctttgctgctcctgcccctgggactgcccgtccttggcgctccccctcggcttatttgcgacagcagagtccttgaaagatacatcctcgaggccagggaagcggagaacgtcaccatgggatgcgcacaggggtgtagctttagtgaaaacatcaccgtgcctgataccaaggtgaacttctacacatggaagagaatggacgtggggcagcaggctcttgaggtgtggcagggcttggctttgctgtcagaggctatactcagggggcaggctctgctcgctaatgccagtcagcccagcgagacgcctcagctgcacgtggataaggccgtcagttcccttaggagcctcactagtcttctcagagctcttggggctcagaaggaggcgatgtccctgccagaagaggcctccccagcccccctgcgcacgttcactgtcgatacactgtgcaaactgtttaggatatattccaattttcttagaggaaaattgacattgtatacaggagaggcttgcaggcgaggcgatcgc

SEQ ID NO: 10899 - DNA, 618 bp, synthetic construct
  misc_feature 1..618: note = source = /note="Description of Artificial Sequence: Synthetic coding sequence"
  source 1..618: mol_type = other DNA
atgtgtgaaccagcgcccccaaaaccgacacagagtgcatggcattcgttcccagaatgtcctgcactccttcttttgttaagtctgcttctccttcccttgggactgcccgtccttggcgcccccccacgcctgatttgcgattcgagagttctggaaagatatatcctcgaggcgcgtgaagctgaaaatgttaccatgggctgcgcacagggatgttcattttccgagaacataaccgtgccagacaccaaggtgaacttctatacgtggaagcggatggatgtgggccagcaggctcttgaagtatggcagggtcttgcgctactgagtgaagccatcctgcgtggtcaggccctactggccaatgctagtcagccctccgagactccgcagttgcatgtggataaggcagtgtcttctctgcgctccctgacttcccttttgagagccctgggtgcccagaaagaggctatgtcgctgcctgaagaagcaagccccgctcctctgagaacctttactgttgatacgctgtgcaagctgttcaggatctatagcaactttctgcgggggaagctgacgctctacaccggcgaagcctgtcggcgtggggatcgt

SEQ ID NO: 10900 - DNA, 618 bp, synthetic construct
  misc_feature 1..618: note = source = /note="Description of Artificial Sequence: Synthetic coding sequence"
  source 1..618: mol_type = other DNA
atgtgcgaacctgcaccgccaaagccaacccagtcagcttggcacagcttccctgagtgtcccgcactgctgctgctccttagcctgttgctgctcccccttggactgccagtcctgggagctccgccacgacttatctgtgacagccgggtgctcgagcggtacatccttgaggcacgcgaggccgaaaatgtgaccatgggttgtgctcagggatgttcattttccgaaaacattaccgttccagataccaaagtgaacttctatacctggaagcgaatggatgtgggacaacaggcactcgaagtgtggcagggcctcgctctgttgtctgaagcaattctccggggacaggccctgctggcaaacgcgtctcaaccaagtgaaactcctcaactccatgtggataaggccgtgagctcgcttcgttcgctgacctcgctgcttcgtgcgctgggtgcacaaaaggaggcaatgtcgctgccagaagaagcatcccctgccccacttcggacgtttaccgtggatacgttgtgcaagttgtttagaatttactcgaattttctcagaggtaaacttaccctttacactggggaagcgtgtagacggggtgatcgg

SEQ ID NO: 10901 - DNA, 618 bp, synthetic construct
  misc_feature 1..618: note = source = /note="Description of Artificial Sequence: Synthetic coding sequence"
  source 1..618: mol_type = other DNA
atgtgtgagcccgcacctccaaagccgacacaatccgcatggcacagctttccagaatgccctgcactgctgctgctgcttagcctgctgctgctcccactcggtctccccgtgctcggtgcccccccgcggctgatctgcgattcccgcgtgcttgaacgctatatacttgaagcacgagaggccgagaacgtcaccatggggtgcgcacaggggtgctcctttagcgaaaacataactgtacctgataccaaggtgaacttctacacatggaagcgcatggacgtgggacagcaggctctggaggtgtggcagggtcttgcactcttatctgaagctattctgagggggcaggcgctgctggccaacgcgtcccagccaagcgagacaccccagctgcacgttgataaagcggttagctctctgcggtcactcactagcctgctgcgagctctgggtgcgcaaaaagaggcaatgtctctgcctgaggaggcatctcccgccccgctgcgcacgttcactgtggataccctgtgcaagctgttcaggatctacagcaactttcttagaggaaagttaacactgtacaccggtgaggcttgcagaagaggcgatcgt

SEQ ID NO: 10902 - DNA, 618 bp, synthetic construct
  misc_feature 1..618: note = source = /note="Description of Artificial Sequence: Synthetic coding sequence"
  source 1..618: mol_type = other DNA
atgtgtgagcctgctccaccgaagcccacgcagtctgcctggcacagttttcctgagtgtcccgccttgctgctcctcctgagcctgttgctcttgccactaggtctcccagtgttgggagcccctcctcgtctgatttgtgattctcgcgtcctggagagatacattcttgaggctcgcgaggcagagaacgtgactatgggatgtgctcagggctgttcattttccgaaaacatcacagttcccgacacaaaggtgaatttttatacctggaaaagaatggacgttgggcagcaagcgcttgaagtatggcagggactcgcgctgctttccgaggcgatactgagaggacaggctctcctggcaaacgcttcacagcccagtgagactccccaactacatgtcgataaggctgtctcttcactgagatcactgacctcgctgctcagagcactcggagcccagaaggaagctatgtcgctgccggaggaggcgagtcctgctccccttagaacatttaccgtggacaccctgtgtaagcttttccggatatactccaacttcctgcgtgggaagctcactctgtataccggcgaggcgtgcagaagaggcgatcgt

SEQ ID NO: 10903 - DNA, 618 bp, synthetic construct
  misc_feature 1..618: note = source = /note="Description of Artificial Sequence: Synthetic coding sequence"
  source 1..618: mol_type = other DNA
atgtgcgaacctgcgccaccaaaacctacacagtccgcctggcattccttccccgaatgccccgccttgctccttcttctgtccttgttgcttctgcccttgggcctccctgtgctaggcgccccccctaggctaatttgcgactccagggtgctggaacgatatatcctggaagctcgagaagccgagaacgtgactatggggtgcgcacagggttgcagcttctccgagaacataactgtgcctgatacaaaggtaaatttttatacgtggaaacgcatggacgttggacagcaggcacttgaggtgtggcaggggttggcccttttatctgaagccattttgcgcggtcaggctctgctcgcaaatgcgtctcagcctagtgagacacctcagttacacgttgataaagccgtaagtagcttaagaagcctcacttccctgttgcgagcactgggtgctcaaaaggaagctatgagtctcccagaagaagctagtccagctcccctgaggacttttacagtagatactttatgcaagctgtttcgaatctatagcaacttccttagaggtaagctgacactgtacaccggtgaggcttgcagacgcggcgacaga

SEQ ID NO: 10904 - DNA, 618 bp, synthetic construct
  misc_feature 1..618: note = source = /note="Description of Artificial Sequence: Synthetic coding sequence"
  source 1..618: mol_type = other DNA
atgtgtgaacccgcccctcctaagcccactcaatctgcatggcacagttttcccgaatgcccagcactgctactcttgctttcactgctattgctgccactggggcttcccgtgctgggggccccaccacgcctaatctgtgattcgcgggttctagagaggtatattttggaggcgcgggaggcagaaaacgtgactatgggttgtgcccaggggtgtagcttttcagagaacataacggtcccggacactaaagtgaatttctatacctggaagagaatggacgtagggcagcaggccctcgaggtgtggcagggactcgctctgctgagcgaagcgatcttgcgcgggcaggctctgctcgcgaatgcaagccaacccagcgaaacacctcagctgcacgtggataaggccgtgtctagtctcaggtccttaacttcattgctgcgagccctaggggcacaaaaggaagccatgtcactgcccgaggaggcatcgccagcacccctcaggacatttaccgttgatacactgtgtaaactattcaggatctacagtaattttcttcggggtaagctgaccttgtacacaggcgaggcctgtcggaggggcgaccgt

SEQ ID NO: 10905 - DNA, 618 bp, synthetic construct
  misc_feature 1..618: note = source = /note="Description of Artificial Sequence: Synthetic coding sequence"
  source 1..618: mol_type = other DNA
atgtgtgaaccggcaccaccaaagcctacccaatccgcctggcattcctttcctgagtgcccggccctgctgcttctgctctcgctcctgctgctcccgctgggactccctgtgcttggtgcacctccaaggttgatttgtgattcgagagtcctggaacggtatattctcgaggcgcgggaagcagaaaatgtgactatgggatgtgctcagggatgttcatttagcgaaaacattactgtgcccgacacgaaggtcaatttctacacgtggaagcgaatggacgtcggacaacaggcactcgaagtgtggcaggggctcgcacttctttctgaggcgattttgcggggccaagcccttcttgcaaacgcatcacaaccctctgagactcctcagcttcacgtggacaaggcggtgtcgtcacttagatcgctgacctccctgctcagagcactgggagcacaaaaggaggcaatgtcgcttccagaggaagcgtcaccggcaccactcagaacgttcaccgtggacactctttgcaaactttttcgcatttactccaactttctccgtgggaaacttactctttacactggcgaggcatgccgtcgaggtgaccgg

SEQ ID NO: 10906 - DNA, 618 bp, synthetic construct
  misc_feature 1..618: note = source = /note="Description of Artificial Sequence: Synthetic coding sequence"
  source 1..618: mol_type = other DNA
atgtgcgaaccagcacccccaaaacctacccaatcggcctggcattcgtttcccgagtgccccgcactgcttcttctgctgagcttgctgctgctgccactcgggctccccgtccttggcgcgccacctagactgatatgcgactcccgtgtgcttgaacgttacatactggaagcacgggaggctgaaaacgtgactatgggatgtgcacaaggttgttcgttctcggaaaacataaccgtccctgatactaaagtgaacttttacacgtggaaacgcatggacgtgggtcaacaagcacttgaagtgtggcagggcctcgcacttctctcggaggccatccttcgggggcaggccttgctggccaatgcctcacagccatcggaaacccctcagctccatgtcgataaggcagtgtcaagccttcgctcacttacttcgttgctgagagcacttggagcacaaaaggaggctatgtccctccctgaggaggcctccccggccccgctgcgaacgttcaccgtcgatactctgtgcaagttgtttcggatttactcgaactttctccggggcaagctgactctgtacactggggaagcatgcagacggggtgataga

SEQ ID NO: 10907 - DNA, 618 bp, synthetic construct
  misc_feature 1..618: note = source = /note="Description of Artificial Sequence: Synthetic coding sequence"
  source 1..618: mol_type = other DNA
atgtgtgagcctgcaccgccgaaacccacccagtcggcgtggcacagctttccagagtgcccagcactgcttcttcttctcagccttctgctgctgcctctgggtttgccggtgttgggagcacctccacgcctgatctgcgattccagagtgctggagagatatatccttgaagcacgtgaagccgagaatgtgaccatgggctgtgcccaaggttgttccttcagcgagaacattacggtgccggatactaaggtcaacttctacacctggaaaagaatggatgtgggacagcaagcgttggaagtgtggcagggactggccctgctgagcgaggcaattctccggggacaggcactgcttgctaacgcaagccagccatcggaaactcctcagcttcatgtcgataaggcggtgtcaagccttcgatccctcacctccctgctgcgggcactgggggcccagaaggaagcaatgagcctgcccgaagaagcatccccggcccctttgcggacttttaccgtcgatactctttgtaagctctttaggatttactccaactttctccgaggaaagctcaccctgtacaccggggaagcatgcagaaggggcgaccga

SEQ ID NO: 10908 - DNA, 618 bp, synthetic construct
  misc_feature 1..618: note = source = /note="Description of Artificial Sequence: Synthetic coding sequence"
  source 1..618: mol_type = other DNA
atgtgtgagccagccccaccaaagccgacccaaagcgcatggcattctttccctgaatgtccagcgctcctcctgcttctctcgcttctgcttctgccactcggacttcctgtcttgggtgctcctccccggctcatatgcgatagcagagtgcttgagcgctacatccttgaagcacgagaggcagaaaacgtgactatgggatgtgcacagggttgctcgttttccgagaacataactgtgccagataccaaagtgaacttttacacctggaagcgtatggatgtcggtcagcaagcattggaagtgtggcagggactggcactgctcagcgaagcaatcctgaggggtcaagcactgttggccaatgcatcccaaccgagcgaaacccctcaactgcatgtggataaggccgtgagctcacttcggtcgctgacgtcgttgcttagggcgcttggcgctcaaaaggaagcgatgagcttgccagaagaggcatcacccgcgccacttaggacctttaccgtggataccctgtgcaagctgtttagaatctattcgaactttctccgcggaaaacttaccctgtacaccggagaagcctgccgcaggggcgataga

SEQ ID NO: 10909 - DNA, 618 bp, synthetic construct
  misc_feature 1..618: note = source = /note="Description of Artificial Sequence: Synthetic coding sequence"
  source 1..618: mol_type = other DNA
atgtgcgaacccgccccacctaagccaacacagtccgcatggcattcttttccagaatgtccagccctcttgttgctgctgtccctcctcctgctccctctcggacttcctgtcctgggcgcaccccctaggctcatctgcgactccagagttctcgagaggtacattctggaagcaagggaggctgagaacgtcaccatgggatgtgcccagggatgctcatttagcgaaaatattacagtgcccgacactaaggtcaacttctacacctggaagcgcatggatgtcggtcagcaggccctggaggtctggcaaggcctggctctgctctccgaggccattctccgcggacaggctttgcttgcaaacgcttcacagccttctgagacccctcaattgcatgtcgataaggcagtcagctcactcaggagtttgacctctctgctccgcgctctcggtgctcagaaagaagcaatgtcccttccagaagaagcttcacccgcaccactgagaacctttactgtggataccctgtgtaagcttttcaggatctattctaacttcttgagaggcaagctcaccctgtacaccggcgaggcctgccgtagaggtgatcgc

SEQ ID NO: 10910 - DNA, 618 bp, synthetic construct
  misc_feature 1..618: note = source = /note="Description of Artificial Sequence: Synthetic coding sequence"
  source 1..618: mol_type = other DNA
atgtgcgagccagctccccctaagccaacccaaagcgcatggcatagcttcccagaatgcccagcactgctccttctgctttcattactgctactgccacttggcttgccagttctgggagccccaccaaggctcatctgcgatagtagagtgctggagaggtacatcctggaggctagggaggcagaaaacgtgacaatgggctgcgcacaaggttgcagcttcagtgaaaatattacagttcccgacacaaaagtgaatttctacacttggaagcgcatggacgtgggccagcaggccctggaggtgtggcagggactggctctgttgagtgaggccattttgagagggcaggccttactggccaacgctagccaaccctctgagacaccacagctccacgtcgataaagcagtatcatccctaaggtctctgacaagtctgctgagggcgctgggcgcgcagaaggaggccatgtcactccctgaagaggcctcccccgcacctctacgtacttttaccgtagacaccctctgcaaactttttaggatctattcaaattttctgcgggggaaactaactctctacactggagaggcttgtcgtcgtggagatcgt

SEQ ID NO: 10911 - DNA, 618 bp, synthetic construct
  misc_feature 1..618: note = source = /note="Description of Artificial Sequence: Synthetic coding sequence"
  source 1..618: mol_type = other DNA
atgtgcgaacccgctcccccgaagccaacacagagcgcgtggcactcatttccggagtgtcccgcccttctgctgttgctgagtctgctccttctgccgcttggcctgccagttctgggagctccaccgcgcctcatctgcgactctagagtcttggaaagatacatcctggaagctagagaggctgagaatgttacaatgggatgcgctcaggggtgtagcttcagcgaaaacattactgtgcccgatactaaggtgaacttctatacctggaagaggatggacgtgggacagcaggcattggaggtgtggcaaggtctggcactgctgtctgaagcaatcctgaggggacaagctctgctggcaaacgcctcacaaccttccgaaaccccccagcttcacgtcgataaagccgtgtcatcgttgcggtcactgacgagcttgctgagagcgctcggagcccagaaggaggcgatgagcctcccggaagaggccagccctgcccctcttcgtacattcaccgtcgatacactgtgcaagttgttccgcatctattcaaactttcttagagggaaactcacactctacacaggggaagcttgtcggcgcggagaccgc

SEQ ID NO: 10912 - DNA, 618 bp, synthetic construct
  misc_feature 1..618: note = source = /note="Description of Artificial Sequence: Synthetic coding sequence"
  source 1..618: mol_type = other DNA
atgtgtgagcctgccccaccaaagccaacccagagcgcttggcattcgttccctgagtgtcctgccctgctgctactgctatcattgcttctcttgccattgggactgcccgtacttggggcccctccacggctgatctgtgacagccgggtgctggagcgctatatactcgaagcccgggaggccgaaaatgtgactatgggatgcgcccagggctgctctttcagcgagaacatcaccgtgccagacaccaaggtaaatttctatacgtggaagcggatggacgtcgggcagcaggcgcttgaagtttggcagggcttggcccttttgtctgaagccatcctgcgggggcaggctctgctagcaaacgcctcccagccatcagaaaccccacagctacacgttgataaagccgtctcttctttgcgatcactaaccagtctgctgagagctctgggagcccagaaggaggctatgagccttcctgaagaagcctcaccggcgccactcagaaccttcacagtggacaccttgtgtaagctatttaggatctattcaaatttcctgcgaggcaagctcaccctttataccggagaagcttgtaggcggggggaccgt

SEQ ID NO: 10913 - DNA, 618 bp, synthetic construct
  misc_feature 1..618: note = source = /note="Description of Artificial Sequence: Synthetic coding sequence"
  source 1..618: mol_type = other DNA
atgtgtgaacccgcaccccctaagccaacccagtcagcttggcattcgttccccgagtgcccagcattgctgctgctcctgagcctgctgcttcttcctctgggtttgcctgtgcttggagcaccccctcgtttgatttgtgacagccgcgtgcttgagaggtatattctggaagcacgcgaagcggaaaacgtgactatggggtgtgcacaaggctgctcattttccgagaacattaccgtgccagataccaaggtcaatttctacacttggaaacgaatggatgtgggtcagcaggcactggaagtgtggcaggggcttgcactgctctccgaagcgatacttagaggccaggcacttctcgcaaatgcatcgcaaccatccgaaacccctcaactccacgtcgataaagcggtgtcctcgctgagatcgctgaccagccttctcagagctcttggagctcaaaaggaagctatgtcactgccggaggaagcatcacctgccccactgaggactttcaccgtcgacactctttgtaagttgtttaggatttactctaactttctccgcggaaagctgacgctttatactggagaggcatgtaggcgcggtgaccga

SEQ ID NO: 10914 - DNA, 618 bp, synthetic construct
  misc_feature 1..618: note = source = /note="Description of Artificial Sequence: Synthetic coding sequence"
  source 1..618: mol_type = other DNA
atgtgtgaacctgctcccccaaaacccacgcaaagtgcctggcactcatttcctgaatgtcccgccctcctcctcctgctgtctctgttgctgctgccgctgggattgcccgtgctcggagccccccctagactgatctgtgactctagagttttggaacgctatattctggaggcccgggaggctgagaatgttacaatgggctgtgcacagggatgttccttctccgagaatattactgtgccggacactaaggtgaacttttacacatggaaacgcatggacgtagggcagcaagccctggaggtatggcaaggtttagcattgctgtcagaggcaattcttcgcggccaagcacttctggctaacgcgtcgcagcccagcgaaactccccaactccacgtcgacaaggccgtgtcatccctaagatccctgacttctcttcttcgggctctgggtgcccagaaagaagcgatgtctctgcccgaggaagcctctccggcgccactaagaacgtttactgtggataccctgtgcaaacttttccgcatctattccaactttctgcgcggcaaactaacactgtacaccggcgaagcatgcagacggggagaccgg

SEQ ID NO: 10915 - DNA, 618 bp, synthetic construct
  misc_feature 1..618: note = source = /note="Description of Artificial Sequence: Synthetic coding sequence"
  source 1..618: mol_type = other DNA
atgtgcgaaccagcccctccgaaacctacccagtctgcatggcacagcttcccagaatgtccggccctgctgctgctcctgtcgctgctcctcctcccgcttgggcttccggtgcttggcgcaccaccaaggcttatctgcgactcgcgggtccttgaaagatacatactcgaagctcgagaggccgagaacgtgactatgggatgcgctcaaggctgtagcttctcagagaacatcacggtcccagacactaaggtgaatttctacacttggaagcgtatggacgttggtcagcaggcattggaggtctggcaaggactggccctgctttccgaagcgatcctccggggccaggccttgttggctaacgcgtcacagccttccgaaaccccgcagttgcatgtggataaggcggtgtcctccctgcggtccctcacctcattgctgcgggctctgggagcccaaaaggaagcaatgagcctgcccgaggaggcttcgccggcgcctctgcgcactttcacggtggataccctgtgcaagctctttcgcatctactcgaattttctgcgcggcaaattgacgctctacaccggggaagcatgccgacgcggagacaga

SEQ ID NO: 10916 - DNA, 618 bp, synthetic construct
  misc_feature 1..618: note = source = /note="Description of Artificial Sequence: Synthetic coding sequence"
  source 1..618: mol_type = other DNA
atgtgtgaaccagctccccctaaaccaacccagtcggcatggcactcgttcccggaatgtcccgccttactgctgctgcttagtctgctgctgctgccactaggcctgccggtgttaggcgcccccccgagactgatctgcgacagccgggttttggagaggtatattcttgaagctagggaggccgagaatgtgactatgggttgcgctcagggctgctcttttagcgagaacataaccgtgcccgacaccaaggtgaacttttacacatggaaacgaatggacgtcggacagcaggctcttgaggtttggcaagggctcgccctactgagcgaagctatcctgcgcggtcaggccttgctcgcaaacgccagtcagcctagtgaaacaccccagctacatgtcgataaggctgtcagctctcttagatctctaacctccctcttgcgagctctaggggcccagaaagaggccatgtctctcccagaggaggcgtctcccgccccattgagaacttttaccgttgacactctgtgcaaattatttcggatatactcgaatttcctacgaggaaaattaacactctatacgggtgaggcgtgccgccggggggaccgc

SEQ ID NO: 10917 - DNA, 618 bp, synthetic construct
  misc_feature 1..618: note = source = /note="Description of Artificial Sequence: Synthetic coding sequence"
  source 1..618: mol_type = other DNA
atgtgtgagcctgcgcccccaaagccgacccagtccgcatggcactctttccccgaatgcccagcactcctcctgctcttgagtctgctccttctgccgctgggactgccagtcttgggcgcaccaccaaggttgatttgcgacagcagggtcctcgaaaggtatatcctggaagccagggaagccgagaacgtgactatgggttgcgcccagggttgttccttttctgagaacatcacggtgcccgatacaaaggtgaacttttacacctggaagagaatggacgtcggccaacaggccctcgaagtgtggcagggtctcgctctgctgtccgaggccatcctcaggggacaagcgcttttggccaatgctagccagccctcagagactccccagctgcacgttgacaaagcggtctctagtctccgcagtctcaccagtctgttgagggcactgggagcccaaaaagaagctatgagtcttccagaagaggcctctcccgcccccctgagaaccttcacagttgacaccctctgtaaactcttcaggatctattctaattttctgagaggaaaattgacactctacaccggtgaagcttgtagacgcggtgacagg

SEQ ID NO: 10918 - DNA, 618 bp, synthetic construct
  misc_feature 1..618: note = source = /note="Description of Artificial Sequence: Synthetic coding sequence"
  source 1..618: mol_type = other DNA
atgtgtgaaccagcaccaccaaaaccaactcaatctgcttggcattcttttcctgaatgcccagcactccttttacttcttagtcttcttcttttacctttaggacttcctgtcttaggtgcaccaccacgtcttatttgtgattcaagagtattagagagatatatattagaagcaagagaagctgaaaatgtgactatgggatgtgcacaaggttgttctttttcagaaaatattactgttcctgatactaaagttaatttttacacatggaaacgtatggatgtaggacaacaagcccttgaagtttggcaaggtttagcattattaagtgaagctattttaagaggacaagctttattagcaaatgcaagtcaaccaagcgaaacaccacaactacatgttgataaggcagtttcatctttaagatcattaacaagtttacttcgtgctttaggagcccaaaaagaagcaatgtcacttccagaggaagcatcaccagcaccacttagaacattcactgtcgatacactttgtaaattattccgaatttattcaaattttttaagaggtaagttaactctttatactggtgaagcttgtagaagaggtgataga

SEQ ID NO: 10919 - DNA, 618 bp, synthetic construct
  misc_feature 1..618: note = source = /note="Description of Artificial Sequence: Synthetic coding sequence"
  source 1..618: mol_type = other DNA
atgtgcgagccagcgccgcctaagcctactcagtcggcttggcattccttccctgagtgcccggccctgcttctgctgctgtcactgttgctgctgccgctggggctccccgtgctgggggccccacccagattgatctgcgactcccgggtgctcgaacgctatatcctcgaggccagagaagccgaaaacgtgaccatgggctgtgctcagggatgctccttttccgagaacatcactgtgcccgacaccaaggtgaacttttacacctggaagcggatggatgtgggacagcaggcccttgaagtgtggcaaggacttgcgctgctcagcgaagcgatcctgcggggacaagccctgctggctaatgccagccagccctcggaaactccccagcttcacgtcgacaaggccgtgtcctctctgcgctccctgacgtcgctgctccgcgctctgggagcacagaaagaggcaatgtcgctccctgaagaggcctcgcctgctcccttgaggaccttcaccgttgacaccctgtgcaaactgttccgcatctacagcaacttcctcagaggcaagctcacgctgtataccggagaggcctgtcgcagaggagatcgg

SEQ ID NO: 10920 - DNA, 618 bp, synthetic construct
  misc_feature 1..618: note = source = /note="Description of Artificial Sequence: Synthetic coding sequence"
  source 1..618: mol_type = other DNA
atgtgcgaacccgctccccctaagccaacccagagtgcatggcactctttcccagagtgcccggccctgttgctcctactatcgctcctgcttctgcctctcggtctaccagtcttaggcgctcccccaaggctcatctgtgactcaagggtgctggaacgatacatcttggaagcgcgagaggccgaaaacgtaactatgggatgcgcacaggggtgtagcttcagcgagaacatcactgtccctgacaccaaggtcaatttctatacctggaaacgaatggacgtcggccagcaggccttggaagtatggcagggactcgcactgctgagtgaggctatcctccggggccaggcgttgctggcaaacgctagtcagccttccgagactccccagcttcatgtggataaagccgtcagttcccttagaagtttaacgtcattactgcgtgccctgggcgctcagaaggaggcaatgtccttgccagaagaagcttcacccgcccctctcaggaccttcaccgtggacactttatgcaagctttttcgcatctatagcaacttcttgcgaggaaaattaaccctgtatacgggcgaggcttgtaggcgaggtgataga

SEQ ID NO: 10921 - DNA, 618 bp, synthetic construct
  misc_feature 1..618: note = source = /note="Description of Artificial Sequence: Synthetic coding sequence"
  source 1..618: mol_type = other DNA
atgtgcgagccggctcctcctaagccaactcagagcgcttggcattcttttcctgagtgcccagcactcttgctgctgctgagcctactgttactgcccttagggctgcctgtcctcggagcaccccccagattaatctgtgacagccgagttttggagcgatacattcttgaggcacgcgaggcggagaatgtaactatgggttgtgctcaggggtgttctttttccgagaacattaccgtgcccgataccaaggtcaatttctatacttggaagcgaatggacgtcggccagcaggcgctggaagtgtggcaaggtctggcactcctgagcgaggccatcctgcggggtcaagccttactggctaatgcctctcagcccagcgagacgcctcagctgcacgtggacaaagctgtgtcttcattacggtcattgacctcgttgcttagagctctcggagcgcagaaagaagccatgtctcttccagaagaagctagccctgcccctctccgtaccttcaccgtggacaccctatgcaaattatttcgtatctacagcaatttcttgcgggggaaactgacactgtataccggcgaggcttgcagacgcggtgaccgc

SEQ ID NO: 10922 - DNA, 618 bp, synthetic construct
  misc_feature 1..618: note = source = /note="Description of Artificial Sequence: Synthetic coding sequence"
  source 1..618: mol_type = other DNA
atgtgtgagccggcaccaccaaaaccaacacagtctgcctggcactcattccctgaatgtccggcgcttcttttgctgctttcactgctgctgctgcctctgggcctgcccgttctcggcgcgccccctcggttgatctgtgacagccgggtgctcgagcggtacattctagaagcaagggaggcagagaatgttacgatgggttgcgctcaaggatgctccttcagtgagaacatcacagtgcctgatactaaagtgaacttttacacatggaagcgtatggatgtcgggcagcaagccctcgaggtctggcagggtttggctctgctttctgaggccatcttgcggggccaggccctgttggctaatgccagtcagccctcggagacccctcagctccacgtggacaaggcggtgtcttctctgcgttccctaacttctctactgcgggctctcggagctcagaaggaagccatgtcacttcctgaggaagccagccccgcacctcttcgtactttcacggtggacaccctttgtaaactgttcaggatctattctaattttttgagaggaaagttaactctctacacaggggaggcttgcagaaggggcgataga

SEQ ID NO: 10923 - DNA, 618 bp, synthetic construct
  misc_feature 1..618: note = source = /note="Description of Artificial Sequence: Synthetic coding sequence"
  source 1..618: mol_type = other DNA
atgtgcgaacccgcccccccaaaacctacacagagcgcgtggcacagtttcccagaatgtcccgccctcctgcttttactctctctgctgctgctgcctttggggctgcccgttctaggtgccccaccccgtctgatctgcgactctcgcgttttggagcgctatattctggaggccagggaggccgagaatgtaaccatggggtgtgcacaagggtgctcttttagtgagaacattacagtgcctgacacaaaagtaaacttttacacatggaaacggatggatgtaggacaacaggccctggaggtgtggcaggggctggcacttctctcggaggctattctcaggggacaagctctcctggccaacgccagccagccatcagagacacctcagctgcacgtcgataaggccgtgtcttcccttagaagcctaacttctttgctgcgcgcactaggagcacagaaggaggccatgtccttgccagaggaggccagccctgccccgctgcgcacattcaccgtcgacaccctctgtaagttatttagaatttactcgaatttcctgcgtggtaagctgaccctgtacaccggagaggcctgccgaaggggagatcgg

SEQ ID NO: 10924 - DNA, 618 bp, synthetic construct
  misc_feature 1..618: note = source = /note="Description of Artificial Sequence: Synthetic coding sequence"
  source 1..618: mol_type = other DNA
atgtgcgaaccggccccccccaagccaacccagtcagcctggcactcatttccagagtgcccggctcttttgcttctcctgtccctgctcctgctgccactgggcttgcctgtgctgggagcacccccccggctaatctgtgacagtcgcgttcttgaacggtatatacttgaagcccgcgaagctgagaacgttaccatgggatgtgcgcaaggttgcagtttttccgagaacatcacagttccagatactaaggtgaacttctacacttggaagcgaatggacgtgggacaacaggctcttgaagtctggcagggcctagcacttctgagcgaggctattttgcgcggtcaggccttgttagctaatgcgagtcagccctctgaaacgccccaactacatgtcgacaaggcagtcagtagcctacggtcgcttacttccttgctgcgggccctgggtgcacaaaaagaggctatgtctcttcctgaagaggcctccccagcgcccctcagaacgttcactgtggacactctctgcaagctgtttcgcatttatagcaactttctgagggggaagttgacgctgtacacgggcgaggcgtgtaggcgtggcgatcgc

SEQ ID NO: 10925 - DNA, 618 bp, synthetic construct
  misc_feature 1..618: note = source = /note="Description of Artificial Sequence: Synthetic coding sequence"
  source 1..618: mol_type = other DNA
atgtgtgaacccgcaccgcctaagccgactcaaagcgcgtggcattcgttccccgaatgtccagcactccttttgctgttgtcattgttgcttctgcctctgggccttcccgtccttggtgcacctcctcgcctcatctgcgatagcagagtgttggaaaggtacattcttgaagcacgcgaagcggaaaacgtgactatgggatgcgcccaaggatgttcgttctcagagaacataaccgtcccagataccaaggtgaacttttacacttggaaaagaatggatgttgggcaacaggcgctcgaagtgtggcaggggctggctctgctgtccgaggcaattcttcggggacaggcactgttggcaaatgcatctcaaccatcggagacgccacaactgcacgtggacaaggcagtgtcgagccttagaagcctgacttcactgctccgtgcgctcggtgctcagaaggaagccatgtccttgccggaggaagcctcgcctgcgcctcttcgcacgttcaccgtcgacaccctctgtaagctgtttaggatctactcgaattttctgcgtggcaaacttactctgtacactggtgaggcgtgccgtcggggggaccgg

SEQ ID NO: 10926 - DNA, 618 bp, synthetic construct
  misc_feature 1..618: note = source = /note="Description of Artificial Sequence: Synthetic coding sequence"
  source 1..618: mol_type = other DNA
atgtgcgagcctgccccccctaagcccacgcaatccgcctggcacagttttccagagtgcccagccctgctcctcctacttagtcttctgctgctccccctggggttgccggtgctgggcgcaccacctagacttatttgcgactccagggtgctagaacgctacattttggaagcacgggaagccgaaaacgtgactatggggtgcgcgcagggctgtagtttttcagagaacatcaccgtacctgacacgaaggtgaatttctacacatggaagaggatggatgttgggcaacaggctctagaggtatggcagggcttggcactgctttctgaggctatcctcaggggacaggcactcctggctaacgccagccaacctagtgaaacaccacagttgcatgtggacaaggccgtgagctctttgcgaagcctgactagtttgttacgtgcattgggggctcaaaaggaggcaatgtctctgcctgaggaggcttcccctgccccacttcggacctttaccgttgataccttatgcaaactgtttcgtatctacagcaacttcctaagagggaagttaactctctatactggtgaggcatgcaggcgtggcgataga

SEQ ID NO: 10927 - DNA, 618 bp, synthetic construct
  misc_feature 1..618: note = source = /note="Description of Artificial Sequence: Synthetic coding sequence"
  source 1..618: mol_type = other DNA
atgtgcgagcccgctcccccaaaaccaacgcagtctgcatggcattcgttccctgaatgtcccgccctccttttattgctgtccctcctgctcctgccactgggcctcccggtactcggcgccccacctcgcttgatctgcgactcacgtgtcctggaacggtacatcctcgaagctcgagaagccgagaatgtaactatgggttgcgcccagggttgcagcttcagtgagaacataacggtgcctgacactaaagtgaatttctacacctggaagaggatggatgtcgggcagcaggcactggaggtctggcaagggctggccctgctatccgaagcgattctgagaggtcaggccttactggcgaatgcaagtcagccgagtgagacccctcaattacatgtcgataaagccgtgtcaagcctccgcagcctgacctccctgttgagagccttgggggcacagaaggaggccatgtcactccccgaagaggcgtctcccgccccactccgaaccttcacagttgataccctgtgtaagctgttcagaatttattcgaattttctgaggggaaaactcacactgtatactggagaggcgtgccgacggggggaccgg

SEQ ID NO: 10928 - DNA, 618 bp, synthetic construct
  misc_feature 1..618: note = source = /note="Description of Artificial Sequence: Synthetic coding sequence"
  source 1..618: mol_type = other DNA
atgtgcgaaccagcccctccgaagcctactcaaagcgcttggcatagcttccccgagtgcccggccctgctcctgctcctgtccctgctgctgctgcccctggggcttccggtgttgggagctcccccgcgattgatctgcgactcgcgggtcctggaaagatatatcctcgaggccagggaagccgaaaatgtcactatggggtgcgcgcaggggtgttccttttcagagaacattaccgtgccagacaccaaagtgaacttctacacttggaagaggatggacgtcggacagcaagccctcgaagtgtggcagggactggccctgctgtccgaggcgatcctcaggggtcaagccctgttggcgaacgcctcacaaccgtcggagactccgcaactccatgtggacaaggcagtctcgagcttgcgctccctgacttccctcctgagagcgctgggagcgcagaaggaggcgatgtcgctgccggaagaagcctcgcccgcgccactgcggaccttcaccgtcgataccctgtgcaagctcttccgtatctacagcaatttcctgcggggaaaactgactctgtacactggagaagcatgcaggcgcggagacaga

SEQ ID NO: 10929 - DNA, 618 bp, synthetic construct
  misc_feature 1..618: note = source = /note="Description of Artificial Sequence: Synthetic coding sequence"
  source 1..618: mol_type = other DNA
atgtgtgagccagcaccccccaagcctacacaatcggcctggcactcatttccagagtgtccagcactgctgttgctcctgagtctactgctgctgccgctcgggctgcccgttctgggcgctccacccaggttgatctgcgattcacgcgtgttggagaggtatatcttggaggccagggaagcagagaacgtgaccatgggctgtgcgcaggggtgcagcttctctgaaaatatcactgtgccagacactaaggtgaacttttacacttggaaaaggatggatgtaggacagcaggcactcgaagtttggcagggcttagcactactgagcgaggctattctgcgagggcaggcactgctggcaaatgcatctcagccttccgagaccccgcagttgcatgtcgataaggccgtgtccagcctgcggtccctgacatcactactgcgggctctcggggctcaaaaagaggcaatgagcctgcctgaggaggcgtctccggctccactgaggacctttactgtagacactctctgcaagctttttcgcatttatagcaattttctcagaggaaaactaacactgtacaccggagaggcgtgccggcggggtgatagg

SEQ ID NO: 10930 - DNA, 618 bp, synthetic construct
  misc_feature 1..618: note = source = /note="Description of Artificial Sequence: Synthetic coding sequence"
  source 1..618: mol_type = other DNA
atgtgtgagccagccccaccaaagcctacgcaatcggcctggcattcattccccgaatgtccggcacttctcctcctcctttcactgttgcttctgccactcgggctccccgtcttgggtgctccgcctagacttatttgtgattcgcgcgtgctcgaacgttacattctggaggccagggaagcagagaatgtcactatgggttgtgctcaaggatgttcgttttcggagaacatcaccgtgcctgacaccaaggtcaacttttacacctggaagcggatggatgtgggacaacaagccctcgaggtctggcagggacttgcactcctgagcgaagcaattctgaggggacaggcgctcctcgcaaacgcctcgcaaccctccgaaacgccacaacttcatgtggataaggcagtctcgtcccttagaagcctcacctcgcttctgcgggcacttggagctcagaaagaagcaatgtctcttcctgaagaggcttcgcctgcaccgttgagaacttttactgtggataccctttgtaagctgttccggatttactccaacttcctgaggggtaagttgactctttacactggtgaagcatgtcgccggggtgaccgt

SEQ ID NO: 10931 - DNA, 618 bp, synthetic construct
  misc_feature 1..618: note = source = /note="Description of Artificial Sequence: Synthetic coding sequence"
  source 1..618: mol_type = other DNA
atgtgcgagccagcacccccaaagccgactcagtccgcatggcactcctttccggagtgcccggccctcctgctgctcctctcgttgcttcttctgccactgggtctgccggtgctcggtgccccgccgcgcttgatctgtgacagtcgggtgttggaaaggtatatcctggaagctagagaggccgaaaacgtgaccatgggttgtgcacagggatgtagcttctcggagaatatcaccgtgccagacaccaaggtgaacttctacacgtggaagagaatggacgtcggccagcaggccctggaggtgtggcaggggctcgccctgctgagcgaagcgatactcagaggccaggccctgctggcaaatgcatcccagccttcggaaactccacagctgcatgtcgataaagcagtgtcaagcctgcgcagcctgaccagcctgttgcgcgcgctgggagcccaaaaggaagccatgtcgctgccggaggaggcctcacccgcacctttgcggacgttcactgttgacaccctgtgcaaactcttccggatctacagcaacttcctgcggggaaaactgaccctgtacaccggagaggcttgccggcggggggaccgc

SEQ ID NO: 10932 - DNA, 618 bp, synthetic construct
  misc_feature 1..618: note = source = /note="Description of Artificial Sequence: Synthetic coding sequence"
  source 1..618: mol_type = other DNA
atgtgcgaaccggccccaccgaagcctactcagtccgcctggcattcattccccgaatgcccggccctgctgcttcttctgtccttgctgctcctcccgctgggtctgcctgttttgggagcgccaccacggctcatctgcgatagccgcgtgctcgaacgctacattcttgaagccagggaggcggaaaacgtgaccatgggatgtgcacagggctgctccttctcggaaaacatcaccgtgcccgacaccaaggttaacttctacacttggaaaagaatggacgtcggccagcaggcgctggaagtgtggcaaggactggctctcctttcagaggcgatcttgcgcggccaggccctgttggcaaatgccagccagccgtccgaaacgccgcagctgcatgtggacaaagcagtctcctcgctccgctccctcacttcgctcctccgagccctgggagcacagaaggaggcgatgtcgctgcctgaagaggcttcaccggcccccctgcgcaccttcactgttgataccttgtgtaagctgtttcggatctactcaaatttccttcggggaaagctcactctgtacaccggcgaggcctgtcgacgaggagataga

SEQ ID NO: 10933 - DNA, 618 bp, synthetic construct
  misc_feature 1..618: note = source = /note="Description of Artificial Sequence: Synthetic coding sequence"
  source 1..618: mol_type = other DNA
atgtgcgaaccagctcctcctaaacccacacagagtgcttggcattcttttcccgagtgtcccgccttactattacttttatcgctgctcctgctacctctcggactgccagtgctcggggcccccccccggttaatctgtgattctagggttctggaacgttacatactcgaagcgcgagaggccgaaaatgttacaatgggatgtgcacaggggtgttcattctcagagaacatcacggtgcccgacacaaaggtcaacttttacacttggaaacgtatggatgtggggcaacaggctctggaagtctggcaggggctagccctcctatctgaagccatccttcgcggacaggctctgcttgcaaatgcctctcagccatcagagacacctcagcttcacgttgataaagcagtgtcttccctaagatctctgacttctcttcttagggcactgggggcgcagaaagaggcaatgtcactgcccgaagaagcctcccctgcccctcttcgcacattcactgttgatacactatgtaaactatttagaatctattcaaatttcctacgcgggaaactcacactgtatacaggagaagcctgtcggcggggagatagg

SEQ ID NO: 10934 - DNA, 618 bp, synthetic construct
  misc_feature 1..618: note = source = /note="Description of Artificial Sequence: Synthetic coding sequence"
  source 1..618: mol_type = other DNA
atgtgtgagccagcacctccaaagcctacccagtcagcttggcacagcttccccgagtgtcctgccctgttactgctcctgtcactgctgctgctgcctctcggtctaccagtgctgggtgctcccccccgtctcatatgcgactcaagggtcctagaacgatacatactggaagccagagaagctgagaacgtgactatgggatgcgcccagggctgctcattttctgaaaacataaccgttcctgatacaaaagttaacttctacacatggaaaagaatggacgttgggcagcaggccctggaagtctggcagggcctcgcactgctgagcgaggccatactgcggggccaggcattgttagctaatgcatcccagcctagtgagaccccccaactacatgtcgataaggccgtgtcttcactgcgctccctgaccagtctgctgcgcgctctgggagcccagaaggaggccatgagcctgcccgaggaggcatcccccgctcctctgcgaaccttcactgtggacacactgtgcaagctattcaggatctacagcaactttctccgaggcaagctgactctgtatactggcgaggcttgcaggaggggggatagg

SEQ ID NO: 10935 - DNA, 618 bp, synthetic construct
  misc_feature 1..618: note = source = /note="Description of Artificial Sequence: Synthetic coding sequence"
  source 1..618: mol_type = other DNA
atgtgcgaacctgcgccgcctaagccaactcagtcagcgtggcatagcttcccagagtgcccggcactcctcctgctgttgtcactcctgcttcttccattgggcctgccagtgctgggagctccgcctcgcctgatttgcgatagcagggtgctggaacgctatatcctggaagcgcgcgaagcggagaacgtgaccatggggtgcgcacaggggtgcagcttctccgaaaacattacggtgccagataccaaagtcaatttctacacgtggaaacgcatggatgtgggccaacaagctctggaggtgtggcagggactggcactgttgtccgaggccatcctgcggggacaggcactgctggcgaacgcctcacagccatcggaaactccgcagttgcacgtggataaggccgtcagctccttgcggtcacttaccagtcttctccgcgccctgggtgcgcaaaaggaagcaatgagcttgcccgaggaggcgtcccccgccccgctcagaacctttactgtggacaccctctgcaagctctttcggatctattcaaacttcctgcggggcaaactgaccctgtacactggagaggcatgccgcagaggggaccgt

SEQ ID NO: 10936 - DNA, 618 bp, synthetic construct
  misc_feature 1..618: note = source = /note="Description of Artificial Sequence: Synthetic coding sequence"
  source 1..618: mol_type = other DNA
atgtgcgaacccgcgccaccaaaacccacacagtcagcgtggcattccttcccagaatgccccgcattgctcctgctcctgtcacttcttttacttcccttgggcctccctgtcctaggggcccctccccgtctaatctgcgattcgcgcgtgttggagcgatacatcctcgaagcacgtgaggcggagaatgtcacaatgggctgcgctcaaggctgttctttctcagaaaacatcacggtcccggacactaaagtgaatttctatacctggaaacgtatggatgtcggacagcaggctcttgaagtctggcaaggccttgcattactatctgaagctatcctcagaggccaagcgctccttgccaatgcatcgcagcccagcgagacccctcaacttcatgtcgataaggccgttagctctcttcgatcgctgacttcattacttcgcgctctcggcgcccaaaaggaggcgatgagcctccctgaagaagcctccccagctcctttaaggacgttcacagtggatactctgtgtaaactgtttcggatctattcaaatttcctacgtggcaagttgacactgtataccggagaggcatgtagacgaggtgatcgg

SEQ ID NO: 10937 - DNA, 618 bp, synthetic construct
  misc_feature 1..618: note = source = /note="Description of Artificial Sequence: Synthetic coding sequence"
  source 1..618: mol_type = other DNA
atgtgtgagccggcacctcctaaaccaactcaatctgcttggcatagttttcctgagtgtcctgcgctgctgcttcttttatccctgctgctgttacccctcggactgcctgtgctgggtgcacctccgcgattgatttgtgactctagggtgctggagagatacatcctcgaggcacgggaggcagagaatgtgaccatgggatgtgcacaggggtgcagtttctctgagaacattactgtcccagacacgaaggtgaacttctacacctggaagagaatggacgtgggtcagcaggctctcgaggtttggcagggtctggctctcctgtcagaggccatcctccgcggccaggccctgctggccaatgcctcacagccgtcggagaccccccagctacatgtggataaggcagtatcctctctccggagcttgacctcactgctgagggccttgggagctcaaaaggaagctatgagcctcccagaagaggcctctccagcgcctctgcggacgtttaccgtcgacaccctgtgcaagttattccggatttacagcaactttctcaggggcaaactcaccctgtataccggcgaagcctgtaggcggggcgacagg

SEQ ID NO: 10938 - DNA, 618 bp, synthetic construct
  misc_feature 1..618: note = source = /note="Description of Artificial Sequence: Synthetic coding sequence"
  source 1..618: mol_type = other DNA
atgtgcgagccggccccccccaaaccaacacagtccgcctggcacagctttcccgagtgtccggccttgcttctccttctatctctgcttctgcttcccctggggctgccggtgctgggagctcccccacgactcatatgtgactcccgggttctggagagatatatcctggaggctcgcgaagccgagaatgtaaccatgggctgcgcccagggatgctcctttagtgagaacattaccgtccctgacacgaaggtgaatttttatacttggaagcgaatggatgttgggcaacaggctctggaggtttggcagggtctggccctgctatccgaggcgatattgcgtggacaagcactcctcgccaacgcctctcagccatccgagacccctcagcttcatgtggacaaagcagtgtcgtccctgcgcagtctaacaagcctgctcagagcactgggagcccaaaaagaagctatgagtctgccagaagaggccagtcccgcccctctgcgaactttcacagtggacactctgtgtaaactatttaggatctactcgaatttcctacgcggaaagctgacgctatatacaggcgaggcatgtcgccgcggcgaccgc

SEQ ID NO: 10939 - DNA, 618 bp, synthetic construct
  misc_feature 1..618: note = source = /note="Description of Artificial Sequence: Synthetic coding sequence"
  source 1..618: mol_type = other DNA
atgtgtgaaccggcaccaccgaagcctacgcaatcggcttggcacagcttcccagagtgtccggcactcctgctgttgctgtccctgctgctcttgcctctgggcctcccagtgcttggcgctcctccgagactgatctgcgattcgcgcgtcctggaaagatacatcctcgaagcgagggaagcagaaaacgtcaccatgggatgcgctcaggggtgttcatttagcgaaaacatcactgtccctgacaccaaggtgaacttctacacctggaagagaatggacgtcggccaacaggcacttgaggtctggcagggcctcgcccttctcagcgaagctattctgagaggccaagcactgttggccaacgccagccagccatccgagactccacaactccacgtggacaaggcagtgtcctccctgcgcagccttacctccctccttcgagcgttgggggcgcagaaagaggccatgtcactgccagaagaggcctcgccggccccgctccggacctttactgtcgacactctgtgcaagctgttccggatctacagcaacttcctgcggggaaagctcactctgtacaccggagaggcctgccgtaggggcgaccgc

SEQ ID NO: 10940 - DNA, 618 bp, synthetic construct
  misc_feature 1..618: note = source = /note="Description of Artificial Sequence: Synthetic coding sequence"
  source 1..618: mol_type = other DNA
atgtgcgagccggccccacccaagcccacccagagcgcatggcactccttccccgagtgtcccgcgctgctgctgcttttgtcactgctcctgttaccgctgggattgcccgtcctgggtgctccccctagactgatctgtgattctagagtgctagaacggtacatcttggaggcgagagaggccgagaacgtcaccatgggttgtgcgcagggatgctcattttcggaaaatatcaccgtgcctgacactaaggtgaacttttatacttggaagcgaatggacgtaggacagcaagctctcgaggtctggcagggtctagccctcctttccgaggcgatcctccgaggccaggctctcctggctaatgccagccagcccagtgaaaccccacagctacatgtggataaggccgtgtcaagcctgagatctcttacctctctcctgagggcactgggagcacagaaagaggctatgtcactgcccgaggaagctagtcccgctccgctaaggacttttactgttgatactctctgtaaattgttcaggatctattcaaactttctgcgcgggaagctgacgctctataccggcgaagcctgtagacgaggggaccgc

SEQ ID NO: 10941 - DNA, 618 bp, synthetic construct
  misc_feature 1..618: note = source = /note="Description of Artificial Sequence: Synthetic coding sequence"
  source 1..618: mol_type = other DNA
atgtgtgagcctgcaccgcccaagcctactcagtcagcatggcattcctttcccgaatgtccggccctcctcctcctgttgagccttcttctgttgccgcttggtttgccagtgctgggagcaccacctcggctgatttgtgactcgagagtgctggaacgatacatcctcgaagcacgagaggcagagaacgtgacgatgggctgtgcccaaggatgctccttctctgaaaacatcactgtgcccgataccaaggtgaacttctacacctggaagagaatggatgtcggacaacaagcacttgaggtctggcaaggactggcactgcttagcgaagcaattctgagaggacaggccctgcttgcgaatgcgtcacaaccttcggaaacccctcaacttcacgttgataaggccgtgagttcgcttcgctcacttacgtcgctgcttcgagctctgggcgcacaaaaggaagcaatgtcactgccagaagaagcatcacctgcgccactgaggacctttactgtcgatactctttgtaagctgtttagaatctacagcaacttcctccgaggtaagctcactctttacactggggaagcatgtagacgtggagatagg

SEQ ID NO: 10942 - DNA, 618 bp, synthetic construct
  misc_feature 1..618: note = source = /note="Description of Artificial Sequence: Synthetic coding sequence"
  source 1..618: mol_type = other DNA
atgtgtgagcctgcacccccaaagcctacgcaaagtgcttggcattcatttccggaatgtcccgcattgctcctcttactttcattgcttctgttgcctttaggacttcctgtcctaggcgctccaccacgactcatttgcgattcacgtgttctggaacggtacattcttgaggctagagaggcagaaaatgttacgatgggttgcgctcagggatgttcctttagcgagaatatcacggttcctgatactaaagtaaatttttatacctggaaaaggatggacgtgggacaacaggccttggaagtttggcaaggactagccttgctctccgaggccattcttagaggtcaggcacttttggctaacgctagtcaacctagtgagacaccacagctgcacgttgataaggccgtttctagtttgagatcactcacttccctcttgcgagccttgggtgcccagaaggaggccatgtcacttcctgaagaagctagtcctgctccccttcgtacgttcactgttgatacactttgcaagctattcagaatctatagtaacttccttaggggtaaacttactttgtataccggggaggcttgtaggcgaggtgaccga

SEQ ID NO: 10943 - DNA, 618 bp, synthetic construct
  misc_feature 1..618: note = source = /note="Description of Artificial Sequence: Synthetic coding sequence"
  source 1..618: mol_type = other DNA
atgtgcgagcccgctccaccaaagccaacgcagtccgcatggcatagctttcctgagtgtcccgcactgttgctgttgctgtcgttgttgctgctcccattaggcctcccagttctcggtgctcccccacgactgatttgcgatagcagggtgttggagaggtacatcctggaagctcgcgaagctgagaatgtgacaatgggatgtgcccaaggctgcagtttttccgaaaatattactgtaccagacaccaaagtgaacttctacacttggaaacggatggatgtcgggcagcaggcccttgaagtctggcaaggcctcgctctgctcagcgaggctatcctgaggggtcaggcgcttctcgctaatgcctcacagccctcagagacgccccagcttcacgtggacaaggccgtgtcttccctgcggtccctgacttcactgttgcgtgcacttggcgcccagaaagaagcaatgagtctccctgaggaggccagtccagccccactcaggacattcaccgtagacacattgtgtaagctatttaggatatattctaattttctgcgcggaaagttgaccctgtacacaggagaagcctgtagaaggggagatcgt

SEQ ID NO: 10944 - DNA, 618 bp, synthetic construct
  misc_feature 1..618: note = source = /note="Description of Artificial Sequence: Synthetic coding sequence"
  source 1..618: mol_type = other DNA
atgtgcgaaccggcacctcccaagccaactcagagtgcttggcattcatttccagaatgtcctgcgctcctgctgcttcttagcctactgctgttgcctcttggtctgccagtgctgggagcaccaccacgcctcatctgcgactcaagggtgttggaaaggtatatccttgaggcaagagaggccgagaacgttaccatgggatgtgcgcagggctgcagcttttccgagaatataacagtgccggacacaaaagtgaacttttacacctggaaaagaatggatgtcggccagcaagcactggaagtgtggcagggccttgcgctgctttcagaggctattctcagaggccaggcattgcttgcaaatgcttcccagccatctgagactccacagttacacgtcgacaaagccgtatcttcccttcggagcctaacgtctctgctgagggcacttggagcacaaaaagaggcgatgtccttgcctgaagaggcgtctcccgcccccctgcgtacattcaccgtggacacattgtgtaaacttttcaggatctacagcaacttcttacggggaaagctcactctgtatactggagaagcctgccggaggggagaccgc

SEQ ID NO: 10945 - DNA, 618 bp, synthetic construct; identical to SEQ ID NO: 10937
  misc_feature 1..618: note = source = /note="Description of Artificial Sequence: Synthetic coding sequence"
  source 1..618: mol_type = other DNA

SEQ ID NO: 10946 - DNA, 618 bp, synthetic construct
  misc_feature 1..618: note = source = /note="Description of Artificial Sequence: Synthetic coding sequence"
  source 1..618: mol_type = other DNA
atgtgcgaacctgctcctccgaagccaactcagagcgcgtggcactcgtttcctgaatgccccgcgctgcttctgctgctctctctgctgctcctgccgctcggcctgccagtgctgggagccccaccacgcttgatctgcgattcaagagtgctcgagcgctacattctggaagctcgggaagccgagaacgtcactatgggatgtgcacagggatgctccttttcggaaaacatcacggtcccagacaccaaagtgaacttctacacttggaagagaatggacgtggggcagcaggccttggaggtgtggcaaggtctggcactgctcagcgaggctatcctgcggggccaggcgctgctggctaatgcatcgcagccctcagagactccgcagctgcacgtggacaaggctgtctcgtcccttcggtcacttacctccttgctgcgggccttgggagctcagaaggaagcaatgtcgttgccagaggaagcctccccggccccgttgcgcactttcacggtggacaccctgtgcaaactcttccgcatctacagcaacttcctgcggggaaaactgaccctctacaccggtgaggcctgccgacgcggagacaga

SEQ ID NO: 10947 - DNA, 618 bp, synthetic construct
  misc_feature 1..618: note = source = /note="Description of Artificial Sequence: Synthetic coding sequence"
  source 1..618: mol_type = other DNA
atgtgcgagccggccccgcctaagccgacgcaatccgcgtggcactcgttcccggaatgcccagcactcctgctgctcctctcgctgcttctgctgcctctcggccttccagtgctgggcgctccgccaaggctgatctgcgacagcagagtgctggaacggtacatccttgaggcacgcgaagctgaaaatgtcactatggggtgcgcacagggatgttctttctcggagaacatcaccgtgccagatactaaagtgaatttctatacgtggaagcggatggacgtcggacaacaggcgctcgaggtgtggcagggactcgcgctgctgtcggaggctatactccggggtcaagcactgctggcgaacgcctcccaaccaagcgaaactccccagctgcatgtggacaaggccgtgtcatcccttcggagcttgacgtccctgttgagagcgctgggagcccagaaggaagcaatgtccctgccagaagaagcgtcacctgctccgctgcgcacctttaccgtcgatactctgtgtaagttgttccggatctactcaaactttcttagaggcaaattgaccctgtacactggtgaggcttgccgcaggggagacagg

SEQ ID NO: 10948 - DNA, 618 bp, synthetic construct
  misc_feature 1..618: note = source = /note="Description of Artificial Sequence: Synthetic coding sequence"
  source 1..618: mol_type = other DNA
atgtgtgagcctgccccgccaaaacccacccaatccgcttggcactcgtttcctgaatgcccagcactgctgctcctgctctcactgcttctccttcctctgggccttccagtgttgggcgcgccgcctcgcttgatctgcgattcccgagttctcgagagatacattctggaggctagggaggcggaaaacgtgaccatgggatgtgcgcagggatgctcgttcagcgagaatatcaccgtgccggatacgaaggtgaacttctacacttggaaacgcatggacgtcgggcagcaagcgctcgaggtgtggcaaggattggctctcctgtcggaggcgatccttcgcggacaggcactgttggccaacgcaagccagccctccgaaaccccgcaactgcatgtagacaaggcggtgtcctctctcaggtcactgacctccctgttgcgagccttgggagcccaaaaagaggcaatgtcgctgccggaagaggcctcccccgccccgctccgtacctttactgtggacactctctgcaagttgttcagaatctactccaatttcctgagaggcaagctgaccctgtacacgggagaagcctgcaggagaggtgacaga

SEQ ID NO: 10949 - DNA, 618 bp, synthetic construct
  misc_feature 1..618: note = source = /note="Description of Artificial Sequence: Synthetic coding sequence"
  source 1..618: mol_type = other DNA
atgtgtgagcctgcgcctccaaagccaacccaatccgcatggcatagcttccccgaatgcccagcgctccttcttcttctgtcccttctcctccttccacttggactcccagtgctcggcgcaccacccagactcatttgcgactccagagtgcttgagcgctacatccttgaagcgagagaggccgaaaacgtgaccatgggctgtgcgcaaggatgctcgttctctgaaaacatcactgtcccagatacgaaagtcaacttctatacttggaagaggatggatgtgggacaacaggctttggaagtatggcaaggactggccctgctctccgaggcaattctgcgcggccaagcacttctggcaaacgcgtcgcagccttcagaaacccctcagttgcatgtggacaaagcagttagctcgctgcgaagcctgactagcctccttcgcgcactcggagcccaaaaggaagcaatgtcccttcctgaagaagcatcgccagcgcccttgcggacctttactgtggacaccttgtgtaagctgtttaggatttactcgaattttctccgagggaagttgactctgtacaccggtgaggcatgtagacgcggtgatagg

SEQ ID NO: 10950 - DNA, 618 bp, synthetic construct
  misc_feature 1..618: note = source = /note="Description of Artificial Sequence: Synthetic coding sequence"
  source 1..618: mol_type = other DNA
atgtgtgagccagcaccgcccaagccaactcaaagcgcctggcacagcttccccgagtgccccgcgctgctgctgcttctctcactcctgttgctgccgctggggctcccggtgctgggtgcaccgccgcggctgatttgcgattcgcgggtcctcgaacgctacatcctcgaagccagagaggccgaaaacgtcaccatgggatgcgcgcagggctgtagtttcagcgaaaacatcaccgtaccagatactaaggtgaacttctacacctggaagcggatggacgtcggacaacaggctcttgaagtgtggcagggactcgccttgctgtccgaggcgatcctccggggacaggcactgctcgcaaacgcgtctcaaccgtcggaaacccctcaactgcatgtggataaagccgtgtcctcactccgaagcctgacttccctcctccgcgcgctcggagcgcagaaagaggccatgtcactcccggaggaggcatctccggcgccactgagaacgttcactgtcgacactctgtgcaaattgttccggatctactcaaatttcctgaggggtaaactgacgctgtacaccggtgaggcgtgccggcgcggtgatcgc

SEQ ID NO: 10951 - DNA, 618 bp, synthetic construct
  misc_feature 1..618: note = source = /note="Description of Artificial Sequence: Synthetic coding sequence"
  source 1..618: mol_type = other DNA
atgtgcgagccagccccccctaaacctacgcagagtgcctggcacagttttcctgagtgtcccgcactcctgctgctgctgagtcttctactgctaccgctgggcctgccggtcttgggagcccccccccgtttgatttgtgattcccgagtgctggagcggtacatcttagaggcccgtgaagctgagaacgtgacaatgggctgtgcccaggggtgctcgttcagtgaaaacattaccgtgcccgatacaaaagtgaacttttacacttggaagcgcatggatgtcggtcagcaagcactggaagtgtggcagggtctagctctgttgtcggaagccatactgcgaggacaagcattgctcgctaacgccagtcagccctcagagacgccgcagttgcatgtcgataaagctgtgagttcgctgcgctctcttacctccctgctcagggctctgggagcccaaaaagaagctatgagtctgccggaggaggcatcaccggcgcctctgagaacgtttacagtagatacattatgtaaactgtttaggatctattcaaatttcctccggggcaagctgactctgtacacaggcgaggcatgtcgcaggggagaccgt

SEQ ID NO: 10952 - DNA, 618 bp, synthetic construct
  misc_feature 1..618: note = source = /note="Description of Artificial Sequence: Synthetic coding sequence"
  source 1..618: mol_type = other DNA
atgtgcgaacccgcaccccccaagcctacccagtctgcctggcattcctttccagaatgcccggccctgctactgctcctgagtctcctgctgctgcccctcggtttaccggtattgggggctcctcctcggcttatttgtgacagtcgcgtcctcgaacgctatatcttggaggctagagaagcagagaacgtgacaatggggtgcgctcagggctgcagtttttccgaaaatattactgtacctgacactaaagtgaacttttacacgtggaaacgcatggacgtgggacagcaggccctggaggtgtggcaaggattggcattgctcagcgaagccattctgagaggccaagcccttctggccaatgcctcccagccgtccgaaacaccccagctccatgtggataaggctgtgagttctctgagatctttgacatcgctgttgcgggccctcggcgctcaaaaggaggccatgagtctccccgaggaagccagccctgccccactgagaacctttactgttgatacactgtgcaagctgttccgtatctacagcaactttctacggggtaaactgacactctatacgggcgaggcgtgtaggagaggggacaga

SEQ ID NO: 10953 - DNA, 618 bp, synthetic construct
  misc_feature 1..618: note = source = /note="Description of Artificial Sequence: Synthetic coding sequence"
  source 1..618: mol_type = other DNA
atgtgtgaacctgcgccacctaagccaacccaatctgcatggcacagctttcccgaatgccctgccctgctcctgctcctcagcctgctgttgctgccattgggactccccgtccttggtgccccgccacggctcatttgcgactcaagggtacttgaacgatacattctcgaagcgcgcgaagctgaaaatgtcaccatggggtgtgcgcaaggctgttcattctcggagaacataactgtcccggatacgaaggtgaacttctacacttggaagcgaatggacgttggtcaacaagcgttggaagtgtggcagggtcttgccctgctgtccgaagcaatccttcgcggccaagcactcctggcgaacgcaagtcagccatccgagactccccaacttcacgtggacaaggcagtgagctcgctgaggtcccttactagcctgcttagagcactcggggcacagaaagaggccatgtcgctcccagaggaagcctccccagccccacttcgcacgttcaccgtggataccctctgtaaactctttagaatctatagcaatttcctgcggggaaaactcaccctgtacactggtgaggcctgtagaaggggagatcgt

SEQ ID NO: 10954 - DNA, 618 bp, synthetic construct
  misc_feature 1..618: note = source = /note="Description of Artificial Sequence: Synthetic coding sequence"
  source 1..618: mol_type = other DNA
atgtgtgaacccgcaccgccgaagccaacgcaatccgcatggcactctttccctgagtgcccggctttgctgctgctgctgtccctcctgctcctgccgctgggactgccagtgctcggagctcctccgcgccttatctgcgactcacgagtgttggagcgctacatcctggaagcgagggaagccgagaatgtcactatggggtgtgctcaaggatgctccttctcggagaatatcaccgtgccggatactaaagtcaacttctacacttggaagagaatggatgtgggacaacaagcgttggaagtctggcaaggactggcgcttttgtccgaggccatcctccgcggccaggcgctcctggccaatgcgtcgcagccatccgaaacccctcagcttcacgtggataaggccgtgagctccctccggtcgctcacctcgctgttgcgcgctctgggcgctcagaaggaagccatgtccctgcctgaggaagcctctccagctccactccgtactttcactgtggacactctgtgtaagctcttccggatctacagcaacttcctgcgcggaaagctgacgctgtacactggcgaagcatgtagacgcggcgaccgc

SEQ ID NO: 10955 - DNA, 618 bp, synthetic construct
  misc_feature 1..618: note = source = /note="Description of Artificial Sequence: Synthetic coding sequence"
  source 1..618: mol_type = other DNA
atgtgcgagcctgccccgcccaagcccacacagtcggcctggcattcgttcccagaatgtcctgccttgctgctgctcctctccctgctgctactaccgctgggattgccagtccttggagcacctccgcgccttatttgtgattcccgggtcttagagcggtacatcctggaggcccgggaggctgaaaacgtaactatggggtgcgcacagggctgttcattcagtgagaacatcactgttcccgatacaaaagtgaatttctacacttggaaacgtatggacgttggtcagcaggccctggaggtgtggcaaggcctcgccctgctctccgaggcgatactgcgaggtcaggcactgctggcaaatgcctcccagccctcagagacgcctcagttgcatgtggacaaggccgtatctagtctgagatcgctgacatccctcttaagagctctaggagcccagaaagaggcaatgtccctccctgaggaagccagcccggccccattgcgaaccttcactgtggacacactgtgcaagctatttcggatttattcgaacttcttgcgtggaaaattgacactatacacgggagaggcctgccgacgaggagacagg

SEQ ID NO: 10956 - DNA, 618 bp, synthetic construct
  misc_feature 1..618: note = source = /note="Description of Artificial Sequence: Synthetic coding sequence"
  source 1..618: mol_type = other DNA
atgtgcgaaccagcaccgccaaagccaactcaatctgcctggcattccttcccagaatgcccggctctgctcctattgctttcactcctcttgctgccgttgggccttccagttttgggagctcctccacgactaatttgtgattccagagtcttagaacggtacatccttgaagcaagagaggcagagaacgtcacaatgggatgcgcacaaggttgttccttctcggaaaacattaccgtcccggatacaaaggtcaacttttacacctggaaaaggatggacgttgggcagcaggcactcgaagtgtggcagggactcgctttgctcagtgaagctatcttgcgaggacaggctcttctggctaatgcgagccaaccatcggagacgccacaactccatgtagataaagccgtttcatcgcttagaagtttgactagtctgttacgcgctttgggtgcccaaaaagaagccatgtcgcttcctgaagaggcgtcaccagcaccattgaggacctttacagtggacacgctttgtaaattgttccgtatttattccaattttttgcgaggaaaacttacattgtacacaggtgaagcatgtcgtagaggagatcgt

SEQ ID NO: 10957 - DNA, 618 bp, synthetic construct
  misc_feature 1..618: note = source = /note="Description of Artificial Sequence: Synthetic coding sequence"
  source 1..618: mol_type = other DNA
atgtgcgagcccgctcctccgaagccgacgcaaagcgcttggcacagctttcctgaatgccccgcacttttattgctgctgtcacttcttcttctcccgcttgggttacctgtacttggggctcctccgagacttatatgtgatagccgcgttctggaaagatatatcctggaagccagagaagccgaaaacgtgaccatgggctgtgcccaaggttgcagtttcagtgaaaacataacagtcccggatactaaggttaatttctatacttggaaacgcatggacgttggacagcaggcgctggaagtttggcagggtctcgctcttctgagcgaagccattcttcggggtcaggcattgcttgcgaatgcttcacagcctagtgagacgccacagttgcatgtcgataaagcagtttcctcactgagatcccttacttctctgcttagagctttaggtgcacaaaaggaagcgatgagtctgccggaagaggcaagccctgcgccgttacgcacctttacggttgataccctttgtaaactgtttcgtatttactctaattttttaagaggcaaacttacactttacaccggagaagcgtgtcgacgaggggatcgt

SEQ ID NO: 10958 - DNA, 618 bp, synthetic construct
  misc_feature 1..618: note = source = /note="Description of Artificial Sequence: Synthetic coding sequence"
  source 1..618: mol_type = other DNA
atgtgcgagccggcacctccaaagcccacgcagagtgcttggcactctttccccgaatgccctgctctgcttctcttattaagtttgcttctcctacctctgggacttcccgtattgggagcccctccacgtttgatatgtgattctagggtgttagaacgctacatactcgaagcgcgggaagccgagaacgtgactatggggtgcgcccaggggtgttctttttccgaaaacataacagtccccgatactaaggtaaacttttatacttggaaaaggatggacgtggggcaacaggccctcgaagtctggcaggggctcgctcttctgtccgaagccatactaagagggcaggcacttcttgctaatgccagtcagccatcagaaactccccagctccatgttgacaaagccgtgtctagtcttcggagtctgacttctcttctgcgggctctcggagcccagaaagaggctatgtcactccctgaagaagctagtcccgcacctttgcgcacatttacagttgatacattgtgtaaattatttagaatatattctaactttctaagaggaaaattgactctctacacaggggaggcctgcagaaggggagatagg

SEQ ID NO: 10959 - DNA, 618 bp, synthetic construct
  misc_feature 1..618: note = source = /note="Description of Artificial Sequence: Synthetic coding sequence"
  source 1..618: mol_type = other DNA
atgtgcgagcccgccccgccgaagccaacgcagtcggcctggcactcctttcccgaatgccctgccctgctgctcctgctgtccctgctcctcctgccgctgggactgcctgtgctcggagccccgccgcgtttgatctgcgattcacgcgttctggagaggtacattcttgaagcccgagaagcggagaacgtgaccatgggatgtgcccaaggatgttccttctcggagaatatcaccgtgccggacactaaagtcaacttctatacttggaagcgcatggatgtgggtcaacaggcacttgaagtgtggcaagggctggccctgctgtccgaagccatcttgcgcgggcaggcgctgctcgctaacgcgtcccagccgagcgagactcctcagttgcatgtggataaggcggtgtcctcgctgcgcagcctgacctctctgctgcgggcactcggagctcaaaaagaggctatgtcgctgccagaagaagcctctccagcgcccctccgcacgttcactgtggatactctgtgcaagctgttccggatttactctaatttccttcgcggaaagctgactctgtacaccggcgaagcatgtagacggggggatagg

SEQ ID NO: 10960 - DNA, 618 bp, synthetic construct
  misc_feature 1..618: note = source = /note="Description of Artificial Sequence: Synthetic coding sequence"
  source 1..618: mol_type = other DNA
atgtgtgaaccggcacctccaaagcccacccagtcagcctggcactcatttcctgagtgtccagccctcctcctgttgttgtctctgctcctcctccccctcggtttgcctgtgctgggagctcctcccagacttatctgtgattcccgcgtgttggaacggtacattttggaagcaagggaggcggaaaatgtgaccatgggctgcgcacaagggtgctcgttcagcgagaacataaccgtgccggacactaaggtcaacttttacacctggaaacggatggatgtcggacagcaagcactggaagtgtggcaaggattggcgcttctgtccgaggccattctcagaggtcaagctctgttggcaaacgcaagccagccaagcgaaactccacaactgcacgtggacaaggcagtttcgtcactccgatcgcttacgagcctccttagagcactcggagcccagaaggaagccatgtcgcttcccgaagaagcatctcctgccccgcttcggactttcactgtcgatacgctttgtaaactgtttcggatctactcgaattttctccgcggaaagctgacgctttacacgggagaagcatgtcggcgaggggatcga

SEQ ID NO: 10961 - DNA, 618 bp, synthetic construct
  misc_feature 1..618: note = source = /note="Description of Artificial Sequence: Synthetic coding sequence"
  source 1..618: mol_type = other DNA
atgtgtgagccagcgccaccaaaacccacacagtctgcttggcacagtttccctgaatgccccgctctgctactgctcctttcactcctgctgctcccattagggctgccagttctgggggctcccccgagactcatctgcgactcacgcgttctcgagagatacattctcgaggccagagaagccgagaatgtgactatggggtgtgctcagggatgctctttcagtgaaaacatcaccgtgcccgatacgaaggtgaatttctatacctggaagcggatggatgttggacagcaggctctcgaagtctggcaaggcctggccctcctgtcagaagcaattctgagaggccaagcattgctggccaacgccagtcagccttctgaaacaccccagttgcacgtggacaaagcggtgtcatcccttagatctctcacaagcctgcttagggctcttggtgctcagaaagaggcgatgagcctccctgaggaggcttcccctgcgcctctacggactttcacagtcgatacattgtgtaaattgttcaggatctatagcaatttcctaaggggcaaattgaccctgtatacaggagaagcatgtagacggggagatagg

SEQ ID NO: 10962 - DNA, 618 bp, synthetic construct
  misc_feature 1..618: note = source = /note="Description of Artificial Sequence: Synthetic coding sequence"
  source 1..618: mol_type = other DNA
atgtgcgaacctgcccccccaaagcctactcagtctgcttggcactcttttccggagtgcccagcattgctactgctgctgagcttacttctgttgccgttgggactgcctgtacttggagcaccaccccggttgatttgtgacagtcgggtgctcgaacgatatatcctggaggcccgcgaggccgaaaacgtgacaatgggatgtgcacaagggtgttcgttttctgagaatataaccgtgcctgacactaaggtgaacttttatacgtggaaaaggatggatgtgggacagcaggctctcgaagtttggcagggcttggccttgctgtccgaggcaatcctgagaggccaggctttactggccaatgccagccaaccaagcgaaacccctcagctgcacgtggataaagccgtctcctcactgcgttctttgacatctttgttgagagctctaggggcccagaaagaagccatgtccctcccagaggaagcctccccagctccattgcggactttcaccgtggacactctctgtaaactgtttcggatttactccaatttccttcggggcaaattaacgctgtataccggtgaggcttgccggcggggagacaga

SEQ ID NO: 10963 - DNA, 618 bp, synthetic construct
  misc_feature 1..618: note = source = /note="Description of Artificial Sequence: Synthetic coding sequence"
  source 1..618: mol_type = other DNA
atgtgcgagccagccccgccgaagccgacgcaatcggcctggcattcattcccggaatgcccggccctgctgttgttgctgtccctgctcctgctcccactgggattgcctgtcctcggagctccgccgcgcctgatctgcgattcgagagtgctggaacggtacatcctggaagccagggaggccgaaaacgtcactatgggatgtgcacaagggtgctcattctctgagaatatcacggtgcctgatactaaggtgaacttctacacctggaagcgcatggacgtggggcagcaggctctcgaagtgtggcagggacttgcacttctgagcgaggcaattctccgcggacaggccctcctggccaacgcttcgcaaccatcggaaactccacagctccatgtcgataaggccgtttcatcgctgcggtcccttaccagcctgttgcgcgccttgggagcgcagaaggaagcaatgtctctcccggaggaagcgtccccagcccccctgcgcacttttacggtggacaccctgtgcaagctctttcgcatctactcaaactttctcaggggtaaattgaccctctacactggagaagcgtgtcggaggggagataga

SEQ ID NO: 10964 - DNA, 618 bp, synthetic construct
  misc_feature 1..618: note = source = /note="Description of Artificial Sequence: Synthetic coding sequence"
  source 1..618: mol_type = other DNA
atgtgcgaaccagccccgcccaagccgacccagtcggcatggcattcattcccggagtgcccggccctgctcctgttgctgtcgctgctcctcctcccacttggtctgccagtcttgggcgcgccacctcgccttatttgtgactcaagagtgctcgaacgctacatcctggaagcccgggaagccgagaatgtgactatgggatgcgcgcaaggatgcagctttagcgaaaacatcaccgtgcctgataccaaagtgaacttctacacttggaagaggatggacgtcggacaacaggccctggaagtttggcagggcctggcgctgctgtcggaggcaatccttcggggacaagctctgctcgcaaatgcttcccagccctccgagactccgcagttgcacgtggacaaggccgtctcatcccttcgctctctcacttcgctgttgcgggccctcggagcacagaaagaggctatgtccctcccggaagaggcgagcccggcgcctctgagaaccttcactgtggatacgctgtgcaagctgtttcgaatctacagcaacttcctcagagggaagctgaccctgtacaccggcgaagcctgtcgccggggggaccgc

SEQ ID NO: 10965 - DNA, 576 bp, synthetic construct
  misc_feature 1..576: note = source = /note="Description of Artificial Sequence: Synthetic coding sequence"
  source 1..576: mol_type = other DNA
atgggctcctgtgaatgtcctgcacttctgcttcttctgtcccttctcctcctgccactgggcttgcctgtgctgggggcacccccaagactgatctgtgattccagagtgcttgaacgctatattcttggagcgcgagaggccgaaaatgtgaccatgggatgtgcagaaggatgctcgttttccgaaaacatcaccgtgccggacactaaagtgaacttctacacgtggaagagaatggacgtgggacagcaggccgtcgaagtgtggcaaggactggcccttctttccgaagccattcttcgggggcaggcgctgctggcaaattcctcgcaaccctcggaaacccttcaactgcatgtggataaggcagtgtcctcccttagatcactgacctccttgcttcgagcactcggtgcacagaaagaagcaacttcgctgcccgaagccaccagcgccgcacctttgcgcaccttcactgtggatactctctgtaagctgttcagaatctactcgaacttccttcgcggtaagctgactctgtacactggagaggcttgccgtaggggggatcgg

SEQ ID NO: 10966 - DNA, 576 bp, synthetic construct
  misc_feature 1..576: note = source = /note="Description of Artificial Sequence: Synthetic coding sequence"
  source 1..576: mol_type = other DNA
atggggagctgtgaatgcccggctctccttcttctcctgtcgttgctccttctgccgctaggtctcccagttctgggagcacccccccggttaatctgcgatagcagagtccttgagcggtatattctgggagccagagaggccgagaacgtaaccatggggtgcgctgagggatgtagcttctcagagaacattactgtgcctgacaccaaggtaaacttttatacatggaagagaatggatgttggccagcaggctgtggaggtatggcagggcctcgccctactgtctgaggcaatacttcgcgggcaagcgctcctggccaacagcagtcagccttccgagaccctgcagctccatgtagacaaagccgtgagctccttacgctccctaacaagtctgcttagagcacttggagcccagaaggaggccacttctctcccagaggcgaccagtgccgctcccttgaggacttttaccgttgacaccctttgtaaactattccggatatacagtaacttcttgaggggtaaattaacgttgtataccggcgaggcttgcaggaggggggataga

SEQ ID NO: 10967 - DNA, 576 bp, synthetic construct
  misc_feature 1..576: note = source = /note="Description of Artificial Sequence: Synthetic coding sequence"
  source 1..576: mol_type = other DNA
atgggctcttgtgaatgtccagcactcctactcttgctaagcttgctgctcctacccttagggctccccgttttgggcgcccctcccagactcatatgtgattctagagttcttgagcggtacatactgggcgcacgcgaggccgaaaacgtcacaatgggatgtgctgagggttgttccttctcggaaaatataacggttccggacaccaaggttaatttttatacttggaagcgaatggacgtgggtcagcaggcggttgaagtctggcaaggactcgccctgcttagcgaggcgatcctgcgaggccaggcccttttggccaactcatcacaaccatcggaaaccttgcaattgcatgttgataaggcagtatcttccctccgatcattgacatccctactacgggcattgggcgctcaaaaagaagcgactagcctcccggaagccacctccgcggcgccgttgcgtactttcacggtcgatacactgtgcaaactgttcaggatctactccaactttttgcgagggaaactgaccctttatactggtgaagcttgccggaggggtgaccgt

SEQ ID NO: 10968 - DNA, 576 bp, synthetic construct
  misc_feature 1..576: note = source = /note="Description of Artificial Sequence: Synthetic coding sequence"
  source 1..576: mol_type = other DNA
atgggctcatgcgaatgtcccgcactgttgctgttactcagtttgctgctccttccgctgggactacctgtgctgggtgctcctccgcgcctgatatgtgatagccgcgtgctggaacgctatatcctgggggccagggaggccgagaatgtgaccatgggatgtgcagaaggttgctcgttctccgagaacattaccgtgccagacaccaaagtaaacttctacacatggaaaaggatggacgtcggacaacaggccgtcgaggtttggcagggcttggcgttgctaagtgaagctatcttgcgcggtcaggcgctgctggctaacagttcccagccttcggaaactctccagctccacgtagataaagccgtttctagcctgagaagtcttacctcgctccttagggcacttggtgcacagaaggaagccacatcccttccagaggcaactagtgcagccccactcagaacattcaccgtggatactctgtgcaagttgtttcgcatctactctaatttcctgagaggcaagctaacactgtacactggagaggcctgcaggcgtggggataga

SEQ ID NO: 10969 - DNA, 576 bp, synthetic construct
  misc_feature 1..576: note = source = /note="Description of Artificial Sequence: Synthetic coding sequence"
  source 1..576: mol_type = other DNA
atgggatcgtgcgaatgcccggccctgctcctgctcctgtcactcctgctgctcccactcggactgccagtcctcggcgcgccgccgaggctgatctgtgactcgagagtcctcgaacggtatatcctgggggcgagggaggcggagaacgtgactatggggtgcgctgaggggtgctccttctccgagaacattactgtcccggacaccaaggtgaatttctatacctggaagcggatggatgtcggccagcaggctgttgaagtttggcagggattggcactgttgagcgaggccatccttcggggccaggccctgctcgctaattcctcacagccgagcgaaactttgcaactccacgtcgataaggccgtctccagcctgaggtcactcacttcgctgctgcgcgcgctgggggcgcaaaaggaggcgactagcctcccggaagctacgtccgccgccccactgcggacttttaccgtggacaccctgtgcaagctcttcagaatctacagcaatttcctgcgaggaaaactgaccctctacactggagaagcctgcagacgcggtgaccgc

SEQ ID NO: 10970 - DNA, 576 bp, synthetic construct
  misc_feature 1..576: note = source = /note="Description of Artificial Sequence: Synthetic coding sequence"
  source 1..576: mol_type = other DNA
atggggagttgcgaatgtcctgcactgcttctgctcctttccctgctcctcctgccactggggcttcccgtactaggagcccccccaaggctaatctgtgattcaagggtcctggagcgatatatactaggagcccgggaggctgagaatgtgacaatgggatgcgccgaggggtgcagtttctctgagaatatcacagtacccgatacaaaagttaatttttatacatggaaacggatggatgtgggacagcaggcagtggaggtttggcaaggactggccctgctcagtgaagctattctaagggggcaggcactgctggccaattcttcacaaccaagtgaaactctccagctgcacgtcgataaagctgtatcttccctccggtcattgacttctctgctcagggccctcggggctcaaaaagaggccacatctctgcccgaagctacttccgctgcccctctcaggacatttactgtcgatacactctgcaaactgtttagaatctattcgaacttcctgcgtggaaaactcacactttatactggagaagcttgtcggcggggggatcgc

SEQ ID NO: 10971 - DNA, 576 bp, synthetic construct
  misc_feature 1..576: note = source = /note="Description of Artificial Sequence: Synthetic coding sequence"
  source 1..576: mol_type = other DNA
atggggagctgtgagtgccccgccctcttgcttctgctgtctcttctcctcctgcccctgggtctgccggtgctgggcgcccccccgcggctgatctgtgactccagagtgctcgaaagatacattttgggtgccagggaagccgaaaacgtgactatggggtgtgcggaagggtgcagcttctcagagaatattaccgtgccagacacaaaagtcaatttttatacctggaaacggatggacgtcggacagcaggccgtggaggtgtggcaaggactcgcccttctctctgaagctattctccgaggccaggcactgctcgcaaattcctcccagccatccgaaaccttgcagctccacgttgataaagcggtgtcatccttgaggtcactgacctcactgcttcgcgctctcggagctcagaaggaagccacaagcctgcctgaagcaacctccgccgctccactgagaacttttaccgtggacaccctgtgtaaattgtttaggatttactctaattttctgaggggaaaactgacactgtatacaggagaggcctgcaggcggggtgatcgg

SEQ ID NO: 10972 - DNA, 576 bp, synthetic construct
  misc_feature 1..576: note = source = /note="Description of Artificial Sequence: Synthetic coding sequence"
  source 1..576: mol_type = other DNA
atgggtagctgcgaatgtccagcattgctcttgttgttgtctttgttgttgctgccactcggactaccagttttgggcgcacctcctagacttatctgtgattctagagtcttggaaagatacatattgggtgccagagaggccgagaacgtcaccatggggtgcgccgaaggatgctctttttctgagaatatcacagttcctgacaccaaggtcaatttctacacgtggaagaggatggacgttggacagcaagccgttgaagtatggcaaggtcttgcactcctcagtgaggcgatcttgcggggccaggcactactcgccaattcttcgcagccgagcgaaactttgcagctacatgttgacaaggctgtctcttcactcagatcgttgacttccctgttgagagcccttggagctcagaaggaagctacctcactaccggaagccacctcagctgctccactacgaaccttcaccgtagatactctctgtaaattgttcaggatttattccaacttcctcagagggaaactcacactatacactggtgaggcctgcaggcgtggagatcgt

SEQ ID NO: 10973 - DNA, 576 bp, synthetic construct
  misc_feature 1..576: note = source = /note="Description of Artificial Sequence: Synthetic coding sequence"
  source 1..576: mol_type = other DNA
atgggcagctgcgaatgccctgcgctgcttcttctactgagcctgctccttttacctttggggctgcctgtactcggcgccccgccgaggctcatctgcgattcaagagtgctcgagaggtatatactgggggccagagaggccgaaaatgtaacgatgggctgtgccgaaggatgcagcttctcagaaaacattacagtgccagatactaaagtgaacttctatacctggaagagaatggatgttggacagcaggctgtcgaagtctggcagggattggctctcttatctgaagccatcctgcgcgggcaggccttgctggcgaatagctcccagccaagtgaaacattacagctgcatgttgacaaggctgtgtcatctctgcgcagtctcacaagcctgttacgtgcccttggagctcaaaaagaggcaactagcctacccgaggcaactagtgctgcaccattgcgcactttcactgtggatacactgtgcaaactgttccgtatttactctaacttccttcgcgggaagttaacactgtataccggcgaggcgtgtcggcggggagatcgg

SEQ ID NO: 10974 - DNA, 576 bp, synthetic construct
  misc_feature 1..576: note = source = /note="Description of Artificial Sequence: Synthetic coding sequence"
  source 1..576: mol_type = other DNA
atgggtagctgcgaatgcccagccctgcttctactgctctcgcttctgctgcttcccctgggactcccagtgttgggcgcacccccacgtcttatctgtgatagcagagtgctggaaagatacattctcggtgcgagggaagccgagaacgtgaccatgggatgcgctgagggctgcagtttcagtgaaaacatcaccgtcccagacacaaaagtcaacttctacacttggaaacgcatggatgtgggccagcaggcagttgaggtgtggcaagggctggccctgctgagcgaggcaatccttagggggcaggcactgttggcaaacagctctcagcccagtgaaacactacaattacatgtggacaaagcagtgtcatcactgcgctctctgactagcctccttagggcattgggtgctcaaaaagaagctacctcactgcctgaggcaacgtcagcggcaccgttgcgcacctttacagtggacacactgtgcaaactcttccgcatctattcaaactttcttaggggcaagttgacactttacacaggagaagcatgccgcagaggagacaga

SEQ ID NO: 10975 - DNA, 576 bp, synthetic construct
  misc_feature 1..576: note = source = /note="Description of Artificial Sequence: Synthetic coding sequence"
  source 1..576: mol_type = other DNA
atgggatcctgcgaatgcccagcgctgcttttgttattaagtcttcttctgctcccactcgggctcccagtgttaggagcccccccaagattaatctgtgattcacgcgttctggaaagatatattcttggggcgagagaagccgagaacgtgacaatggggtgtgctgaagggtgctctttttccgaaaatatcactgttcccgacacaaaagtcaatttttatacttggaaaaggatggatgtcgggcagcaggctgtcgaagtttggcaaggactagccctgttatcagaggctatcctacgaggacaggcactgctagcaaactcttcccagccctcagaaactcttcagctccatgtagataaagcagtgtcctctctccgaagtctaacgtctttactgcgagcccttggggcacagaaggaagctacttcgctcccagaagccacatccgcagctcccctcagaacatttacagtcgacacattgtgcaaactttttagaatttactccaatttcctccggggaaaactaactctatacactggagaagcgtgtagaaggggggataga

SEQ ID NO: 10976 - DNA, 576 bp, synthetic construct
  misc_feature 1..576: note = source = /note="Description of Artificial Sequence: Synthetic coding sequence"
  source 1..576: mol_type = other DNA
atgggctcgtgcgaatgccccgctctgctactgttactttctctgcttcttttacctctgggattacccgtgctgggcgctcccccgaggttgatctgtgattccagggtacttgagcggtatatcttgggagcgagagaagccgagaatgttaccatgggatgcgccgaggggtgttccttcagtgaaaacatcacagttcctgacaccaaagtgaatttctatacttggaaaagaatggacgtggggcaacaggccgtggaagtgtggcaaggtctggctctgctctcagaggcgatcctgcggggtcaggccctcctggctaatagttcccagccaagcgaaacattacagctacacgtggacaaggccgtttcctctttgaggagtctgacatcgctgctccgcgccctcggggcccagaaggaagccacatcattgcctgaagctacctcagccgctccccttcgtacgttcactgtggacacactgtgtaaactgttcaggatttatagtaattttttgcgtggaaaactgacgctttatactggcgaggcctgccggaggggggaccgg

SEQ ID NO: 10977 - DNA, 576 bp, synthetic construct
  misc_feature 1..576: note = source = /note="Description of Artificial Sequence: Synthetic coding sequence"
  source 1..576: mol_type = other DNA
atggggtcttgtgagtgtccagctctgctgctcttactgagcttgctgctcctgccattgggactgccagtgctgggcgctcctccccggctgatttgcgattctcgggtcctggagaggtacatactgggggcaagggaagccgagaatgttacaatgggttgtgcagaggggtgctcctttagcgagaatattacagtgccagacactaaagttaacttctacacctggaagcgtatggatgttggccagcaggctgtggaggtctggcaaggcctagctctgctgtcagaggccatactaagaggacaggctctcttagctaacagtagccagccatctgaaaccctacagctacacgttgacaaggccgtgtctagccttaggtctctgacatctctcctgcgcgctttgggggcccagaaagaggccacaagcctgcctgaagccacctcagccgccccactgcgaacatttaccgttgatactttgtgtaagctgttccgcatctatagcaattttttgaggggaaagctgaccctgtacacaggcgaggcttgcaggaggggcgatcgg

SEQ ID NO: 10978 - DNA, 576 bp, synthetic construct
  misc_feature 1..576: note = source = /note="Description of Artificial Sequence: Synthetic coding sequence"
  source 1..576: mol_type = other DNA
atgggcagctgcgaatgcccggccttattattactattaagcctattactcctgcccttgggtttaccagtattgggcgcacccccgcgcctgatttgcgattcccgcgttctcgaacgctacatcctgggagcgagagaggccgagaacgtgacaatgggctgtgcagaaggctgttccttctccgaaaacataacggttccagatacaaaagtaaacttttacacgtggaaaaggatggatgtggggcagcaagcggttgaagtctggcaaggtcttgcacttctctccgaagcgatccttcgtggccaggcgctgctggcaaactcgtctcagccatccgaaaccttacaattgcatgtcgataaagcggttagcagccttagaagcttaacaagcttacttcgagcgctgggtgcacaaaaagaagcgacgtcgttaccggaagctacgtccgcggcaccgcttcggacattcactgtagatacactgtgcaaattgtttcggatctatagtaactttttacgaggaaagttaacattgtatacaggcgaagcgtgtagaagaggggatagg

SEQ ID NO: 10979 - DNA, 576 bp, synthetic construct
  misc_feature 1..576: note = source = /note="Description of Artificial Sequence: Synthetic coding sequence"
  source 1..576: mol_type = other DNA
atgggaagctgtgagtgtccagccctgttgctgctattgtcactgctgttgctccccctgggccttcccgtgcttggggccccgccccgcctcatttgcgactctcgggtgctcgaaagatacattctaggagcaagggaggccgaaaacgtgaccatgggctgcgctgaaggttgttcattctccgagaacataactgtccccgatacaaaagtgaacttctatacctggaagcgcatggacgtgggccagcaggcagtggaggtgtggcaagggctagcccttctgagcgaagctattctccgcgggcaggctctgctcgcgaatagcagccagccctcagagaccctccagttgcatgtggataaggctgtaagcagtctcaggtcgctcacgtccttgctacgagctctgggggcgcaaaaagaggccacttctctcccggaggctacatctgccgcgccacttcgtacatttacggtggacaccctgtgcaaactgttccggatttactccaactttctgcgcggcaaattgactctatacaccggggaagcatgtaggagaggcgaccga

SEQ ID NO: 10980 - DNA, 576 bp, synthetic construct
  misc_feature 1..576: note = source = /note="Description of Artificial Sequence: Synthetic coding sequence"
  source 1..576: mol_type = other DNA
atggggtcatgtgagtgcccagcccttctgcttctgctgtcgctcctgcttcttcctctgggactgcccgttctcggagctcctcccagacttatatgtgattccagagtgctggaacggtacattcttggagcccgcgaagcagaaaacgtcacgatgggatgtgcagaaggatgttccttctcagagaacattaccgtgcccgacactaaagtgaatttctacacctggaagagaatggatgtaggacagcaggcagtggaggtgtggcagggtctggcactcctttcagaggccattctgcgaggacaagcactcctggctaatagcagccagccttccgaaacgctccaactgcatgtggataaggccgtctcatcgcttcgttcactgacttccctgctccgggcacttggagctcaaaaggaggcgacttcactgcctgaagccacttccgctgcaccactccggacctttactgtcgataccctctgtaaactctttagaatctactccaactttctccgcggtaagctcaccctgtatacgggtgaggcatgcagaaggggcgatcgt

SEQ ID NO: 10981 - DNA, 576 bp, synthetic construct
  misc_feature 1..576: note = source = /note="Description of Artificial Sequence: Synthetic coding sequence"
  source 1..576: mol_type = other DNA
atgggatcatgcgagtgtcctgcacttcttctccttctctcccttctcttgcttcctctcgggctgcctgtgcttggtgcacctccacggcttatatgtgacagcagggtgctggaacgttatatccttggcgccagagaagccgagaatgttaccatgggatgtgccgaaggctgctcattttcagagaatatcaccgttccagacactaaagtgaacttctatacttggaagcggatggatgtgggccagcaggcagtggaagtgtggcaaggactggcgcttctgagcgaggcaattttgaggggccaggcactgctcgctaacagttctcaaccaagcgaaactcttcaacttcatgtggataaagccgtaagctcgctgcgctccctgacttcgctgctgcgcgcactcggagcgcagaaagaagcaacctcgctcccggaagcgacctcggctgcaccccttagaacttttacggtggacaccttgtgcaaactgttcagaatctactccaactttttgcggggcaagctcacgctgtacactggcgaggcttgtagacgcggagatcgg

SEQ ID NO: 10982 - DNA, 576 bp, synthetic construct
  misc_feature 1..576: note = source = /note="Description of Artificial Sequence: Synthetic coding sequence"
  source 1..576: mol_type = other DNA
atgggatcatgtgaatgtccggcgcttcttctgctgctgagcctgctgctcttgccactggggttgcctgtgctgggagcgccgccgcgactcatctgtgactcgagggtgcttgagaggtacatcctgggtgcacgcgaggccgaaaacgttaccatggggtgcgccgagggatgctcattctctgagaatatcaccgtccctgacacgaaggtcaatttctatacttggaagaggatggacgtaggacagcaagctgtggaagtgtggcaaggcctcgccctgctctccgaggcgattctgaggggccaggccttgcttgccaacagctcgcagccgtcggaaaccctccaactgcatgtggataaagccgtgagctcgctccgatcactgacgtcgctgctgcgggctctgggggcgcagaaggaagcgacctccctcccagaggccacctcggctgcgcccctgcggacgttcaccgtcgacactctctgcaagctctttagaatctactcaaacttcctgcgcgggaaactcactttgtacactggagaagcctgccggcgaggagataga

SEQ ID NO: 10983 - DNA, 576 bp, synthetic construct
  misc_feature 1..576: note = source = /note="Description of Artificial Sequence: Synthetic coding sequence"
  source 1..576: mol_type = other DNA
atgggaagttgcgaatgtccagccttgttgctgctgctgagcttgctccttttgcctctgggattgccggtgctcggagcaccacccaggctcatctgcgatagcagagtgttggagagatacattttgggcgccagagaggcggagaacgtcacgatgggctgcgccgaaggctgcagttttagtgaaaacataacagtgccagataccaaagtaaacttctacacttggaaaaggatggatgtgggacagcaggcagtggaggtctggcaaggcctggccttgctctcagaggccatcctgagaggccaggcgctgcttgcaaactcatctcaacctagcgaaactttacagcttcatgtggataaggctgttagctcactgaggagcctgactagcctgctgagggcactgggagcccaaaaagaggccactagtttacctgaggcgactagcgcagccccactgagaacatttactgttgataccctctgcaagctgttcaggatttacagcaatttcctcagaggtaagctgacattgtacaccggcgaggcgtgccggagaggggacagg

SEQ ID NO: 10984 - DNA, 576 bp, synthetic construct
  misc_feature 1..576: note = source = /note="Description of Artificial Sequence: Synthetic coding sequence"
  source 1..576: mol_type = other DNA
atggggtcatgcgagtgcccggctttgctcctgcttctgtccctgcttctgctgcccctagggctgcctgtcctgggggccccgcctcgcttgatatgtgactcacgtgtgctggagcgatatatcttgggcgcccgcgaggctgagaatgttacaatgggctgtgctgagggatgcagcttttccgagaacattacagttcctgatactaaagtgaacttctacacctggaagagaatggatgtggggcaacaggccgttgaagtgtggcagggcttagcgctgctctccgaggccatcctgcgcggacaggccctgctggctaacagctcccagcccagcgagacattgcaactccatgtggacaaggctgttagttctttgaggtccctgacgtccctgcttcgggcccttggcgcccagaaagaggctacatccctaccggaggcaacctccgccgctccactgaggaccttcactgtggacaccttgtgcaaattgtttcgtatttactcgaactttctgcgcgggaaacttacattgtacaccggggaggcatgtaggcgaggcgatagg

SEQ ID NO: 10985 - DNA, 576 bp, synthetic construct
  misc_feature 1..576: note = source = /note="Description of Artificial Sequence: Synthetic coding sequence"
  source 1..576: mol_type = other DNA
atgggatcgtgtgagtgtcctgcccttctgttgctcctgtccttgttgctcctgccactgggactcccggtcttgggggcaccgcccaggctgatttgcgatagtcgcgttctggagcgctacatcctcggcgcgcgggaagcggaaaacgttaccatgggatgcgccgagggatgctccttctccgagaacatcactgtgcctgacactaaggtgaatttctacacttggaaaaggatggacgtgggtcaacaagcagtggaagtatggcagggccttgcgctgctgtctgaggcgatactgaggggacaggctctcctggccaattcgtcacagccatctgaaacgcttcagctgcacgtcgacaaagctgtctcgagcctgcgcagcctgacgtcactgttgcgggcacttggtgcacaaaaggaggccacctcgctcccggaagcgaccagcgctgccccgctccggacctttactgtggacaccttgtgcaagttgttccgcatctactcaaacttcctgcgaggaaagctgactctctacaccggcgaagcctgcagaagaggggatcgc

SEQ ID NO: 10986 - DNA, 576 bp, synthetic construct
  misc_feature 1..576: note = source = /note="Description of Artificial Sequence: Synthetic coding sequence"
  source 1..576: mol_type = other DNA
atgggatcctgtgaatgcccggctctgctgctgctgctctccctgctgctgcttccgctgggccttccagtcctgggagccccaccgcggctgatctgtgatagcagggtcctcgagagatacatcttgggggcacgcgaagccgaaaatgtcaccatgggatgtgccgagggatgtagcttctcggagaacatcaccgttcctgatactaaagtcaatttctatacctggaagcggatggacgtgggacaacaagccgtcgaagtgtggcaaggcctggcgctcctgtcagaagctatcttgcgcggtcaggccctgctcgctaacagctcgcagccatccgaaaccctgcagctgcatgtggataaggccgtgtcgtcactgagaagcctgactagcctcctccgggccctcggcgcacaaaaggaggcaacttcgctcccagaggctacctcagccgcgcccctccgcaccttcactgtggacacgctgtgcaaactgttccgcatttactcaaactttctgaggggcaagctgaccctgtacaccggggaggcttgccggcgcggagatcgg

SEQ ID NO: 10987 - DNA, 576 bp, synthetic construct
  misc_feature 1..576: note = source = /note="Description of Artificial Sequence: Synthetic coding sequence"
  source 1..576: mol_type = other DNA
atgggatcatgcgaatgcccggcgttgctgctactgctcagtctgctgctgctcccactaggcctcccggtgcttggcgcccccccaagacttatctgtgatagccgcgtcctcgaaagatatatcctgggggcccgcgaggccgaaaacgtgacgatgggctgtgctgagggatgtagcttcagcgaaaatatcaccgtcccggatacgaaggttaacttctacacctggaaacgtatggatgtgggtcagcaagcggtcgaggtgtggcaaggactggccctgttgagcgaggctattcttcgcggacaggccctgttggccaattccagccagccttccgagacccttcagctgcacgtggataaggccgtgagctctctgaggagtctgacatctctgctgcgggccctgggtgctcagaaggaggcgacgagcctgcccgaggcgacgagtgcggctccactacgcacgtttaccgtggacacgctgtgcaagctattccgcatctattccaacttcctgcgtggcaagctgactctctacaccggagaggcttgccgtcgcggcgataga

SEQ ID NO: 10988 - DNA, 576 bp, synthetic construct
  misc_feature 1..576: note = source = /note="Description of Artificial Sequence: Synthetic coding sequence"
  source 1..576: mol_type = other DNA
atgggatcatgcgaatgcccagctctgctgttgttgttgtccctgctccttctgccactgggcctgccagtgctcggcgccccgcctcgcctcatctgcgacagcagggtccttgaacgctacatcctgggagcccgcgaggctgaaaacgtcactatgggatgcgccgaaggttgcagcttttcggagaacatcactgtgccggataccaaggtcaatttctacacctggaagcggatggacgtcggacagcaggcggtcgaagtctggcaaggactggccctcctgtcagaagcgatcctgcgcggccaggccttgctcgcaaatagctcgcagcctagcgaaactcttcaactgcacgtggacaaggcggtgagctccctgcgctcgttgacgtccctgttgcgggctctcggcgcacaaaaagaagcaaccagcctgcccgaggcgacctccgcggccccactccggaccttcactgtggacaccctctgcaagctcttcaggatctattcgaatttccttcggggaaaactgactttgtacactggcgaggcctgcagacgcggcgaccgg

SEQ ID NO: 10989 - DNA, 576 bp, synthetic construct
  misc_feature 1..576: note = source = /note="Description of Artificial Sequence: Synthetic coding sequence"
  source 1..576: mol_type = other DNA
atgggttcatgtgagtgcccggcgctgctgctcctgctctcattgctcctccttccacttggcctgccggtcctgggagccccgccccgactcatctgcgactcaagagttctcgaacgctacattttgggagcccgcgaggccgaaaatgtgaccatgggatgtgccgaaggctgctcattctccgagaacatcactgtgccggatactaaagtgaacttctacacctggaagcggatggatgtgggacagcaggccgtggaggtgtggcagggacttgccctgcttagcgaggctattctgcgcggacaggccctgctggcgaactcaagccagccttcggagactctgcagctgcacgtcgataaggcggtatcctcactgcgcagcctcactagcctgttgagggccttgggcgctcagaaggaggcaacttcgctgcctgaggcgacgtccgcggcgccgctgcgcacttttaccgtggacaccctttgcaagttgttccggatctactcgaacttcctcagaggaaagctcaccctctacactggggaagcgtgccgccgcggagacaga

SEQ ID NO: 10990 - DNA, 576 bp, synthetic construct
  misc_feature 1..576: note = source = /note="Description of Artificial Sequence: Synthetic coding sequence"
  source 1..576: mol_type = other DNA
atggggagctgtgaatgcccggccctgctgcttcttcttagcctcttgcttctgccactcgggctgccggtgctcggagccccaccgcggctgatttgcgactcgcgggtcctggaaaggtacatcctgggtgcgagggaggccgaaaacgtgactatgggatgcgcggagggctgttccttttcggagaatatcacggtcccggacaccaaggtgaatttctacacctggaaacgcatggatgtcggacagcaggcagtcgaagtgtggcaaggactggctctcctgtccgaagccatcctcagggggcaagcgttgctcgccaactcatcgcagccgtcagaaaccctccagctgcacgtggacaaagcggtgagctcgctgcgttccctcacctcacttctgagagcattgggagcccaaaaggaggccacctccctgccggaagctacctctgcagccccgcttaggactttcaccgtggacaccctgtgcaagctgttcaggatctacagcaactttcttagaggaaagctgaccctctacactggagaggcttgccggcggggagatagg

SEQ ID NO: 10991 - DNA, 576 bp, synthetic construct
  misc_feature 1..576: note = source = /note="Description of Artificial Sequence: Synthetic coding sequence"
  source 1..576: mol_type = other DNA
atgggttcgtgcgagtgtccggccttgttgctccttttgtcacttctgttactcccgctcggtttaccagtgctcggagctccaccaaggctcatctgtgatagtagagtgctcgaacgttatatcttaggagcaagggaagctgaaaacgtgacaatgggatgtgctgaaggatgttcattttccgagaacattacagtaccggatactaaggttaacttctatacttggaaacgtatggatgtgggtcaacaagccgttgaggtttggcaaggacttgcattgctgtccgaagctatcctgcggggacaggcgcttcttgcgaattcctcacagccctccgagactcttcaattgcacgttgacaaagctgtttcttccctccgatcacttacttcgttgcttcgggctcttggagcgcaaaaggaagcaacttctctaccagaggctacttcagccgcacccttaagaacgttcacggtagatactctttgtaaattgtttcgtatatatagtaattttctcagaggaaaattgaccctttataccggagaggcgtgtcgtcgtggagacaga

SEQ ID NO: 10992 - DNA, 576 bp, synthetic construct
  misc_feature 1..576: note = source = /note="Description of Artificial Sequence: Synthetic coding sequence"
  source 1..576: mol_type = other DNA
atgggcagttgcgaatgtccagcactcctcctgctgctgagccttcttctgctgcccctgggactgccagtgttgggcgccccgccaagactgatttgcgattcccgtgttctggagaggtacattctgggcgcacgagaggcagagaacgtcacaatggggtgcgccgaaggatgctcattcagtgagaatataactgtgccagatactaaggttaatttttacacttggaagcgcatggatgtgggccagcaggcagtggaagtgtggcagggcctcgctttgttgagcgaagccatcctgagaggacaagccctgttagccaatagcagccagccttcggagaccctgcagctccatgtggataaagctgtgagcagcctgaggagcctgacctcgctgctgcgggccctgggcgcccagaaggaagccaccagcctccctgaggccacaagtgctgcgccactaagaacctttactgtcgacactctgtgcaaattgttcaggatttactctaactttctgcgggggaagttgacattatatactggcgaagcgtgccggcgcggcgacagg

SEQ ID NO: 10993 - DNA, 576 bp, synthetic construct
  misc_feature 1..576: note = source = /note="Description of Artificial Sequence: Synthetic coding sequence"
  source 1..576: mol_type = other DNA
atggggagctgtgagtgtcccgcgcttcttctcctcttgtccctgcttctcttgcccctgggccttcctgtgcttggggcacctccgaggctgatatgtgactcacgcgtcctggagcgctatatcttgggcgcacgagaagccgaaaatgtgactatggggtgtgcggagggttgttctttttccgagaacattaccgtgcccgataccaaggtgaatttctacacctggaaacggatggacgtggggcagcaagcggtggaagtgtggcagggattggcgctgctttcggaagccatcctcagaggacaagccctgcttgccaactcgtcacaaccctcagaaaccctgcagctgcatgtggacaaggcagtgtcgtcattgcggagcctcacctcactgcttcgcgcactgggagcccaaaaggaggcgaccagcttgcctgaggcaacctcggcagcgcctcttcgaacctttactgtcgacactctctgcaaactttttagaatttacagcaacttcctgagaggtaagctcacgctgtacactggcgaagcatgccgccgtggtgaccgg

SEQ ID NO: 10994 - DNA, 576 bp, synthetic construct
  misc_feature 1..576: note = source = /note="Description of Artificial Sequence: Synthetic coding sequence"
  source 1..576: mol_type = other DNA
atgggatcttgcgaatgtcctgccctactacttttgttgtccctacttttacttcctcttggtctccccgtgctgggcgctccaccacgtcttatctgcgacagccgcgtgctagagcgatacatacttggagctcgagaggcggagaacgtcacgatgggttgtgccgagggctgctcattctcagagaatattaccgtgcctgacaccaaagtcaacttttatacctggaaacgtatggacgtgggccagcaggccgtggaggtgtggcagggcctggccctgctgtctgaggctattctgcgcggccaggccctgcttgccaactcttcacagccatcggagaccttgcagctgcacgtggacaaggcagtctcctctcttaggtccctaacgtcgctactccgtgccctgggcgctcaaaaggaagccactagtctgccggaggccactagcgcagcaccgttgagaacctttacagtggacaccctatgcaagctgttccgtatctattcaaacttccttagaggaaaactgacactatatactggcgaggcttgccgacgcggcgacagg

SEQ ID NO: 10995 - DNA, 576 bp, synthetic construct
  misc_feature 1..576: note = source = /note="Description of Artificial Sequence: Synthetic coding sequence"
  source 1..576: mol_type = other DNA
atgggaagctgcgaatgcccagcgctgctgttgctcctttccctgctccttctgccgttgggccttcccgtgctgggtgcccctccgcggctgatctgcgattcgagggtcctggagaggtacatcctgggagcccgcgaagcggaaaacgtcactatggggtgtgccgaaggatgctcgtttagcgaaaacatcactgtgcctgacaccaaggtgaatttctacacttggaaaagaatggacgtgggacagcaggcagttgaggtgtggcagggactcgccctcctcagcgaggcgatcctgagaggccaagctctcctggcaaattcctcacagccgtcagaaaccctgcaactgcacgtcgataaagcggtgtccagtctcagatctctgacctccttgctgagagcgcttggcgcccaaaaggaagcaacctcgcttccagaggccacttctgcagctccactcaggacctttactgtggacaccctctgcaaacttttccggatatactcaaacttcctccgtggtaagctgacgctgtatacgggtgaggcttgtcggaggggcgaccgc

SEQ ID NO: 10996 - DNA, 576 bp, synthetic construct
  misc_feature 1..576: note = source = /note="Description of Artificial Sequence: Synthetic coding sequence"
  source 1..576: mol_type = other DNA
atgggatcctgtgaatgtccagctctgctgctgctccttagcctgcttcttctcccgctgggattgccagtactgggggcccctcccagattgatttgcgactctcgggtgcttgaacggtacatcttgggagcgagggaggcggaaaatgtgaccatgggttgtgccgagggctgcagcttctcggaaaacattaccgtcccggataccaaggtgaacttctacacttggaaacgcatggacgtcggccaacaggctgtggaagtgtggcagggactcgccctcctctcagaggcgatcctgcgcggacaagccctgctggcaaattcctcacagccatcggaaaccctgcagctccacgtcgataaggcggtgtcaagcctccgctccctgacttccttgcttcgggccctcggagcccaaaaagaagcgacctcgcttccggaggctactagcgcagctccgctccggacgttcacggtagataccctctgcaagctctttagaatctacagcaacttcctcaggggaaagctgactctgtacaccggagaggcctgtaggcgcggcgaccgc

SEQ ID NO: 10997 - DNA, 576 bp, synthetic construct
  misc_feature 1..576: note = source = /note="Description of Artificial Sequence: Synthetic coding sequence"
  source 1..576: mol_type = other DNA
atggggagctgtgagtgtcctgccctgctgctgctgctctctctcctcctgcttccacttgggctcccggtgctgggagccccgcctcgtctgatttgcgactcacgagtcctagaaagatatattctaggagccagggaggccgaaaacgttacaatgggctgtgctgaggggtgcagcttctcagaaaatattacagtgcccgacactaaagtgaatttctatacatggaagcgtatggacgtcggtcagcaggctgtggaggtgtggcagggcttggctctgttatcagaagccatcttgcggggacaggctttgctggccaactcctcgcagcctagcgagacgctgcagctgcacgtcgataaggccgtgagctcacttcggtccctgacttccttattgagggcgctcggggcgcagaaggaggcaacaagtctgcctgaggcaacatctgcagccccactgcgaactttcacagtcgacacactgtgcaaacttttcaggatatattctaacttccttcgaggtaagctgacattgtataccggcgaggcgtgtagaaggggcgacagg

SEQ ID NO: 10998 - DNA, 576 bp, synthetic construct
  misc_feature 1..576: note = source = /note="Description of Artificial Sequence: Synthetic coding sequence"
  source 1..576: mol_type = other DNA
atgggatcttgcgaatgccctgccctgctgttacttttgtccctattattacttcccttgggacttccagtgctgggcgcaccccctaggctcatctgcgactcacgagtattggagagatatatcttgggggcccgtgaggctgaaaacgttacaatgggctgcgccgaaggctgtagcttttcagagaatataacagttccggataccaaagtgaacttttacacgtggaagcgtatggatgttgggcagcaagctgtcgaagtgtggcagggcctcgcactcctgtcagaggcaatcctcaggggccaggcgctccttgcgaacagtagtcagccatccgagactctgcagcttcacgtggacaaggcagtttctagcctacgcagtcttaccagtctgctgcgggctctcggggcgcaaaaggaagcgacatcacttcccgaggcaactagtgcagctcctcttaggacattcacagtcgacacactctgcaaactgtttcgaatttactctaatttcctgcgcggcaagttaacactctataccggcgaggcctgcaggagaggtgacaga

SEQ ID NO: 10999 - DNA, 576 bp, synthetic construct
  misc_feature 1..576: note = source = /note="Description of Artificial Sequence: Synthetic coding sequence"
  source 1..576: mol_type = other DNA
atgggatcgtgtgaatgcccggctctgcttctgctgctttcccttctcctgttgcccctgggcctgccagtccttggggctcctccacgcctgatctgcgacagtagagttctcgaaagatacatccttggcgcacgggaggctgaaaacgtgaccatgggttgcgcggaagggtgcagctttagcgagaacattaccgtgcctgacactaaggtcaatttctatacttggaagcgcatggacgtcggccagcaagctgtggaagtttggcaagggctcgccctcctttcagaggccatcctccgcggtcaggctctgctcgccaactcatcacagccctcagagactcttcagctgcatgtggataaagcggtgtcgtcgttgcggagcctcacctccctgttgcgcgcgctgggagcgcaaaaagaggcgacttccctcccagaagcaacctccgccgctccgctgcggacgtttaccgtggacaccctctgcaagctgttccgcatctactcgaatttcctgcgtggaaaactcacgctctacactggagaggcctgtcggagaggagatcgg

SEQ ID NO: 11000 - DNA, 576 bp, synthetic construct
  misc_feature 1..576: note = source = /note="Description of Artificial Sequence: Synthetic coding sequence"
  source 1..576: mol_type = other DNA
atgggttcttgtgagtgtccagccctgctcttactgctgtccctcctgttactgcctctcggactgcctgtcctgggcgcacccccacgtcttatctgcgacagcagagtgctggagaggtatatcctcggcgcacgggaagccgaaaacgtgaccatgggatgtgctgagggctgcagcttctcagagaacattacggtccctgacacaaaggtcaacttttatacgtggaagcgaatggatgttggacaacaagcggtcgaggtttggcaggggcttgctcttctgtcagaggccattctgcggggacaagcactcttagcgaattcaagccaacccagtgagactctgcagcttcacgtggacaaagccgtctcgtctctcaggagcttgacctcactgctccgcgccctcggcgcccagaaagaagcaactagtctgcccgaggcgacttctgccgcacccttgaggaccttcacggtggatacactgtgtaaactgttccggatttattcaaacttcctaagggggaagcttaccctctacacaggtgaagcttgtcggaggggcgatcgc

SEQ ID NO: 11001 - DNA, 576 bp, synthetic construct
  misc_feature 1..576: note = source = /note="Description of Artificial Sequence: Synthetic coding sequence"
  source 1..576: mol_type = other DNA
atgggcagctgtgaatgccctgcactgctgctgctcttgagcctactgctgctgcctcttggactacctgtgcttggagcccctccccgcctcatttgtgatagcagggtactggagcgctacattcttggagctcgggaggcagagaacgtgactatgggctgtgcggagggctgttccttttccgaaaatatcaccgtacccgatacgaaggttaacttctatacctggaaaagaatggacgtgggccagcaggctgtcgaggtctggcagggacttgcactgcttagcgaggcgatcctcagaggccaggctttgctggccaactcatctcagccctcagagacccttcagctgcacgtggacaaagctgtgtcttcattgcggtccttgactagcttgctgagggccttgggagcacagaaggaagccactagtctccccgaagccacaagcgccgcacccctccggacgtttaccgtggatacactatgcaagctgtttagaatctactcaaatttcctgagaggtaaactcaccttatacaccggagaagcttgccggcgcggcgacaga

SEQ ID NO: 11002 - DNA, 576 bp, synthetic construct
  misc_feature 1..576: note = source = /note="Description of Artificial Sequence: Synthetic coding sequence"
  source 1..576: mol_type = other DNA
atgggatcgtgcgaatgccctgcactccttttgcttttgtcgctcctcctgctccctctgggccttcctgtgctgggagcacccccgcgtctgatttgcgacagccgcgtgctggagcgctacattcttggcgctagggaggcagaaaacgtgaccatgggatgtgccgagggttgttccttctccgagaacataaccgtgccagatacgaaggtgaacttctacacttggaagcggatggatgtcggccaacaggcggttgaggtctggcagggacttgcactgttgtcagaggcaatactgagagggcaagcactgctggccaatagctctcaaccatcggaaactctgcaactccatgtcgataaggctgtgtcctccctgcgctcgctgacttcactcctgcgcgcgctgggggcgcagaaggaagcaacttcccttcctgaagctacctcggccgcaccactccgaactttcaccgtggatactctgtgtaaactctttcggatttactctaactttcttagaggcaaacttacgctgtacaccggagaggcttgtcgtcgtggagatcga

SEQ ID NO: 11003 - DNA, 576 bp, synthetic construct
  misc_feature 1..576: note = source = /note="Description of Artificial Sequence: Synthetic coding sequence"
  source 1..576: mol_type = other DNA
atgggtagctgtgagtgcccagctcttctccttctcctttcgcttcttctgctgccgctgggactgcccgtgcttggagcacctccccggctgatttgcgatagcagagtgcttgaacgctacatacttggagcacgcgaggccgaaaatgtcaccatgggatgtgccgaagggtgcagcttttcggaaaacatcactgtgcctgataccaaggtcaacttttacacgtggaaacgcatggacgtgggtcagcaagcagtcgaggtgtggcagggactcgccctgctttccgaagcaattctccgagggcaagcacttttggccaattccagccagccctcggagactctccagctccacgtggacaaagcagtcagcagcttgaggtccctgacttccctgttgagggcattgggtgcacaaaaggaagcgacctcactgccagaggccactagcgcagcacctctgagaacgttcaccgtggatacgctctgcaagttgtttcgcatttactctaactttcttcgtggaaaacttactctgtacactggtgaagcatgtaggcgcggtgaccgg

SEQ ID NO: 11004 - DNA, 576 bp, synthetic construct
  misc_feature 1..576: note = source = /note="Description of Artificial Sequence: Synthetic coding sequence"
  source 1..576: mol_type = other DNA
atgggttcctgcgaatgccctgccctgctgttgctgctgagcctcttgctgctgccgctgggtctcccggtcctgggcgccccacctcggcttatatgtgactctagggtcctggaaagatatatcttgggtgcgagggaggcggagaatgtcaccatgggttgcgcggaagggtgtagctttagcgaaaacattacagtgccagacaccaaggtcaacttctacacttggaagcgcatggacgtgggccagcaggctgtcgaagtgtggcagggtctggctctactgtctgaggcgatactgcgaggtcaggctctgctggcgaacagttctcaaccgagcgagaccctccaactccatgttgacaaggccgtctcttccttgcgatcgctgaccagcctgctcagggccctgggtgcgcagaaggaggccacgtctctgccagaggctacgtctgccgctccgcttcgcacgttcaccgtggacaccctgtgcaaactattccgcatctactccaactttctccgtggcaaacttaccctgtataccggtgaggcgtgccgccgcggtgataga

SEQ ID NO: 11005 - DNA, 576 bp, synthetic construct
  misc_feature 1..576: note = source = /note="Description of Artificial Sequence: Synthetic coding sequence"
  source 1..576: mol_type = other DNA
atggggtcctgcgagtgcccagcgcttctgcttctgttgtctcttttgctgctgccgctcggattgcctgtccttggcgctccgccccggttgatttgtgacagccgcgtactcgagcggtatatcctcggagcccgagaggctgaaaacgtcaccatggggtgcgcagagggatgctcgttctctgagaacattactgtgcccgacactaaggtgaacttctacacctggaagcgaatggatgttggacagcaggcggtggaggtctggcagggattggccctcctgtctgaggcaatcctgcgcggacaggcgctgttggccaacagttcccagccttctgaaaccctgcagcttcatgtggataaggccgtgagctcgttacgttctctgacttccctgctgcgcgcgctcggtgcccagaaggaggcgaccagcctgccagaagctactagtgctgcacccttgcgtactttcaccgtcgataccttgtgtaaactcttccggatttactccaacttcctgcgcggaaagctgacgctgtatactggagaggcttgtcgtcgtggtgatcgc

SEQ ID NO: 11006 - DNA, 576 bp, synthetic construct
  misc_feature 1..576: note = source = /note="Description of Artificial Sequence: Synthetic coding sequence"
  source 1..576: mol_type = other DNA
atgggtagctgcgaatgtccagctctgctgctcctgcttagcctgcttctccttcctcttggactgcctgtgctcggggcacctccccgtttgatttgcgacagccgcgtgctggaaaggtacatccttggggcccgagaggcggagaatgtgactatgggttgtgctgagggatgttcgtttagcgagaacatcaccgtgcctgataccaaagtcaatttctacacctggaagaggatggatgtcggccaacaggctgttgaagtgtggcaagggctggcgctgctgtcggaggcaatactcagaggccaagcacttcttgcaaatagctcccagccctccgaaactcttcagctccacgtcgataaagcagtgtcgtcgcttagatcgctcacttcactgctgcgggctcttggagcacaaaaggaagcaacttcgcttcctgaagcaacgtccgcagcaccacttcggacttttaccgtcgataccctgtgcaaactgtttaggatctactccaatttcctcagggggaagctgactctgtacactggtgaggcgtgcagacgtggcgatcga

SEQ ID NO: 11007 - DNA, 576 bp, synthetic construct
  misc_feature 1..576: note = source = /note="Description of Artificial Sequence: Synthetic coding sequence"
  source 1..576: mol_type = other DNA
atgggctcatgtgaatgtcccgctctgctcttattgctgtccctgctcctgctgcccctgggtctgcctgtgctgggcgccccccctaggctgatatgtgattctcgagtactggagaggtatatactgggagctcgagaggcagagaatgtgaccatggggtgcgccgaaggatgctccttttcagaaaacattaccgtgcctgatacgaaagtgaatttctacacctggaagcgtatggatgtgggacagcaagctgtcgaggtgtggcaaggcttagctctgctgtcggaggccatcctaagggggcaggcactgcttgcgaatagtagccaaccctccgaaactctgcagctccatgtagacaaggccgttagttcgctccggtctctgacttccctgctccgagctcttggggctcagaaggaagcaacatcactgcctgaagcaactagcgcagctcctttacgaaccttcacggtcgatacactctgcaaactctttcgtatctacagcaatttcctgagggggaagcttactttgtatacgggtgaggcttgtcgaaggggcgataga

SEQ ID NO: 11008 - DNA, 576 bp, synthetic construct; identical to SEQ ID NO: 10992
  misc_feature 1..576: note = source = /note="Description of Artificial Sequence: Synthetic coding sequence"
  source 1..576: mol_type = other DNA

SEQ ID NO: 11009 - DNA, 576 bp, synthetic construct
  misc_feature 1..576: note = source = /note="Description of Artificial Sequence: Synthetic coding sequence"
  source 1..576: mol_type = other DNA
atgggatcgtgtgagtgtccagctttgcttcttctccttagcttgctgcttttgccacttgggctgcctgtgctcggagcaccgcctcgactcatttgcgattcccgtgtgctggagcggtacatacttggggccagagaagccgaaaatgtgactatgggatgtgcagagggatgttcgttctctgaaaacatcactgtccctgacactaaggtgaacttttacacttggaagcgaatggatgtcggtcagcaagcggtggaagtgtggcaaggtctggccctcctctcagaagcaattctgcgaggccaagcgctgctggcaaacagctctcagcctagcgaaacccttcagctgcacgtcgacaaggctgtgtcatcacttagatccctgacctcgctgttgagagccctcggggcgcaaaaggaagcaacttccctgcccgaggcaacctcggcagctcctttgagaactttcaccgttgatactctctgcaagctgtttaggatctacagcaactttttgaggggaaaacttactctttacaccggcgaggcatgtagaaggggagatcgc

SEQ ID NO: 11010 - DNA, 576 bp, synthetic construct
  misc_feature 1..576: note = source = /note="Description of Artificial Sequence: Synthetic coding sequence"
  source 1..576: mol_type = other DNA
atgggaagctgcgaatgcccggcactgttgctcctgctgtcgctgctccttctgccgctcgggctccctgtgctgggagcaccgcctagattgatctgtgactcacgtgtgctggaacggtatatactcggagcccgcgaggctgagaacgtcactatggggtgcgccgagggttgctcgttttcagagaatatcaccgtgcccgatactaaggtgaatttctacacttggaaacggatggatgtgggacagcaggcggttgaagtctggcagggactggctctcctgtccgaggcaatcctgcgaggtcaggcgctgctggccaactccagtcaaccatccgagactctgcagttgcacgttgacaaggcagtgtctagcctccggtccctgacctcgctgctcagagcgcttggagcccagaaggaagccaccagcttgccagaagcgacttcggcggccccgctgcggaccttcaccgtggatacgctctgcaagttgttccggatttacagcaactttctgcgcggcaaactgaccctctacactggagaggcttgtcgccgcggagacaga

SEQ ID NO: 11011 - DNA, 576 bp, synthetic construct
  misc_feature 1..576: note = source = /note="Description of Artificial Sequence: Synthetic coding sequence"
  source 1..576: mol_type = other DNA
atgggaagctgcgaatgccccgccctgctgctgttgttgtccctcttgctcttgccacttggcctccctgtgctgggggcccccccaagactgatctgcgactctcgggtgcttgagaggtacattctgggggcccgggaggctgaaaatgttaccatggggtgtgctgaggggtgttctttttccgaaaacatcaccgtaccagatacaaaggtaaatttctacacctggaagaggatggatgtggggcagcaggccgtagaggtttggcagggtctggcgttgctgagcgaagcgatcttgcgcggtcaggctttgcttgctaactctagccaaccttccgaaacattgcagctgcatgtggacaaggcggtcagttcactgcggtctctgacatctctgctgcgggccttgggggcacaaaaagaggctacttctttgcccgaagcaaccagcgccgccccactgcggactttcaccgtagataccttgtgcaaattgttcaggatctactctaactttcttagaggtaagctgacgctctatactggggaggcttgcagaaggggggatagg

SEQ ID NO: 11012 - DNA, 576 bp, synthetic construct
  misc_feature 1..576: note = source = /note="Description of Artificial Sequence: Synthetic coding sequence"
  source 1..576: mol_type = other DNA
atgggaagctgtgaatgccctgcactgcttctgcttctcagcttactcctattaccgctgggccttccagtgttaggggcccccccaagactcatctgcgatagccgagttttggaacggtacatattaggcgcgagggaggctgaaaacgtgacaatgggttgcgctgaaggctgctccttctcagagaacattactgttccagatacgaaggttaacttttatacttggaaacggatggacgtcgggcagcaggccgttgaggtgtggcagggcctagccctactgtcggaggcgatcttacgtggccaggcgctgctcgccaactcatctcagccatctgaaacgttacaactgcacgtcgacaaagccgtctcttccctgcgtagcctaacatcactccttagggccctgggagcacagaaagaagccacttcacttccggaagcaaccagcgctgcccccctgcggacgttcaccgttgacaccttatgtaagctcttcaggatctatagcaacttcttgcgaggcaagctgacactgtataccggggaggcttgtcgtcgcggcgacagg

SEQ ID NO: 11013 - DNA, 576 bp, synthetic construct
  misc_feature 1..576: note = source = /note="Description of Artificial Sequence: Synthetic coding sequence"
  source 1..576: mol_type = other DNA
atgggctcctgcgagtgtccagcccttttgctactgctctccttgctgctcctgcccctgggtcttcccgtgctgggcgccccccccaggcttatctgcgattctcgtgtgctggaacgctacatcctgggcgctcgggaagcagagaacgtgacgatgggctgcgcggaagggtgtagcttctcagagaacataaccgtaccagacacaaaggtgaatttctacacttggaaacgaatggacgtcggtcagcaggccgtcgaggtgtggcaggggctggccctcctcagcgaggcgatcctacgtggacaggccctgctggctaactcctcccagcctagcgaaacccttcagttgcacgtggacaaggccgtgagttctcttcgcagccttaccagccttctgcgagccctaggggcccagaaagaagcaacatcactgccagaagctacgtctgccgcaccactcaggacattcacagtggacaccctgtgtaagctgtttcgcatatattccaacttcctgaggggtaagctgaccctttacacgggcgaggcgtgccgacgcggcgaccgg

SEQ ID NO: 11014 - DNA, 576 bp, synthetic construct
  misc_feature 1..576: note = source = /note="Description of Artificial Sequence: Synthetic coding sequence"
  source 1..576: mol_type = other DNA
atgggttcatgcgaatgccccgccctccttctgctgctgtccctgctgttgcttcccttgggcctccccgtgctgggtgctcccccacggctaatctgcgactccagagtgttggagagatacatactcggggccagagaggccgaaaacgtgaccatgggttgcgccgagggttgtagctttagcgagaatatcactgtgccagatacgaaggtgaacttttatacttggaaacgcatggatgtagggcagcaggccgttgaagtgtggcagggcctcgcactgctcagcgaggcaatcctgcgcggtcaggctcttctcgccaactctagtcaaccgtccgagaccttgcagctgcatgtcgacaaagcggtgtcttctctccggtcccttacctctcttctaagggcactgggggctcagaaggaggctaccagtttgccggaagcgaccagtgctgccccgctgaggacgtttaccgtggacaccctgtgcaagctgttccgcatctacagtaatttcctccgaggtaaattaaccctgtatacaggagaggcgtgtagacggggagacagg

SEQ ID NO: 11015 - DNA, 576 bp, synthetic construct
  misc_feature 1..576: note = source = /note="Description of Artificial Sequence: Synthetic coding sequence"
  source 1..576: mol_type = other DNA
atggggagctgcgagtgcccagctctactgcttctgttgagtctcttgctcctcccgctcggactgcccgtcctaggggctccgccacgcctcatctgcgattcccgcgtgctggagcgctacatcctcggggctcgggaggccgaaaacgtaactatgggatgtgcagagggttgcagcttttcagaaaacattacagtgcccgacaccaaggtgaacttttacacatggaaaagaatggacgttggtcaacaggccgtcgaggtctggcagggcctagctctcctgagcgaagccatcctgagaggtcaagcgcttctggcgaatagcagccagccttctgaaacacttcaattgcacgtcgacaaggccgtgtccagcctgcgctccttgacctctctccttcgtgccctcggcgcccaaaaggaggccacctctttacccgaggccacatctgcagcaccattacgtacctttaccgtggacaccctttgtaagttgttcaggatttactctaattttctgcgcgggaagctaaccctgtacacaggcgaagcatgccgccggggcgacagg

SEQ ID NO: 11016 - DNA, 576 bp, synthetic construct
  misc_feature 1..576: note = source = /note="Description of Artificial Sequence: Synthetic coding sequence"
  source 1..576: mol_type = other DNA
atgggatcgtgtgaatgcccagcactgttgctccttctgtccctgctgctcctccccctcggcctcccagtgctgggagccccgccccgcttgatctgcgactcaagagtgctggagcgctatatcctcggagctagagaggcagaaaatgtcacgatgggttgcgctgagggctgttccttcagcgagaacatcactgtgccggatactaaggtgaatttctacacgtggaaacgtatggatgtcggacagcaagccgtggaagtttggcaagggcttgcactgctctcagaagccattctcagaggacaggctctgctggctaactcttcccaaccgtcggaaacccttcagctgcacgtcgacaaagctgtgagctcactccgcagcttgacctcgctgctccgcgctctgggagcacagaaagaagcaactagcctcccggaggccacctcggctgcgccacttaggacgtttaccgtggataccctgtgtaagctgtttcgcatctactccaacttccttcgggggaagttgaccttgtacactggtgaggcatgccggcggggagacagg

SEQ ID NO: 11017 - DNA, 576 bp, synthetic construct
  misc_feature 1..576: note = source = /note="Description of Artificial Sequence: Synthetic coding sequence"
  source 1..576: mol_type = other DNA
atgggttcgtgcgaatgtccggccctgctgcttctcctgtcactgctcttgctgccgctggggttgcccgtgttgggagcacctccaagattgatctgcgactccagagtgttggagcggtacatcctgggagcaagggaggcagaaaacgtgactatgggatgcgcggagggatgctccttttcagagaatatcaccgtgcctgacaccaaggtgaacttctacacttggaagagaatggacgtgggacaacaagcagtcgaggtctggcaaggcctggctctgctgagcgaagcgatcctccggggccaagctctcctggccaactcctcccaacctagcgaaaccctgcagctgcatgtcgataaggcggtgtcgtcgctccgctcacttacctcactgctcagagccctcggcgcgcaaaaagaggccacttcgctgccggaggccacgtcggcggcccctctccggaccttcactgtggacaccctctgtaagctgtttcggatctattccaatttcctgagaggaaagctcactctctacactggcgaagcctgcagacggggcgataga

SEQ ID NO: 11018 - DNA, 576 bp, synthetic construct
  misc_feature 1..576: note = source = /note="Description of Artificial Sequence: Synthetic coding sequence"
  source 1..576: mol_type = other DNA
atggggtcctgcgaatgccccgccctcctcctcctcctttccctgctgttgctcccactgggcttgccagttctgggcgccccacctcggctcatttgtgactcccgcgtgcttgagcgctacattttgggtgcacgcgaggcagaaaatgtgaccatgggatgtgccgaaggctgcagcttctccgaaaacatcacagtgcccgacaccaaggtgaatttctacacatggaaaagaatggacgtggggcagcaggcggtggaggtctggcaaggcctcgcactgttgtccgaagcaatattgagaggccaggccttgcttgccaattccagccagccttccgaaactttgcagctccatgtggataaggctgtgagttccttgaggtcacttacgagccttctgagggcacttggagcccagaaggaggctacatctttgcccgaggcaacaagcgctgcacctctgcggacattcaccgtcgatactctgtgcaaactgtttcgcatctacagcaattttctgcgggggaagttgactttgtacaccggagaggcatgtcgccgcggcgacaga

SEQ ID NO: 11019 - DNA, 576 bp, synthetic construct
  misc_feature 1..576: note = source = /note="Description of Artificial Sequence: Synthetic coding sequence"
  source 1..576: mol_type = other DNA
atggggtcctgtgaatgtccagctctgctccttttattgtcactccttctgttgcctctgggcctgccggtgctcggagcgcccccacggctaatctgtgactctcgagtgctggaacgttacatccttggagctcgggaggcggagaatgtcacaatgggctgtgctgagggctgcagctttagtgagaatatcacggtgccagacactaaggttaatttttatacatggaagaggatggacgtcgggcagcaggccgttgaggtgtggcagggactggcactgctttctgaagctattttgcgcggacaggcattacttgccaactccagtcagccctctgaaacacttcagctgcacgtggataaagctgttagtagtctgcgctccctaacctcactgctccgcgcactgggagctcaaaaggaggccacctcattgccagaggccacgtcagccgcgcccctgaggacattcacagtggacacgctgtgcaaactcttcagaatctactctaatttcctgcgtggtaagctgactctgtacactggggaggcttgccgaagaggagaccga

SEQ ID NO: 11020 - DNA, 576 bp, synthetic construct
  misc_feature 1..576: note = source = /note="Description of Artificial Sequence: Synthetic coding sequence"
  source 1..576: mol_type = other DNA
atgggttcatgcgaatgtcccgcactgctgctccttctgtcacttcttctcctgccactgggacttcctgtgctgggtgcacctcctcgacttatttgcgattcgcgggtgcttgagcgatacatacttggtgcgcgtgaagctgagaacgtcactatgggatgtgcggaaggatgtagcttttcagaaaacatcaccgttcctgacaccaaggtgaacttttacacctggaaacgaatggatgtcggacagcaagccgtggaagtctggcaaggactggcacttctgtcggaggcgatccttcgggggcaggcacttctggcaaactcgagccagccttcggaaaccctccaacttcacgttgataaagccgtcagctctttgagaagcctcacctcactgcttcgcgcactgggggcccaaaaggaggccaccagcttgcccgaggccacctcagcagcgcccctccggacgtttactgtggacaccctttgtaaactgttccgcatttactcaaactttctcagaggaaagctcaccctgtacaccggtgaagcatgtcgcagaggcgacaga

SEQ ID NO: 11021 - DNA, 576 bp, synthetic construct
  misc_feature 1..576: note = source = /note="Description of Artificial Sequence: Synthetic coding sequence"
  source 1..576: mol_type = other DNA
atgggctcctgtgagtgtccagcgttgttgctcctgctctccctgttgttgctgccgctgggcctcccagtgctgggagccccgccgcgcctgatctgcgatagtagagttctggaacgctacatcctcggagcgcgcgaagcggagaacgtgaccatggggtgcgctgaggggtgcagcttctccgaaaacatcacggtcccagatactaaggtcaatttctacacctggaagcgcatggacgtgggtcagcaggccgtggaagtctggcaaggcctggcactgctgagcgaggcaatcctccgcggtcaggccctccttgcaaattcatcgcagccgagcgaaaccctgcagctgcacgtcgacaaggccgtctcatcgttgcggagtcttactagcctcctgcgggccctgggcgcacaaaaagaggccacttcactccctgaggctacttccgccgcgcctctgcggactttcacggtagataccctgtgtaagctcttcagaatctactcgaactttctgagaggaaaattgactctgtacaccggtgaagcgtgtcggcgcggagatcgc

SEQ ID NO: 11022 - DNA, 576 bp, synthetic construct
  misc_feature 1..576: note = source = /note="Description of Artificial Sequence: Synthetic coding sequence"
  source 1..576: mol_type = other DNA
atgggcagctgtgaatgccctgccctgctactgctcctctccctcctactgctgccattgggtctacccgtgctcggagccccacccagactaatttgcgattccagggtgttggagcgctatatcctaggagctcgggaggctgagaacgtgactatggggtgcgctgaaggttgttccttctcagagaatattacagtgcccgacaccaaggtaaacttttacacctggaagcgcatggacgttggccagcaagctgtggaagtgtggcagggtctggcattgctgtccgaggccattttgcgcggccaagcactcctggcaaattcgagtcagccaagcgagacactgcagttgcacgttgataaagcagttagctccctgcgtagcttgacatcattgctgcgcgctttgggcgcccagaaggaggcaacctccctgcccgaagcgacatccgctgctccactgcgcaccttcaccgttgataccctttgtaagttgttcaggatctacagtaattttttgaggggaaaactgactttatacactggggaagcctgccggcgaggcgatcgc

SEQ ID NO: 11023 - DNA, 576 bp, synthetic construct
  misc_feature 1..576: note = source = /note="Description of Artificial Sequence: Synthetic coding sequence"
  source 1..576: mol_type = other DNA
atgggatcgtgcgaatgcccggcgctcctcctcctgctgtccctgcttctgctgccactgggcctgccagtgcttggagccccgccgcgactcatctgcgactcccgggttctcgaacggtacatcctgggtgcgagagaggccgagaacgtcactatgggatgcgcagaaggctgttccttttcggaaaatattaccgtgcctgacaccaaggtgaatttctacacctggaaacgcatggatgtgggacaacaggctgtggaggtctggcaaggtcttgccctgctgtcggaagctatcctgcgcggccaggctttgctggcgaactcttcccagccttcagagactctccaactgcacgtggataaggcagtgtcgtcattgcgtagcctgaccagcctcttgagggcactcggagcccagaaggaggcaacttcactccccgaagccactagcgcggccccgctgcgcacgttcaccgtcgacacgctgtgcaagttgttccggatctacagcaacttcctgagagggaaactcactctgtacaccggagaagcctgtcggcgcggggacaga

SEQ ID NO: 11024 - DNA, 576 bp, synthetic construct
  misc_feature 1..576: note = source = /note="Description of Artificial Sequence: Synthetic coding sequence"
  source 1..576: mol_type = other DNA
atgggctcttgtgagtgccctgcactgctgctgctgctgtcgttgctcctgctcccacttgggctccccgtgctgggtgcacccccaaggctgatctgcgattccagggttcttgaaagatatattctgggggcaagagaagccgagaacgttacaatggggtgtgcggagggctgcagcttctccgagaatatcaccgtcccagacaccaaagtgaatttctatacttggaaacggatggacgttggccaacaagctgtggaggtgtggcagggactggcattgctgtccgaggctatactgcgaggacaagctttattagccaattcgagccagccctcagagacactccagctgcacgtggacaaagccgtgagctccctgagaagcctgacatccttgcttcgggccttgggtgcgcagaaagaagccaccagccttccagaagcaaccagtgccgctcctctgcggaccttcacggtcgatactctgtgcaaactgtttcggatctactcgaacttccttagggggaaacttactctgtataccggtgaggcatgtagacggggcgacaga

SEQ ID NO: 11025 - DNA, 576 bp, synthetic construct
  misc_feature 1..576: note = source = /note="Description of Artificial Sequence: Synthetic coding sequence"
  source 1..576: mol_type = other DNA
atgggttcctgcgaatgccctgccctgcttttgttgctgtctttgctgctgctgcctctcggcctcccagtgctgggagcgccgccgcgactcatctgtgactcgcgcgtgcttgaaagatatatcctcggagcccgggaagccgaaaatgtcaccatggggtgtgccgaaggttgttccttctctgagaacattacggtgcctgatacgaaagtgaacttttacacatggaagagaatggacgtcggccagcaagctgtggaggtgtggcaggggctggccctgttgtctgaagccattttgcgcgggcaggcattgcttgcaaacagcagccagccttccgagacattacaacttcacgtagataaagccgtgagcagcctccggtcactgacgagtttgttgagagccctgggcgcccagaaggaggctacttcacttcctgaggcaacatcggccgcccccctacgcacctttacggtggacacactttgcaagctgttccgcatttactctaacttcctgcgcggcaaactcacactctataccggagaggcctgcaggcgcggagataga

SEQ ID NO: 11026 - DNA, 576 bp, synthetic construct
  misc_feature 1..576: note = source = /note="Description of Artificial Sequence: Synthetic coding sequence"
  source 1..576: mol_type = other DNA
atgggaagctgtgaatgtcctgcattgctcctgctactgtcactactcctgctgccgctgggcttgcccgtgctgggagctccaccacgcctaatctgtgacagtagagttctggaacggtacattctgggagctcgggaggcggaaaatgtcaccatggggtgcgccgaggggtgtagcttctctgagaatattaccgtgcccgacacgaaggttaatttttacacctggaagagaatggacgtgggacaacaggctgtcgaagtttggcagggtctggcgctgcttagcgaggccatacttcgtggtcaggctctcctggccaacagcagccagccttctgagactcttcagttacatgtggacaaagctgtttctagtttacgaagcctgacaagcttgttgagagcactgggcgcccagaaagaagcaacgtcgcttcctgaggcaactagtgctgcaccgttgcgcaccttcacagttgacaccctgtgtaaactgttccgcatctattctaatttcctgcgggggaagctcacactatatactggagaggcttgtcggaggggcgataga

SEQ ID NO: 11027 - DNA, 576 bp, synthetic construct
  misc_feature 1..576: note = source = /note="Description of Artificial Sequence: Synthetic coding sequence"
  source 1..576: mol_type = other DNA
atgggcagctgtgagtgccccgctctcctccttctactgagtctgcttctcttaccactaggtctgcctgtactcggtgctccccccagactgatatgcgactcacgcgtcttggaaagatacattctaggggccagggaggccgagaacgttacgatgggatgcgcagagggatgttcctttagcgagaacattactgtgccagacactaaggtgaatttttacacctggaaaaggatggatgtggggcaacaggcagttgaggtgtggcagggccttgcgttgctcagcgaagccatcttgcgagggcaggccctgctggccaatagcagccagccaagtgaaacactacagttgcatgtagataaggcggtctcctcccttcggtcgcttacttctctgctcagagcgcttggcgcacagaaggaggcgaccagcctgcccgaggctacgagcgccgcccctctccgcaccttcacggtggacaccctgtgtaagctgttccgcatctatagcaactttctgaggggcaaacttaccctgtataccggggaggcctgtcgccggggcgaccgg

SEQ ID NO: 11028 - DNA, 576 bp, synthetic construct
  misc_feature 1..576: note = source = /note="Description of Artificial Sequence: Synthetic coding sequence"
  source 1..576: mol_type = other DNA
atgggtagctgcgaatgccctgctcttctgttgctgcttagtctgttactactgcccctgggactgcccgtgctgggtgctcctccccggttaatctgcgatagccgtgtgctggagaggtacattctgggcgcgcgagaggccgaaaatgtgaccatggggtgcgccgaaggctgctctttcagtgagaacatcacagttccggacaccaaggtaaacttttacacttggaagcggatggacgtcggccagcaggcagttgaggtgtggcaaggccttgccctgctgtccgaagctatattgagaggacaggccctcttggctaattcaagtcaaccttcggagacccttcagctgcatgtcgacaaagcagtctcctcactgcgctcattaacctccctgttacgggcccttggagcccagaaagaggctaccagcctgccagaagctacctccgccgcaccattgagaacctttaccgttgacaccctgtgcaagctgttcagaatttactccaatttcctgcggggtaagctgaccttgtacacaggagaggcttgccggcggggtgacagg

SEQ ID NO: 11029 - DNA, 576 bp, synthetic construct
  misc_feature 1..576: note = source = /note="Description of Artificial Sequence: Synthetic coding sequence"
  source 1..576: mol_type = other DNA
atgggatcttgtgagtgtccagcactgttgctgttactaagcctcctcctcctccccttaggccttccggtcttgggggcccctccaaggcttatttgcgactctcgcgtgctggagcggtacattttaggggctcgcgaggcagagaacgtcactatgggttgcgccgaggggtgtagcttttccgagaacatcaccgttcccgacactaaggtgaatttttatacctggaagcgaatggatgtgggacagcaggcggtggaggtgtggcaggggctggccctcctttctgaggccattctgcgtggccaggcgttgcttgctaattctagtcagcccagtgaaaccctccaactgcacgtggataaagcggtctccagcctgcggagtctgacctcactcctcagggccttaggagcccaaaaggaagcaacatccttacctgaagccacatcggccgctcccctgagaacatttaccgtcgacactctctgcaagctctttagaatctattccaactttctgcggggcaaactcacactgtacacaggcgaggcctgtagacgcggtgacagg

SEQ ID NO: 11030 - DNA, 576 bp, synthetic construct
  misc_feature 1..576: note = source = /note="Description of Artificial Sequence: Synthetic coding sequence"
  source 1..576: mol_type = other DNA
atgggttcctgcgagtgtccagctttgctcctgcttctgtcactcctgctgctgcccttgggtctccccgtactgggcgccccaccccgcctgatctgcgactcccgcgtgttggagcgctacatcctgggtgccagagaagccgagaacgtcacaatgggctgcgccgaaggttgttccttctcagagaacatcaccgttcccgataccaaggtcaacttctacacctggaaacgcatggacgtgggacagcaagcggttgaggtatggcaaggtctggccctgttgtctgaggccatcctgagaggccaggccctccttgccaactcaagtcagcccagtgagacacttcagctccacgtcgacaaggctgtgtcatccctgagatcattgacatccctccttagagccttgggagcccagaaggaggcgacatcactgcctgaagcaacatccgccgcacctctgaggaccttcacagtggataccctctgcaagctcttccgcatctactcaaacttcctccgcggcaagttgactttgtacaccggcgaagcatgcaggagaggagacagg

SEQ ID NO: 11031 - DNA, 576 bp, synthetic construct
  misc_feature 1..576: note = source = /note="Description of Artificial Sequence: Synthetic coding sequence"
  source 1..576: mol_type = other DNA
atgggttcgtgtgaatgtcctgcacttttgctgctgctttctcttctcctgctgcctctggggttgccagtgcttggtgcaccgcctcgccttatatgcgattcacgagtccttgaaagatacattctcggtgcaagagaagcagaaaacgtgaccatgggatgcgcagagggatgtagtttcagcgaaaacattactgtgccggacactaaggtgaacttttacacttggaagcggatggacgttggacaacaagccgtggaagtgtggcaaggactggcgctgctttccgaagctatcctgagaggccaggcccttctggcaaattccagccaaccatcggagactcttcagcttcatgtggacaaggccgtgtcctcacttagaagcctcaccagcctgcttagggcccttggagcacagaaagaagccacgagcttgcccgaggccactagcgcagcaccccttcgaacgtttactgttgacactctgtgtaaactgtttagaatttactcgaatttcctcagaggtaagctgaccctgtacactggagaggcctgcagaaggggcgatcgg

SEQ ID NO: 11032 - DNA, 576 bp, synthetic construct
  misc_feature 1..576: note = source = /note="Description of Artificial Sequence: Synthetic coding sequence"
  source 1..576: mol_type = other DNA
atgggatcgtgtgaatgtcctgcccttctcctcttgctttccttgctgctgcttccactcggactgccagtgttgggtgcacctcctcgcctcatttgtgactcaagagtgcttgagcgttacattcttggtgcacgggaagcagaaaatgtgaccatgggctgcgcagaaggttgttcgttctccgaaaacattaccgtgcctgacaccaaggtgaacttttacacttggaaacggatggacgtgggtcaacaagccgtagaggtgtggcaggggcttgccctcctctccgaagctatccttcgcggacaagcacttctggccaactcatcccaaccttcggagactttgcaactgcacgtcgataaggcagtgtcgtcacttcgttcccttacctcactgctgagagctctcggtgcccagaaagaggcaaccagcttgcctgaagccacctcggccgcgcccctgaggacgttcaccgtcgatactctctgcaagctcttcagaatatactccaactttttgcgcggaaaactcaccctttacactggcgaagcatgtcgcaggggggacagg

SEQ ID NO: 11033 - DNA, 576 bp, synthetic construct
  misc_feature 1..576: note = source = /note="Description of Artificial Sequence: Synthetic coding sequence"
  source 1..576: mol_type = other DNA
atgggatcgtgtgaatgtccagccctcctactcctactgtctttgcttttgctgcctttggggctcccggtccttggagcaccccccagactaatttgcgattcccgtgtgcttgaaagatacatcctcggcgccagggaagcggaaaatgtgacaatgggctgcgctgaaggctgttcatttagtgagaatataaccgtgcctgatacgaaggttaatttctacacttggaaaaggatggacgtgggccagcaagcggtggaggtgtggcagggattagctctgttatccgaggcgatacttcgcggccaggccctcttagccaattcatctcagccctccgagacgctccagcttcatgttgataaggctgtgtcttcactccggtcccttacttcactcttaagagcacttggcgcccagaaggaagccacaagcttaccagaggccaccagtgccgctccactccggactttcacagtggacacactttgtaagctgttccggatctatagcaattttctccgcggtaaactgaccttgtacacaggggaggcttgcaggcggggggataga

SEQ ID NO: 11034 - DNA, 576 bp, synthetic construct
  misc_feature 1..576: note = source = /note="Description of Artificial Sequence: Synthetic coding sequence"
  source 1..576: mol_type = other DNA
atgggttcgtgtgaatgtccggcgttattattactactatcgctactattattaccgttaggtctaccggtattaggtgcgccgccgcgtttaatatgtgattcgcgtgttttagaacgttatatattaggtgcgcgtgaagcggaaaatgttacgatgggttgtgcggaaggttgttcgttttcggaaaatataacggtaccggatacgaaagttaatttttatacgtggaaacgtatggatgtaggtcaacaagcggtagaagtatggcaaggtttagcgctactatcggaagcgatactacgaggtcaagcgttactagcgaattcgtcgcaaccgtcggaaacgctacaactacatgttgataaagcggtatcgtcgttacgttcgttaacgtcgttattacgagcgttaggtgcgcaaaaagaagcgacgtcgctaccggaagcgacgtcggcggcgccgctacgaacgtttacggttgatacgctatgtaaactatttcgtatatattcgaattttttacgtggtaaactaacgctatatacgggtgaagcgtgtcgtcgtggtgatcgt

SEQ ID NO: 11035 - DNA, 576 bp, synthetic construct
  misc_feature 1..576: note = source = /note="Description of Artificial Sequence: Synthetic coding sequence"
  source 1..576: mol_type = other DNA
atgggcagctgtgagtgcccagccttgttgctgctgcttagccttttgctactgccccttggattacctgtgttgggcgccccaccccgcctgatctgcgattcacgtgtgctcgaacgatatattcttggagcgcgtgaagctgagaatgtgacaatgggatgcgctgagggctgttcctttagtgaaaacattaccgtgcctgatactaaggtaaacttctacacttggaaacgcatggatgttggacaacaggcggtggaggtatggcagggtctggccctcctgagtgaggcaatcttacgcgggcaagccctcctggctaacagcagccaaccctctgagaccctgcagcttcatgtggataaagccgtatcttccttgcggagcttgaccagcctccttcgcgcactgggcgcccaaaaggaagccactagcctgcctgaagccacctccgctgccccgttgcgcacctttacagtggataccttatgcaagctgtttaggatttattccaatttcttaaggggaaagctgacactgtataccggggaggcatgtaggcgcggcgatcgc

SEQ ID NO: 11036 - DNA, 576 bp, synthetic construct
  misc_feature 1..576: note = source = /note="Description of Artificial Sequence: Synthetic coding sequence"
  source 1..576: mol_type = other DNA
atgggttcgtgtgaatgtccggctcttctcctgctgctgtcgctgctccttctgcctcttggccttccggtcctcggcgcgccacctcggctcatttgtgactcccgcgtgttggaacgctatatcttgggtgctcgggaagccgagaacgtgaccatgggatgtgctgagggctgttcgtttagcgagaacattacggtgccagataccaaagtcaacttttacacttggaagcggatggatgtgggtcaacaagcagtggaggtgtggcagggcctcgcactgctctcggaagccattctgagggggcaagcactcttggcaaactcatcccaacccagcgaaaccctccaacttcatgtggacaaggcagtctcctccctgcgcagcctgacttcacttctgcgtgcacttggcgcacagaaagaagcaacctccctgcctgaagccacctcagcagcgccactccgcacctttacggtggatactctctgcaagctcttccggatttactcaaactttctgagaggaaagttgactctgtacactggggaagcctgtcgccgaggtgataga

SEQ ID NO: 11037 - DNA, 576 bp, synthetic construct
  misc_feature 1..576: note = source = /note="Description of Artificial Sequence: Synthetic coding sequence"
  source 1..576: mol_type = other DNA
atggggtcgtgcgaatgcccggccctcctgctcctcctgtcgttgctcctgctgccgctcggactgcctgtgttgggagcaccacctaggctcatctgtgattcgagagtcctggaaaggtacatcttgggcgcgagagaagccgagaatgtaaccatgggatgcgcggaaggatgttccttttcagagaacattactgtgcctgatacgaaggtcaatttctacacctggaagcggatggacgtgggccaacaggccgtcgaagtttggcagggactggcgcttctgtcagaagccatcctgagaggacaagccctgctggccaactcgtcccagccgagcgaaaccttgcaactgcatgtcgataaagccgtcagctcactgcgctcactgacgtcgctgctgagagcccttggcgcacaaaaggaagccacctccctcccggaagccacttccgctgctccactgcgcaccttcaccgtcgataccttgtgcaaactcttccggatctactccaacttcctgcgcggaaagttgaccctctacaccggagaggcctgccggcgtggagatcgg

SEQ ID NO: 11038 - DNA, 576 bp, synthetic construct
  misc_feature 1..576: note = source = /note="Description of Artificial Sequence: Synthetic coding sequence"
  source 1..576: mol_type = other DNA
atgggatcttgcgagtgtccagcactactcctgcttctgtccctcttgcttttgccactgggcctgcctgtcttgggcgcaccaccaaggctgatctgtgacagccgggtgttagaacggtatatcctgggagcaagagaggcagagaatgtcacaatggggtgtgccgaggggtgcagcttcagtgagaatatcactgttccagataccaaagtcaacttctatacttggaagcggatggatgttgggcaacaagctgtggaggtttggcagggcctcgccctgctcagcgaggccatcctacggggacaggcactgctagcaaactcttcccagccatctgagaccctacagcttcatgtggacaaggcagtctctagtctgcggtcgctgacttctctgctgagggcactgggcgcacagaaggaggccacatctctaccggaggccacgagcgcggccccccttaggacgtttacagtagacactttgtgcaagctctttcggatttacagcaattttctcaggggtaaactaaccctttacaccggtgaagcgtgccgcaggggagaccgg

SEQ ID NO: 11039 - DNA, 576 bp, synthetic construct
  misc_feature 1..576: note = source = /note="Description of Artificial Sequence: Synthetic coding sequence"
  source 1..576: mol_type = other DNA
atggggagctgcgagtgccccgccctcctgctgttgctgtctctgctgctgttgccactgggtctccctgtcctgggtgccccgccacgactgatctgcgatagccgggttctcgaacggtatatcctcggggcacgcgaggccgagaacgtcacaatgggctgtgccgaagggtgctcttttagcgaaaacattacagtgcctgacactaaagtgaacttctatacctggaagcgcatggatgtcgggcagcaggccgttgaagtgtggcagggtctagcgcttctatccgaagctattctccgtgggcaggccctgctggcgaattcctcacaaccctccgaaacccttcagctacatgtggataaggcagtgagctcactgcggtctctgacgtctctactgagggccctgggggcccagaaggaggcaacatctctcccggaagcaacttctgcggctccccttaggacttttaccgtggacaccctctgcaaactttttaggatctattcgaacttcctccgcggtaaattgacattatacactggcgaggcgtgtcgtaggggagaccgt

SEQ ID NO: 11040 - DNA, 576 bp, synthetic construct
  misc_feature 1..576: note = source = /note="Description of Artificial Sequence: Synthetic coding sequence"
  source 1..576: mol_type = other DNA
atgggttcatgcgagtgccccgcacttctgcttctcctgtcactgctcctgctcccacttggactcccagtgctcggggcaccacctagactgatatgtgacagcagagtccttgaacgttacattctcggcgccagagaagctgagaatgtgactatggggtgcgctgaaggatgtagcttttccgagaacataacggtgcctgacaccaaggtgaacttttacacctggaagagaatggatgtcggtcagcaggcagtggaagtttggcagggactcgcccttctttcggaagcaattcttcgtggtcaagcgctgttggcaaattcctcacagccttcggaaacccttcaactgcacgtggacaaggctgtctcttcgcttcggagcctgacctccctcctccgagcacttggtgcacagaaggaagcaacgagcctgccggaggcaacctcggcagcaccgctgcgcacctttactgtcgatacgctgtgcaaattgtttcgcatttactcaaactttcttcgcggcaagctgactctttacactggagaagcatgtcgtcgaggcgatcgc

SEQ ID NO: 11041 - DNA, 576 bp, synthetic construct
  misc_feature 1..576: note = source = /note="Description of Artificial Sequence: Synthetic coding sequence"
  source 1..576: mol_type = other DNA
atgggatcttgtgaatgtccagcattgttactcctattgtctttgctattacttccacttggattaccagttttaggagcaccaccacgattaatttgtgactcaagagttcttgaaagatatatattaggagcacgtgaagcagaaaatgtaactatgggatgtgcagaaggttgttcattctctgaaaatattacagttcctgatacaaaggtcaatttctatacatggaaaagaatggatgtaggacaacaagctgtagaagtatggcaaggacttgctcttttatcagaggctattttaagaggacaagcattacttgcaaattcttctcaaccaagtgaaacattacagttacatgttgacaaagcagtttcttcattaagaagtcttacttctcttcttagagctttaggagcccaaaaagaagccacatcattaccagaagctacatcagctgctcctctccgaacttttactgtcgatactctttgtaaattattcagaatttattctaattttttaagaggaaagttaacactttatacaggagaagcttgtagaagaggagataga

SEQ ID NO: 11042 - DNA, 576 bp, synthetic construct
  misc_feature 1..576: note = source = /note="Description of Artificial Sequence: Synthetic coding sequence"
  source 1..576: mol_type = other DNA
atggggtcatgtgaatgcccagcactactcttactcttaagcctgttattgctacctttaggacttccggtattaggcgcccctccccgtctaatatgtgacagccgcgtcctggagcggtacatactgggtgcccgagaagccgagaatgtaaccatgggctgcgctgagggttgcagcttttcagagaacatcactgtaccggataccaaggtgaatttttacacctggaaaagaatggacgtaggccagcaagccgtggaagtatggcagggcttagcactgctctctgaggccattctgcggggccaagctctgctggccaactctagccagcctagcgaaacgctgcagctccatgtcgacaaagctgtctcctcccttaggtcacttacaagtctgctgagggcgctgggggcccagaaagaagcgacttctctgccagaggccacatcagcagctcccctccggactttcactgtggacaccctttgcaaattgtttcgcatttactctaacttcctgagaggcaagcttactctgtacaccggagaagcctgcagacggggagacagg

SEQ ID NO: 11043 - DNA, 576 bp, synthetic construct
  misc_feature 1..576: note = source = /note="Description of Artificial Sequence: Synthetic coding sequence"
  source 1..576: mol_type = other DNA
atgggttcctgtgaatgtccagctctgctcctgctgctcagtctgcttctgctgcctctggggctgcccgtgctcggtgcgccgccaagattgatctgcgatagccgtgtcctcgagcgctacattctcggcgcccgggaggcagaaaacgtgacgatgggatgcgctgaagggtgctcgttttccgaaaacatcactgttcctgacacgaaggtgaacttctatacctggaagaggatggatgtcgggcaacaagcggtggaggtgtggcagggacttgcgctgctgtccgaagccattcttagaggtcaagcactgttggccaactcgtcacagcctagcgaaacccttcagctgcatgttgataaagcagtgtcatctcttagaagtcttacttccttgttgcgagccctgggagcacaaaaagaagcaaccagcctcccagaggcaacctccgccgcaccgcttcgaacctttactgtcgataccctttgtaagctcttcaggatatacagcaattttctgaggggtaagttgactctttatactggagaagcctgtagacgcggcgaccgc

SEQ ID NO: 11044 - DNA, 576 bp, synthetic construct
  misc_feature 1..576: note = source = /note="Description of Artificial Sequence: Synthetic coding sequence"
  source 1..576: mol_type = other DNA
atgggatcgtgtgagtgcccggccctgctgctgctcttgtctctcctcctcctcccactgggactgccggtcctgggcgcaccgccaagactcatctgcgactcacgggttctcgaacggtacatcctcggcgccagagaagcggagaacgtcactatgggatgcgcagaaggatgttcgttctccgagaatatcaccgtcccggataccaaggtcaatttctatacttggaaaaggatggacgtcggccagcaagcggtggaagtgtggcagggtctggccctgctttcggaagctatcctgcgcggacaggcactgctggccaattcgtcccagccgtccgaaaccctgcagctgcacgtcgacaaggccgtctcatcgttgcggtccctcacttccctccttcgggcgttgggagcacagaaagaagcgaccagcctgcctgaggccacctccgcagccccgctcagaactttcactgtggatactctgtgcaagctgttcagaatctactcaaatttccttcgcggaaagctgaccctgtacaccggcgaggcgtgccgcagaggagatcgc

SEQ ID NO: 11045 - DNA, 576 bp, synthetic construct
  misc_feature 1..576: note = source = /note="Description of Artificial Sequence: Synthetic coding sequence"
  source 1..576: mol_type = other DNA
atgggatcctgcgaatgtccggccctgctgctgctgctttccctcctgctgttgccgcttggacttccagtgctgggagcgccgccgcggctgatctgtgattcccgggtcctcgagcgctacatcctcggagcaagagaggcagaaaacgtcaccatggggtgcgctgaaggatgctcgttttcagaaaacatcactgtgccagatactaaggtgaatttctacacttggaagcgcatggacgtgggccagcaagcggtggaagtgtggcaggggctggcgttgctgtcggaagccatcctgcgaggacaggccctcctcgcgaacagcagccaaccgtcggagactctgcagcttcacgtcgacaaagccgtttcaagcctccggtccctgactagcctgctccgcgcccttggagcacaaaaggaagccacctccctccccgaagcaacttccgccgcgcctctgagaacctttaccgtggacaccctctgcaaactgttccggatctactcaaactttctgaggggaaagctcactctttacactggggaagcatgccgcaggggggacaga

SEQ ID NO: 11046 - DNA, 576 bp, synthetic construct
  misc_feature 1..576: note = source = /note="Description of Artificial Sequence: Synthetic coding sequence"
  source 1..576: mol_type = other DNA
atgggaagctgtgaatgtccggctcttctcctgctgctgtcactgctgctcctccccctgggactgcccgttcttggagccccgccacgcctcatctgcgacagccgcgtcctggagcgctacattcttggggcacgggaagccgagaacgtcactatggggtgcgctgaaggatgctccttcagcgagaatatcaccgtgccggatactaaagtcaatttctacacgtggaagcggatggacgtgggccaacaggccgtggaagtgtggcagggcctggcactcctgtcggaagccatcttgcgcgggcaggcgctcttggccaactcttcgcaaccaagcgagactctgcagttgcacgtggataaggcggtgagctccctccgctccctgactagcctccttcgcgcccttggagcacaaaaagaagctacctccctcccggaggccacgtccgcagctccgctgagaactttcaccgtggacacgctgtgtaagctgttccggatctactccaacttccttcggggaaagctgacgctgtacactggtgaagcgtgcagaaggggtgacaga

SEQ ID NO: 11047 - DNA, 576 bp, synthetic construct
  misc_feature 1..576: note = source = /note="Description of Artificial Sequence: Synthetic coding sequence"
  source 1..576: mol_type = other DNA
atgggaagctgtgagtgtcctgcacttctccttctgctgtcccttctccttctcccacttggccttcctgtgttgggggctcctccacgtctgatttgtgactcgagagtcctcgaacgctacattctcggtgcacgcgaggccgaaaatgtgactatgggatgcgcagaagggtgtagcttttccgaaaacattaccgtgccagataccaaggtgaacttttacacctggaaaagaatggacgtgggacaacaagctgtggaggtgtggcagggtctggcattgcttagcgaagcaatcctgagaggtcaagcactgcttgcgaattcgtcgcagccgtcggaaactctgcagcttcatgtggataaggcggtgtcgtcgctgcgaagcctcacctcactgctgagggccctcggagcacagaaagaagcgacctcgctgccagaagcgaccagcgcagccccgctgcgcaccttcactgtggatactctttgcaaactctttcgaatctacagcaactttctgagaggaaaactgaccctttacaccggggaagcctgtcggcgcggagataga

SEQ ID NO: 11048 - DNA, 576 bp, synthetic construct
  misc_feature 1..576: note = source = /note="Description of Artificial Sequence: Synthetic coding sequence"
  source 1..576: mol_type = other DNA
atggggtcgtgcgagtgtcctgcgctcttgcttctcctgtcactgctcctgctgccactgggactccctgtgcttggagcaccacctagactcatatgtgattctcgggtgctggaacggtatattctgggagctagagaggcagaaaacgttactatgggatgcgcagagggttgttcattctcggagaacattacggtgcccgataccaaggtgaatttctatacgtggaagaggatggatgtgggtcagcaggcagttgaggtgtggcaaggcctggcactgctgtccgaggcaatacttcgaggtcaagcgcttcttgccaactcatcccaacccagcgaaaccttgcaactgcatgtcgataaggcagtcagctcgctccgtagcctgacttcgctgctgcgggctctgggcgcacagaaggaggcaactagcctgcccgaggcaacctcggcagcaccactccgcacttttactgtggatacgctttgcaaattgtttagaatctactccaatttcctgagaggtaagctgaccctttacactggagaagcatgtcggcgaggcgacaga

SEQ ID NO: 11049 - DNA, 576 bp, synthetic construct
  misc_feature 1..576: note = source = /note="Description of Artificial Sequence: Synthetic coding sequence"
  source 1..576: mol_type = other DNA
atgggatcatgtgaatgcccagcgctgctgcttctcctgtcactactgcttctgcctctcggtctccccgttctcggcgcaccacctaggttgatctgtgacagcagagtgctcgagaggtatatcctaggcgcgagggaggcagagaatgtgactatgggatgtgcggaaggttgctctttcagcgagaacattacagtccccgacactaaggtgaatttctatacctggaaacggatggatgtcggccaacaagcagtggaagtgtggcaaggcctcgccttgctatccgaggccatcttgagggggcaggctctgttagctaatagctcgcagcccagtgagactcttcaactccacgttgataaagccgtttcctccttgagatcgctgaccagtctcctcagagccctcggtgcccagaaggaggcaacctctttaccggaggccactagcgctgcgcccctgcgaacattcaccgtggacaccctgtgcaaactcttccgaatttactccaactttctgcgtggcaagctgaccctgtacactggggaagcatgtcgccgcggtgatagg

SEQ ID NO: 11050 - DNA, 576 bp, synthetic construct
  misc_feature 1..576: note = source = /note="Description of Artificial Sequence: Synthetic coding sequence"
  source 1..576: mol_type = other DNA
atgggctcctgtgaatgccccgccctgctgttgctgctttctcttttgctcctcccactgggccttcctgtcctcggtgctcctcctcgcctgatctgtgatagccgcgtactggaacgttacattctcggagcccgcgaggccgagaacgtgaccatgggctgcgcagaaggttgctccttctcagaaaacataaccgtccctgatactaaagttaacttttatacatggaaaaggatggatgtcggccagcaagctgtcgaagtgtggcagggccttgctctgctttccgaggcaattctccgcggccaggctcttctggctaactccagccagccatcagagacccttcagttgcacgttgataaagccgtgagctccttgcgctctttgacctctctgctgagagctttgggtgcccaaaaggaagctacttctctgcctgaggctacttcagctgctccactccgtacattcactgttgatacactgtgtaagcttttcaggatctatagcaatttcctgcgcggtaagctgaccctttacaccggtgaagcatgccgtcgtggagataga

SEQ ID NO: 11051 - DNA, 576 bp, synthetic construct
  misc_feature 1..576: note = source = /note="Description of Artificial Sequence: Synthetic coding sequence"
  source 1..576: mol_type = other DNA
atgggaagctgtgaatgtcctgcacttcttcttctgctgtcgctgcttcttctgcctcttggacttcctgtgcttggtgcgcccccgagactgatatgtgattcgagagtgctcgagcgatacattctcggcgcacgggaagcagaaaacgtgactatgggctgtgccgagggttgctccttctccgagaatatcaccgtgcctgatacgaaagtcaacttttacacgtggaaaaggatggatgtggggcagcaagcagtggaggtctggcagggtctggctttgctgtctgaagcaattctgcgcggacaagcgctcctcgcaaattcgagccagccgtcagaaaccctgcaacttcatgtcgacaaggctgtctcctctcttcgcagccttactagcctgttgcgggccctcggagcacaaaaggaagcgacgtccctgccagaggccacctctgcagccccactgagaacctttactgtggatactctctgcaagctgtttcggatctactccaacttcttgcgcggtaagctcaccttgtatacgggggaagcatgtcgccggggagacaga

SEQ ID NO: 11052 - DNA, 2598 bp, synthetic construct
  misc_feature 1..2598: note = source = /note="Description of Artificial Sequence: Synthetic coding sequence"
  source 1..2598: mol_type = other DNA
atgtttagcatgagaattgtgtgtttggtcctgtccgtggttggtacggcatggacggcagattcaggcgaaggcgattttcttgcagagggaggcggagtccggggcccaagagtggtggaacgacatcaaagcgcatgtaaagattcggactggcctttctgctcggatgaagattggaactacaaatgtccatccggttgtagaatgaagggtttgattgatgaggtgaaccaagatttcactaaccgtatcaataaactgaagaattcattgtttgaataccaaaagaacaataaggatagccactcattgactactaacataatggaaattctgcgaggtgatttttcaagtgccaacaaccgggacaatacttacaatcgagtgagcgaggacctgcgatcccgtattgaagtcttgaaacgcaaagtcattgaaaaggtgcaacatatccagctccttcagaaaaatgttagggcgcaacttgtcgatatgaagcggcttgaggtcgatattgacataaagatcagatcgtgccggggatcctgttctcgcgctcttgcgcgggaggtcgatcttaaggattacgaggaccagcaaaagcaattggagcaggtcatcgccaaggatctgcttccatccagagatcgccaacatctgcctttgataaagatgaagcccgtgccagacctggtgcccggcaactttaagtcacagttgcaaaaggtccctcctgaatggaaagccctgactgatatgccacagatgcgcatggagctggaacgccccggcggcaacgaaattacccgtgggggctccacctcgtacggcactggatcggaaaccgaaagccctaggaacccctcgtcggccggttcctggaacagcggttcgagcggtcctggatccaccggaaatagaaacccagggagctccggaactggaggtactgcgacttggaaacctggtagctcgggaccgggatcgactggctcctggaactccggttcgtccggaacgggaagcaccggcaatcaaaatcctggttcgccacgccctgggagcaccggaacttggaacccaggatcgtccgagcggggttccgcaggacattggacttcagagagctccgtttcgggttccaccggacaatggcactccgaaagcggatcattccgtccagattctcctggttcgggaaacgctcgtcctaacaacccggactggggtaccttcgaggaggtgtcgggtaacgtgagcccaggtaccaggagagaataccatactgaaaagctggtgacgtcgaagggggataaggaacttcgcaccggtaaggagaaggtcacctccggctcgactacgacgaccagaagatcctgttccaagacggtgacgaaaactgtgatagggccagatggacataaagaagtgaccaaagaagttgtgacctctgaagatggaagcgattgtccggaggcgatggatctgggaactctctcaggcataggtaccctcgatggctttcgccacagacatccagatgaggcagccttctttgacaccgcgtccactggcaaaacttttccaggcttcttttctcccatgcttggagagtttgtctccgaaaccgagagcagaggctcggagtccggtatattcaccaacaccaaggaaagctcctcccatcatcctggtatcgcagaattcccttcgcgtggcaagtcctcatcatactcgaagcaatttacttcctcaacgtcctacaaccgtggagactccacctttgaaagcaaaagctacaagatggccgatgaggcaggctcggaagcggaccatgaaggtacccattcaaccaagcggggccatgccaagtcaagacctgtgagagactgcgacgatgtgctgcagacccatccttcaggaactcaatccggcatattcaatatcaagctccctggttcatcaaagattttctcagtttattgtgaccaggaaaccagccttggggggtggcttcttattcagcagcgaatggacggctccctcaactttaacaggacctggcaggattacaagcgggggtttggaagcctgaacgatgagggcgagggcgagttttggctgggtaacgactacctgcatctgcttacccaaaggggatcagtgctgagagtcgaacttgaggattgggcaggtaacgaggcttatgcagagtaccatttcagagtgggatcggaagcagaagggtacgcactgcaggtgtccagctacgaagggacggcgggagacgcacttattgaaggatcggtggaggaaggggccgaatacaccagccacaacaacatgcagttttcgacttttgatagagacgctgatcaatgggaagaaaattgcgctgaagtgtacggcgggggttggtggtacaacaattgtcaggccgctaacctgaacggaatctactaccccgggggatcctacgaccctaggaacaattcaccttacgaaatcgagaacggtgttgtgtgggtgtcatttcgaggggcagactacagcctgcgggcagttagaatgaaaatccggccacttgtgacgcaa

SEQ ID NO: 11053 - DNA, 2598 bp, synthetic construct
  misc_feature 1..2598: note = source = /note="Description of Artificial Sequence: Synthetic coding sequence"
  source 1..2598: mol_type = other DNA
atgttttctatgcgtattgtgtgtcttgtgctttcggtcgttggtacggcttggaccgcagattccggcgagggggatttcctcgcagagggcgggggcgtgcgaggaccgagagtagtggaacggcatcagtcagcatgcaaggattccgactggccgttttgtagcgatgaggattggaactacaagtgcccctctggttgtcgcatgaaaggacttatagatgaagtcaatcaggactttacgaatcgaatcaataagctgaagaattccctttttgaataccaaaagaacaataaggactcccacagccttaccaccaatatcatggagattctgcgtggcgatttctcatcagcaaataacagagataacacctacaaccgggtgtccgaagatctgagatcacggatcgaagtgctgaagcggaaggtcattgagaaggtccagcacatccaacttcttcagaagaacgtcagagctcagctggtggatatgaagcgacttgaagtggacatcgatatcaagatccgttcctgtagaggatcatgctcacgagcactggcccgagaggtggatctcaaggactacgaagatcagcaaaagcagcttgaacaggtgattgccaaggacctcctcccctcgcgcgacagacaacatcttccattgatcaagatgaagcccgtgccagatcttgtgccaggcaactttaagtcgcagcttcagaaagtgcctccagaatggaaggcacttactgatatgccccaaatgagaatggaactggaacggcccggaggaaatgagattacccgcggcggttcgaccagctacggtaccggttccgaaaccgagtcgccgcgaaaccctagctcggcgggctcttggaacagcgggagctccggcccaggttcgaccgggaatagaaaccccggctcatccggaactggcgggacggcaacttggaagcctggcagctctggtcccggatctactggtagttggaacagtggatcaagcggaactggaagcacgggcaaccagaaccctggatcccctaggcctggatccaccggaacctggaacccaggatcctcagaaagaggatcagccggacactggacctcagagtcgtccgtgagcggatcgactggacagtggcatagcgaaagcggttccttccggccggactcaccaggatccggaaacgcaagaccaaacaacccagactggggtacgtttgaggaagtgagcggaaacgtcagccctggtactagaagggaataccacactgagaaactcgtcacctctaaaggtgacaaagagcttcggactggtaaagaaaaagttacctcgggttccacgactacgactagaaggagctgctcgaaaactgtcactaaaaccgtgattggaccagatggccataaagaagtgaccaaggaagtggtgactagcgaggatggtagcgactgtcctgaagccatggatctcgggaccctttcgggcataggtactctggatggattccggcatcgtcatccagacgaggccgcgttctttgacaccgcaagcactggtaagacgtttccagggttcttctccccaatgctgggggagtttgtgtcagaaaccgaatcgaggggatcggaatccgggatattcaccaatactaaggaatcgagctcccaccaccctggaattgcagaatttccgtcacggggaaaatcgtcgtcatactccaagcagttcacttcctccaccagctataaccggggagattcgacttttgagtccaagagctacaaaatggcagacgaagcagggtccgaagccgaccacgaaggtactcattcgactaagcggggtcacgcgaaaagccggccagtgagagattgtgatgatgtgcttcagactcacccgtccggtactcagtcagggattttcaacataaagctgcctggaagctccaagatctttagcgtgtactgcgatcaagaaactagcctgggtgggtggctgctcatccaacaaaggatggatggttcgttgaacttcaatcgcacttggcaggattacaagcgagggttcggttccctcaacgatgaaggagaaggcgaattctggctgggcaacgactacctccatctcctcacccagcggggttcagtgcttcgggtggaattggaggactgggcaggtaatgaggcatacgcggagtaccattttcgtgtcggaagcgaagccgagggctacgcacttcaggtgtcatcgtacgaaggcaccgcaggtgatgctttgatagaaggttcggtggaagagggagctgaatacacttcgcataacaacatgcagttttccacgtttgatcgcgacgcagatcaatgggaagaaaactgcgccgaagtgtacggagggggttggtggtacaacaactgtcaggcggctaacctcaacgggatatactatcccggtggatcgtacgaccctcgcaacaattcgccgtacgaaatcgaaaatggggtggtctgggtttcctttaggggcgcggattactcactccgggcagtgaggatgaagattagaccgctggtgactcaa

SEQ ID NO: 11054 - DNA, 2598 bp, synthetic construct
  misc_feature 1..2598: note = source = /note="Description of Artificial Sequence: Synthetic coding sequence"
  source 1..2598: mol_type = other DNA
atgttcagcatgcgaatcgtctgcctggtgttgtcggttgtgggcaccgcctggacggccgattcgggagaaggcgacttcctcgccgagggaggaggagtgcgcggaccacgggtagtggagagacaccagagcgcctgcaaggactccgactggcctttttgttcagatgaggactggaattacaaatgtccgtccggctgccgaatgaaaggcctgatcgacgaggtgaaccaggatttcactaaccggatcaacaaactgaagaactcgctcttcgagtaccagaagaacaataaggacagccatagcctgacgactaatatcatggaaatcctgagaggtgacttttccagcgcgaacaatcgggataatacctacaatcgcgtcagcgaagatctccggtcacggatcgaggtactgaaacgcaaggtcatagaaaaagtacagcatatccagctcctgcagaagaatgtccgcgcccaactcgttgacatgaaaagactcgaagtcgatattgacattaagattaggtcatgtcgcggttcatgctcacgcgccctcgcaagggaagtggacctgaaagattacgaggatcaacagaaacagctggagcaagtgatcgcgaaggacctgcttccgtcgcgtgaccgccagcacctgccccttatcaaaatgaagccggtcccggatctcgtgccgggcaactttaagtcgcagctgcagaaggtgcctcctgagtggaaggccctcacggacatgccacagatgcgtatggaactggagaggccaggtggtaacgagatcacccgcgggggaagcaccagctacggtaccggatccgagactgagtcgccacgcaacccttcatctgctggatcgtggaacagtgggagctccggtccagggtcgactggcaaccgcaatccggggtccagcggcactggcggcaccgcaacctggaagccaggctcatcagggcccggctcgaccgggtcgtggaattctggatcatccggaactggctcgaccggaaaccaaaatccgggaagcccgcgccctggatcaactggaacttggaacccggggagcagcgagcgcggctcagcgggacactggacctcggaatcctcagtgtcaggctcgacgggacaatggcactctgaatccggatcgttcagaccggactcacccggctccggaaacgctcggcctaacaacccggactggggcacctttgaggaagtgtccgggaacgtgtcacccggaacccgcagagagtaccatacggagaagctggtcacttcaaagggagataaagaattgcgcactggaaaggaaaaagtcacttcgggctcgactaccactactagacggagctgctccaagacggtcaccaagactgtgatcggaccggatggtcacaaagaagtcactaaagaagtcgtgacctccgaggatgggtcagactgcccggaagcgatggacctgggaactctgagcggtatcggcaccctcgatggcttcagacatcgccaccccgatgaggcagcgtttttcgacacggcaagcaccggaaaaacctttccaggttttttctcaccgatgcttggagagttcgtgtccgaaactgaatcacgcgggtcagaatcgggcatcttcaccaacacgaaagaatcgtcctcccaccatccagggatagccgagttcccgtcacgcggcaagagcagctcatattcgaagcagttcacctcatctacttcctataaccggggggatagcactttcgagtcgaagtcgtacaagatggcagacgaagctggctccgaagctgaccatgaggggacgcactctacgaaacgcggtcatgcgaagtccagaccggtgcgcgattgcgacgacgtgctgcagacccacccaagcggaacccaatcaggcatcttcaatatcaagctcccagggagctcgaagatctttagcgtctactgcgatcaggaaacctcgctcggtggctggctgttgatccagcaacggatggacggctccctgaacttcaatcgcacctggcaggactacaagcggggattcggatccctgaatgatgaaggcgaaggggagttctggcttggaaatgactatcttcacctgctgacccagagaggctccgtgttgagagtcgaactggaggactgggcgggaaatgaggcttacgctgaataccacttccgcgtgggttccgaggcagaaggatacgcccttcaagtctccagctacgaaggcaccgccggagacgcgcttatcgagggttcggtggaagagggcgcagaatataccagccacaataacatgcagttttcgactttcgacagagacgcagaccaatgggaagaaaactgtgcggaagtgtacggaggaggctggtggtacaacaactgtcaagccgccaacctgaacggaatctattacccagggggatcctacgacccgcgcaacaacagcccgtacgagattgaaaatggtgtggtgtgggtgtccttccgaggggccgattactcgctccgcgccgtcagaatgaagatccggcctctggtgactcaa

SEQ ID NO: 11055 - DNA, 2598 bp, synthetic construct
  misc_feature 1..2598: note = source = /note="Description of Artificial Sequence: Synthetic coding sequence"
  source 1..2598: mol_type = other DNA
atgtttagcatgcgcatcgtgtgcttggtgctgagcgtcgtgggaaccgcctggacggccgactccggtgaaggagacttcttggccgagggcggaggagtccggggaccccgtgtggtggaaaggcatcagagtgcgtgcaaggactccgactggccattctgttccgacgaggactggaactacaaatgtcctagtggctgccggatgaaagggctgatcgacgaagtgaaccaagatttcactaaccgcatcaacaaattgaagaattcgctgttcgagtaccaaaagaacaataaagattcgcactcgctgactaccaacatcatggaaatcctgcgcggtgacttctctagcgcaaacaaccgcgacaatacctacaatcgtgtgtcagaggatctgcgcagcagaattgaagtcctgaagagaaaggtgatcgaaaaggtccagcacatccagctgcttcaaaagaacgttcgagctcaactggtcgatatgaagaggctggaggtggacatcgacatcaagatccgctcgtgcagaggatcctgctcacgcgccttggccagagaagtcgacctcaaggattacgaagatcagcaaaagcagctggagcaagtcatcgctaaggatctccttccatcgcgggacagacagcatctcccgctgattaagatgaaacccgtgcctgacctggtcccggggaactttaagtcccaactgcagaaagtgccaccggagtggaaagccctgaccgacatgccacagatgcgtatggaacttgagcgcccgggaggaaatgagatcaccagagggggtagtactagctacggaaccgggagcgaaactgaatcgcctcgaaacccgtcgtccgcaggctcgtggaactctggttcctccggaccaggatccaccggaaaccgaaaccctggatcatcggggacgggaggaaccgcgacctggaagccgggctcgagcggtccgggtagcactggaagctggaattccggttcgtcaggaaccggctcgaccggaaaccagaatcctggttctccccgcccgggctcaaccggcacttggaatccgggatcgtctgaacgcggaagcgcggggcattggactagcgagtcctccgtgtcaggaagcaccggacagtggcattcggaatccgggtccttccggccagattcgccgggctcaggcaatgctagacctaacaacccggattggggcacctttgaggaggtatcgggaaatgtaagccctggaacgcggagggagtaccacaccgaaaagctcgtcacctcgaagggtgataaggaactgcgcactggaaaggaaaaggttacgtccggaagcactaccacgacccgtagatcctgctcgaaaactgtgactaaaaccgtgataggcccagatggacataaggaagtgaccaaagaggtggtcactagcgaggacggttcggactgcccggaggcgatggatctgggcaccctttccgggatcggaaccctggacggctttcggcataggcacccagatgaagcggcatttttcgacaccgccagcactggcaagaccttccccggcttcttctcaccgatgctgggcgaattcgtctccgagactgaaagccgcggatcggagagcggaattttcactaatactaaggaatcatccagccatcatccgggcatcgcggagttcccgtcaagggggaaatcctcgtcatactccaagcaatttacctcatcgacgtcatacaacagaggcgactcaacgttcgagtcgaagtcttacaagatggcagacgaagctggatcagaggcagatcacgaaggcactcacagtactaagcgaggacacgcaaagagcagacctgttagagattgcgacgacgtgctccaaacgcacccgtcgggcacccagtcaggaatcttcaacattaaactccccggctcctccaaaatcttcagcgtttactgcgaccaagaaacttcgcttggtggatggctcctcatccagcagcgcatggatggatcacttaacttcaaccgcacctggcaggactataagcgcggatttgggtcactgaatgatgaaggggaaggagaattctggctcggaaatgactatctccacttgctcacgcagcgcgggtcagtgctgcgagtcgaactcgaagattgggccgggaacgaggcctacgcggaataccactttagggtgggatcagaagctgaggggtacgccctccaggtgtcatcatacgaggggaccgcgggagatgcactgattgaggggtccgtggaggaaggagccgaatacacttcgcacaataacatgcaattctcgactttcgatcgggacgctgaccagtgggaagagaactgtgccgaggtgtacggaggcgggtggtggtacaacaattgtcaggcggccaacctgaacggaatctattacccaggaggatcctacgacccacgcaacaattctccgtacgaaatcgaaaacggcgtggtgtgggtatctttcagaggcgctgattactcgttgcgcgcagtgcggatgaagatccggccactggtcactcaa

SEQ ID NO: 11056 - DNA, 2598 bp, synthetic construct
  misc_feature 1..2598: note = source = /note="Description of Artificial Sequence: Synthetic coding sequence"
  source 1..2598: mol_type = other DNA
atgttttccatgagaattgtctgcctggtcctctcagttgtgggcaccgcctggactgccgacagcggggaaggagacttcttagccgaaggagggggggtaaggggcccccgggtagtagagaggcaccagagcgcctgcaaggatagtgactggccgttctgttcagatgaggattggaattacaaatgcccttccgggtgtcggatgaaaggccttatagatgaggtgaaccaagatttcaccaatcgaatcaacaagttaaagaactccctcttcgaataccagaaaaacaacaaggacagccacagtctgaccacgaatatcatggagatacttcgcggagatttttcttcggctaataatcgcgataatacatataaccgggtgagtgaagacctacgcagcagaatcgaggtgctcaagaggaaggtgatagagaaggtccagcatattcagctgctccagaaaaacgtgagagctcagctagtagatatgaagcgtctggaggtggacatcgacatcaagattaggtcatgtcgagggagctgctcccgagctttagcacgggaagtagatctaaaggactatgaggatcagcagaagcagcttgagcaagttatcgccaaagacttgttgcccagccgggatcggcagcatcttccactgatcaagatgaagccagttcctgatctagtgccaggaaactttaagagccaactgcagaaggtgccaccggagtggaaggccttaactgatatgcctcagatgaggatggaactggagagacctgggggaaacgagatcacccgtggagggtctaccagctacggaacagggtccgaaaccgagtcccctcggaaccctagctccgccgggtcatggaatagcggcagtagtggtcccgggtccacagggaacagaaaccctggctcttcaggcaccggtggcactgcaacttggaaacccggatcttccggcccaggcagcacgggcagctggaactctggaagttctgggacaggatctacaggcaatcagaatcctgggtccccacgtccaggcagcacaggtacttggaacccagggtctagcgaaagggggagtgcgggtcattggacaagcgagtcaagtgtgagcggtagtaccgggcagtggcactctgaaagcggctcttttcggcccgacagtccaggctctggtaacgctcgtccaaataaccccgactggggcacgtttgaggaggtgtctggaaacgtgagccctgggacaaggagggagtatcacacggaaaagctggtcacaagcaaaggggataaggaactgcgtaccggtaaagagaaagttacctccggctcaactacgaccacccggcgcagctgctctaaaacggtgacgaagacggtaattggacccgatggtcacaaagaagttacaaaggaagtggtgacatccgaggacgggagcgattgtcccgaggcaatggacttggggaccttgtccggcattggaactctggatggctttcgccacaggcatccagacgaggctgctttctttgataccgcatccacgggtaaaacatttcctggtttcttcagccctatgttgggcgagttcgtgagcgaaactgaaagccggggtagcgaaagcggtatcttcactaatacaaaagagagttcaagccaccatcccggtattgcagagtttccatccaggggcaagtcttccagctacagtaaacagtttactagcagcacttcatataatcggggggattcaacctttgaatcgaaatcctacaaaatggctgatgaggccgggagtgaggccgatcatgaaggcactcattctacaaagagggggcacgccaaaagtcgccctgtgagggattgtgatgatgtgctgcaaacccaccccagtggcacccagagcggcatttttaatatcaagctgccaggaagttcgaagattttcagtgtctattgcgaccaggagacgagtcttgggggctggctgctgatacagcagcgtatggatggtagccttaacttcaaccgcacatggcaggactacaaaagaggttttgggtccctgaatgatgagggcgagggagaattttggctggggaatgattatctgcatcttcttacgcagcgcggatccgtattgagggtcgaactggaggactgggccgggaatgaggcttacgcagagtatcactttcgcgtgggcagtgaggccgagggctacgcccttcaggtatcttcctacgaaggaaccgccggagacgccctgatagagggctccgtggaagagggcgccgagtacacaagtcacaacaatatgcagttttccacttttgatcgagacgcggaccagtgggaagaaaattgcgccgaagtctatggcggaggttggtggtataataactgccaggccgctaatctcaatgggatttactaccccgggggctcctatgatccccggaacaatagtccctatgagattgaaaacggagtggtctgggtgtcctttagaggcgcagactattccctgcgcgctgtaaggatgaagatccgccctcttgtaactcag

SEQ ID NO: 11057 - DNA, 2598 bp, synthetic construct
  misc_feature 1..2598: note = source = /note="Description of Artificial Sequence: Synthetic coding sequence"
  source 1..2598: mol_type = other DNA
atgttctcaatgaggatcgtctgtcttgttctgagcgtggtcggcaccgcctggaccgccgattcgggtgagggggactttcttgcagaaggtggaggcgtgagaggcccgcgggtcgtggagcgccaccaaagcgcatgtaaagattcggattggccattttgttcagacgaggactggaattacaagtgtccgtcaggctgccggatgaaaggacttattgacgaggtgaaccaagatttcaccaacaggatcaacaaacttaagaactcactctttgagtaccagaagaataacaaggattcgcactcgctcacgaccaacataatggagattcttcgcggtgacttttcatcggcaaacaaccgggacaatacctacaaccgtgtgtcggaggacctccgctcccgcattgaggtgctgaagagaaaggtcatcgaaaaagtgcagcatattcagctgttgcagaagaacgtccgggcacagttggtggatatgaagagactggaagtcgatattgacataaagataagatcgtgtcgcggatcttgctcgagggcacttgcaagggaagttgatctgaaggattacgaggatcagcagaagcaactcgaacaagtgattgcgaaagaccttcttccctcaagagatcgacagcatctgcctcttatcaagatgaaacccgtgccggatctcgtgcccggaaactttaagtcgcaactgcaaaaggttcctccagaatggaaggcactgaccgatatgccccaaatgcgcatggaactcgaaagaccagggggaaacgaaattacccggggtgggtccacttcctacggcaccgggagcgaaacggaatcccctagaaatccctcgtccgccggttcttggaactccggtagctcgggcccaggttcgacgggcaatagaaaccccgggtcgtccggaaccggtgggactgcaacttggaagccaggaagcagcggtcccggatcaaccggcagctggaacagcggttcctctggaaccggttctactggaaaccaaaaccccggttcaccaagaccgggcagcactgggacctggaatcccggatcgtcggaacgcgggtcggcaggccactggacttccgaatcctccgtgtcgggatcaaccggtcagtggcattcggaatcaggttcgtttcggcctgatagcccgggctcgggtaatgcaagaccaaacaaccctgattggggtacctttgaagaagtgtcaggaaatgtgtcgccaggaacccgacgggaataccacactgagaaacttgtgactagcaaaggggataaggaattgcgcaccggaaaggaaaaggtgacttccggatcgaccaccactactcgtcgctcctgctcaaagactgtgactaagaccgtgattggacccgatgggcacaaggaagtgactaaagaggtggtcacgagcgaggacggatcggattgccctgaggcgatggacctcggcaccctctccggaatcggtaccctcgatggatttcggcatagacatccagacgaggctgcgtttttcgataccgcatcgaccggaaagacgtttcctggcttcttttctccaatgctgggagaatttgtcagcgaaactgagagcagaggatcagaatctgggatattcaccaataccaaggaatcttcatcccatcatccaggaatcgcagaattcccttcccggggtaaatcgagctcgtactcgaaacaatttactagctcgaccagctacaataggggagactcgacctttgaatccaaatcttacaagatggcggatgaggcaggaagcgaggccgaccatgaggggacccacagcaccaaacgaggccatgctaagtcacgcccagtgcgcgattgtgacgatgtgctgcaaacccatccttcggggactcagtcaggtattttcaacataaagctgcccggttcctcaaagatctttagcgtctactgtgatcaggagactagcttgggagggtggcttcttattcagcaacgcatggacgggagcctgaacttcaatcgaacttggcaagactacaagcgcggatttgggtccctgaacgatgaaggagaaggcgaattttggctcggaaatgattacctgcatcttctcactcaacgcgggagcgtgctccgcgtcgaactggaagattgggctgggaacgaagcatacgcggagtaccatttccgtgtcggatcagaagcagagggttacgcactgcaggtgtcatcgtacgaaggtactgccggagatgcactcatagaaggaagcgtggaagagggcgcagagtacacttcacacaataacatgcaatttagcacttttgatcgagatgccgatcaatgggaggaaaactgcgccgaagtctatggaggtggatggtggtacaacaattgtcaggcagctaatctcaacggtatctactatccaggcggttcctacgatcccaggaataactccccatacgaaatcgaaaatggtgtggtgtgggtgagcttcagaggtgccgactattcgctccgggcggtgcgcatgaaaatccgtccgttggtcacccaa

SEQ ID NO: 11058 - DNA, 2598 bp, synthetic construct
  misc_feature 1..2598: note = source = /note="Description of Artificial Sequence: Synthetic coding sequence"
  source 1..2598: mol_type = other DNA
atgttcagtatgagaatcgtctgcctggtcctctcagtcgtgggaaccgcctggaccgcagactcaggggaaggtgacttcctggccgagggcggaggagtccgcggccctagagtggtggaacgccatcaatcagcctgcaaagattcggactggcctttctgtagcgacgaagattggaactacaagtgcccctcgggatgcaggatgaaggggttgatcgacgaggtgaatcaagactttactaataggatcaacaagctcaagaactcactgtttgagtaccagaaaaacaacaaagattcccattccctgacgaccaacatcatggaaattcttagaggcgatttttccagtgcgaataaccgggataatacctacaacagagtgagcgaggacctgcgctcccggatcgaagtgcttaaacgcaaggtgattgagaaggtgcagcacatccagttgctgcagaagaatgtgcgcgcgcagctggtggacatgaaacggctggaggtggacatcgacataaagatccggtcttgccggggaagctgttctcgcgccctcgcgcgggaagttgacctgaaggactacgaggatcaacagaagcaactcgaacaggttattgccaaggatctgctgccttcgcgcgatagacaacacctcccgttgatcaagatgaagccagtcccggatctggtgccagggaacttcaagtcccaactgcaaaaagtgcccccagaatggaaggcactgactgacatgccgcagatgagaatggagctcgaacgtcccggcggaaatgaaataaccagaggcgggtccacctcgtacggcaccggctcagaaacggagtcgccgcggaacccgtcgagcgccggttcatggaactctggatcctcgggaccgggttcaactggaaacagaaacccagggtcaagcggaactggaggaaccgcgacttggaagccgggatccagcggccccggaagtacgggatcgtggaactcgggatcttcaggaacgggatccactgggaatcagaatccgggaagcccacgcccgggatcgaccggaacttggaaccccggatcctctgaacgcggctccgctggacactggacctcggaaagctccgtgtcgggcagcacgggacaatggcactccgagtccggaagttttcgccctgacagcccgggctctggaaacgcacgccctaacaaccccgactggggcacgttcgaggaggtgtcaggaaatgtgagcccagggacccgacgcgagtaccataccgaaaagctggtcacgtcgaagggcgataaggagctgaggactgggaaagagaaggtcaccagcggatcaaccactaccacccggaggtcctgctccaagactgttactaagactgtgatcggtcctgacggtcataaagaggtgactaaagaagtcgtgacttcggaggacggatccgactgcccggaggcgatggatctcgggactctgtccggtatcggcaccttggacgggttccggcatcggcacccagatgaggccgctttcttcgataccgcctcaactggcaagactttcccgggtttcttctcgccaatgctcggagagtttgtgtcagaaaccgagtcgcgaggatcggagtccggtatcttcaccaacactaaagaaagctcatcacaccatccgggaatcgcggaattcccgtcgagagggaagagttccagctactcgaaacagtttacttcaagcacctcctacaacaggggagacagtaccttcgagtcgaagtcatacaaaatggccgacgaagccggtagcgaggctgatcatgaagggacgcacagcaccaagcgaggccatgccaaatcacggccagtgcgggattgtgacgacgtgttgcaaacccacccttctggcacccagagcgggattttcaacattaaactccctggatcgtccaagatcttttccgtatactgcgatcaggagactagtctgggaggctggcttctgatccagcaacgcatggacggctccctgaactttaatcggacttggcaggattacaagagaggtttcggctcacttaacgatgaaggtgagggcgaattctggcttggaaacgactacctccacctgctcactcagcgcggaagcgtcctgcgggtggaactcgaggactgggctggtaatgaggcttacgcggaataccacttccgcgtcggatctgaagcggaaggatacgcactccaggtatcctcgtacgaaggaaccgcaggggacgccctcatcgaaggatcggtggaagaaggagcggaatacacctcccacaacaatatgcagttctctaccttcgacagggacgcagatcagtgggaagaaaattgcgctgaggtgtacgggggcggatggtggtacaacaattgtcaggccgcaaatctgaatggaatctattatccgggcggatcgtacgacccccgcaataactctccgtacgaaatcgaaaacggtgtcgtgtgggtgtcattcagaggagcagattattcgttgagagctgtgcgcatgaaaatcaggccgctggtcactcaa

SEQ ID NO: 11059 - DNA, 2598 bp, synthetic construct
  misc_feature 1..2598: note = source = /note="Description of Artificial Sequence: Synthetic coding sequence"
  source 1..2598: mol_type = other DNA
atgttctccatgcgcatcgtgtgcctggtgctgtccgtggtcggaacggcctggactgctgactccggcgaaggggacttcctggcggaagggggtggagtgcgcggaccgcgggtggtggaacggcatcagtcggcctgcaaagattcggattggccattttgttcggacgaggactggaattacaagtgtccatcggggtgtaggatgaaaggcctcattgacgaggtgaaccaggacttcacgaacaggatcaacaagttgaagaattcgctctttgaataccaaaagaacaacaaagactcacactcgctgaccactaatatcatggaaatccttagaggagacttcagttcggcaaacaaccgggataatacctacaatagggtcagcgaagacctgcgcagccggatcgaggtcctgaagcggaaggtcatcgaaaaggtgcagcatatccaactgctgcaaaagaatgtcagggcccaactggtcgacatgaagcgccttgaagttgacattgatatcaaaatccggtcatgccgcggctcgtgcagccgggccttggcaagagaagtcgacctgaaggactacgaagaccagcagaagcagctggagcaggtgatcgctaaggatctcctgccatcaagggacagacagcaccttccactcatcaaaatgaagcccgtccctgatcttgtgccaggcaacttcaaatcccagttgcaaaaagtgccaccggagtggaaggctctgactgacatgccgcaaatgcggatggagctcgaacggccggggggaaatgaaatcaccagaggcggcagcacctcgtacggcactggatcagaaactgagtcgccgcgcaacccgagctcggcaggttcatggaacagcgggagctccggacccggttcaaccggaaatcggaacccgggcagctctggcacgggtggcactgccacctggaaacccggctcaagtggacctggaagcaccggttcctggaactctggctcgtcgggaactggtagtaccgggaaccagaaccccggctcaccgcggcctggatcaacgggaacgtggaaccctggttcatccgagcgcgggtcagccggacattggactagcgaaagttccgtgtccgggtccaccggccagtggcactcggaaagcggctcatttcggccagattcgccaggttcggggaacgccaggccaaataacccggactgggggacctttgaagaggtgtcgggcaatgtgtcaccgggaacccgcagagaataccataccgagaagctcgtgacctcaaagggagacaaggagctgcgaactggaaaggaaaaggtgacctcgggatcgaccaccactactaggcgttcgtgctccaaaactgtgaccaagaccgtgatcggacctgacggccataaggaggtgaccaaggaggtggtgaccagcgaagatggatccgactgtccggaggccatggacttggggactctctccggtatcgggaccctggatgggttccgccaccgccatccggacgaagctgcgttcttcgataccgcttcaactggaaaaacctttccgggattcttctcgccgatgctcggtgagtttgtgtccgaaactgaaagccgcggaagtgagtccggaattttcactaacactaaggaatcatcctcacatcacccaggaatcgcagaattcccatcgcgaggtaaaagttcgtcctacagcaagcaattcacctccagcacttcctacaaccgcggagactcgactttcgaatccaagtcatacaagatggcggacgaagcagggtccgaagccgaccatgagggtacccacagtaccaaacgcggacacgcaaagtcaagacctgtgcgcgattgcgatgatgtgcttcagacgcacccgagcggaactcaatcgggaattttcaacattaaactgcccgggtcatcaaagatcttttccgtatactgcgaccaagaaacgtctctgggtggatggctcctgatccaacagagaatggacggatcactcaacttcaatcgcacttggcaggattacaaacgcggctttggaagcctgaacgatgagggagagggcgagttctggctgggaaacgactacctgcacttgctgactcagagagggagcgttctgcgggtcgaactcgaggattgggcgggaaatgaagcgtacgccgaatatcacttcagagtcggatcagaagcagagggctacgcccttcaagtgtcctcctacgagggaactgccggcgatgccctgatcgaaggatcagttgaagagggagccgaatacaccagtcacaacaatatgcagttcagcacgttcgaccgggacgcagatcaatgggaagagaattgcgctgaggtctacggcggaggctggtggtacaataactgccaggccgcgaacctcaatggaatatactatcctggaggatcctacgatccccggaataactccccgtatgagatcgagaacggagtcgtgtgggtttcattcagaggagcggactactctctccgcgcggtgagaatgaagatcagacctctggtcacccag

SEQ ID NO: 11060 - DNA, 2598 bp, synthetic construct
  misc_feature 1..2598: note = source = /note="Description of Artificial Sequence: Synthetic coding sequence"
  source 1..2598: mol_type = other DNA
atgttctcgatgcggatcgtgtgtctcgtgctgtctgtggtgggaacggcttggaccgcagatagcggcgagggcgactttttggccgaaggtggtggtgtgcgcggaccgcgcgtcgtcgaaaggcatcagtctgcctgcaaggattcggattggccattctgctcggatgaggactggaattacaagtgcccttccgggtgccgcatgaagggactgatcgacgaggtgaatcaagactttactaatcgcattaacaaattgaagaatagcttgttcgaataccagaaaaacaacaaggattcccattcactcactactaatatcatggaaatccttcgcggagacttctcctctgccaataatcgcgataatacctacaacagagtctctgaggatctgcggtcccgcattgaagtgcttaagcgtaaagtcattgagaaggtgcagcacattcagctgctccaaaagaacgtccgcgcacagctcgtcgacatgaagcggctggaagtcgacatcgatatcaaaatacggtcatgtaggggatcgtgctcgagagcgctggccagggaagtggacctgaaggactacgaggaccagcaaaagcagctcgaacaggtcatcgccaaagatttgcttccatcccgcgaccggcagcacctgccgctcatcaaaatgaagccggtgccggatctcgtgcctggaaactttaagtcacagttgcagaaggtgcccccggagtggaaggcgctcacggacatgccgcaaatgagaatggaattggaacggccgggtggcaacgagatcacccgcggaggatccacctcgtatggtaccgggtcagaaactgaatctccgcggaatccctcgagcgccggatcctggaatagcggaagctctggacctggtagcaccggaaataggaacccaggatcgtccggaaccggaggaaccgctacttggaagccgggctcttcgggaccgggatccacggggtcgtggaactccggatcctcgggaactggatcgaccggcaaccagaatccagggtcaccgcgcccaggttccactggtacttggaaccctggctcttccgaacgtggtagcgcggggcactggaccagcgaatcatctgtgtccggatcaaccgggcagtggcactcggagagcgggtcattcagaccggactcgccgggatcgggcaacgcccgcccaaacaaccccgattggggtacttttgaagaggtcagcggaaatgtgagcccgggtacccgcagagaataccacaccgaaaagctcgtgacttcgaagggcgacaaagagctgcgcaccggaaaggaaaaggtcactagcggatcaaccaccaccactagaaggagctgcagcaagaccgtcaccaagaccgtgattggacccgacggacacaaggaagtgactaaagaagtggtgacctcggaagatggctcggactgtccagaggccatggacctgggcaccctttcggggattgggaccttggatggctttcggcacagacacccagacgaggcagccttctttgataccgccagcactggaaagactttccctggattcttctccccaatgctgggcgaattcgtctcagaaactgagagccgcggaagcgaatcgggaatctttaccaacacgaaagagtcgagcagccatcatcctggaatcgcggaattcccttcgagagggaaatcctcctcctacagcaagcaattcacgtcgtcaacctcctacaatcggggagacagcaccttcgagtcgaagtcctacaagatggcggacgaggcggggtctgaagccgatcacgaaggcacccattcgacgaaacgcggccacgcaaagtcgaggccagtccgggactgcgatgatgtcctccagacccacccgtcgggaacccagtccggcattttcaatatcaaactgccaggaagcagcaaaatcttctccgtgtactgcgaccaggaaaccagcttgggtggatggctgctgatccagcagaggatggacggtagtctcaatttcaacagaacttggcaagattacaagcggggctttggctcactgaacgacgaaggcgaaggggagttctggctcggaaacgattacctccacctgcttacccaaagaggctcggtgctgagggtggaactggaagattgggcgggcaatgaagcgtacgcagaataccacttccgcgtcggttcagaagctgaggggtacgcgctgcaggtgtccagctacgagggcacggcgggagatgctctcatcgaggggtcagtcgaagaaggggccgaatacacgtcccacaacaatatgcagtttagcaccttcgatcgagacgccgaccaatgggaagagaattgcgcggaagtgtacggcggcggatggtggtacaataactgtcaggccgccaacctcaatggcatctactaccctggaggctcatacgacccgcgcaacaactcaccgtacgaaatcgagaacggagtggtctgggtgtcatttcgcggcgccgactactcgctgcgggcggtgagaatgaagatccggccactggttacccaa

SEQ ID NO: 11061 - DNA, 2598 bp, synthetic construct
  misc_feature 1..2598: note = source = /note="Description of Artificial Sequence: Synthetic coding sequence"
  source 1..2598: mol_type = other DNA
atgtttagtatgaggatcgtttgtctggttcttagcgtggttggcaccgcttggaccgctgatagtggtgaaggggacttcttggctgaggggggcggcgtgcgcggccctcgggtagtggagaggcatcagagtgcatgcaaggattccgattggcccttctgtagtgatgaggactggaactataagtgcccttcagggtgtagaatgaaaggcctgatagatgaggtaaaccaggatttcaccaatagaatcaacaagttaaagaattccctgttcgagtaccaaaagaataataaggactctcactcattaactacgaacatcatggagatcttgcgaggggacttctcttccgcgaacaaccgagataacacatataatagagtgagcgaggaccttaggagcagaatagaggttcttaagagaaaagtgattgaaaaggttcagcacatacaactgttgcagaagaacgtgcgcgcccaactcgtggatatgaagaggttggaggtagacatcgacataaaaattagatcttgcaggggaagctgttcacgagctctcgcacgtgaagttgacctcaaggactatgaggaccaacagaaacagttagaacaagtgattgcgaaggatctgctgccctcgagggacagacagcatctcccattgattaaaatgaagcccgtcccagatctggttccaggaaattttaagagccagctccagaaggtcccaccggaatggaaggctctgaccgatatgcctcagatgaggatggagctcgaacgacccggtggtaacgagatcacccgcggtggttccacatcctacgggactgggagcgaaacagagtctccgaggaacccgtcctcagctggtagctggaattccggaagttcagggcccggatcaacagggaaccgaaatccaggcagttccgggacaggggggaccgcaacttggaagcctggcagcagcgggcccgggagtacaggttcttggaactcaggcagttctgggacgggatccacaggtaatcagaacccaggctctcccaggcctggatctacaggcacttggaaccccgggagctcggagagaggatctgccggccattggacaagtgagagttctgtctccgggtctaccggtcaatggcactcagagtcgggctcgttcaggccggattctcctggaagtggaaatgcaaggcccaataatcccgattggggtacattcgaggaagtatccgggaatgtttcccccggcactagacgcgaatatcatacagagaagctggttacaagcaaaggcgataaggaactgagaacaggaaaagaaaaggtcacttcaggttctaccacaaccaccaggcgaagctgctcaaagactgtgaccaaaactgtgataggtcctgacggccacaaagaagtaacaaaggaggtcgtgacatcagaagatgggtccgactgtcccgaggcgatggatttaggcacactgtcgggcattggcacactggatggttttaggcacagacaccccgacgaggccgccttctttgacacagcctctacgggaaagacctttcccgggtttttctctcccatgcttggcgaattcgtaagcgaaacggagtccagaggctctgaatctggcattttcaccaatacgaaggagtccagctctcaccaccccgggattgctgaatttccgtctaggggcaagtcttcgtcatactctaagcaattcacgtcttcaacctcctataatagaggcgatagtaccttcgagagcaaatcatataaaatggctgacgaagccggatcagaggccgaccatgaaggaacacactccactaaaagaggacatgcaaagagcagaccggtccgagattgcgatgacgtccttcagactcatccgagcgggacacagtctggaatattcaacattaaactcccaggcagctcaaaaatattcagcgtctattgtgaccaggagacttcactgggaggatggctgcttatccagcagaggatggacgggtccctcaacttcaaccgaacgtggcaggactataaacgagggttcggatctctaaatgatgagggcgaaggagaattctggctagggaatgactatctgcatctgttgacccaaagaggatccgtgctgcgggtggaacttgaggattgggccggcaacgaagcctatgcagagtatcacttcagagtcggttctgaggccgaagggtacgccctgcaagtgagctcttatgagggcacagccggagatgctttgatcgaaggatcagtggaggagggtgccgaatatacgagccataacaatatgcagtttagcacatttgaccgagacgccgaccagtgggaagaaaattgtgccgaggtttatggcgggggctggtggtataataattgtcaggccgcgaatctgaatggcatctattaccccggagggtcctacgacccacggaataattctccttatgagatcgagaatggagtcgtctgggtgtcctttaggggagccgactatagcctgagagcggtgaggatgaaaatcagaccactggtaacgcaa

SEQ ID NO: 11062 - DNA, 2598 bp, synthetic construct
  misc_feature 1..2598: note = source = /note="Description of Artificial Sequence: Synthetic coding sequence"
  source 1..2598: mol_type = other DNA
atgttttctatgcgaattgtttgcctcgtcctgtcagttgttggaaccgcatggaccgctgactccggcgaaggcgacttcctcgccgaaggcggaggcgtgagggggcctcgggtcgtcgaacgtcatcaaagcgcctgtaaggactcagactggcccttttgctccgacgaggactggaactataagtgtccttccggctgcaggatgaaggggctaatagatgaggtcaatcaggattttaccaataggattaataagcttaagaatagcttatttgaataccagaaaaataacaaagactcacactctctgaccacgaatatcatggagatcctgaggggggatttttcctcagctaataacagagataatacctataaccgagtctcggaggatctgagatctcgaatagaagtgctcaaacggaaggtcattgaaaaagtacagcacatccagctgcttcagaagaatgtgcgtgctcagctggtcgacatgaagagactggaagtggatattgacattaagatccggtcgtgcaggggttcctgttcacgggccctggctcgagaggtggatcttaaggactatgaagatcagcaaaaacagctggaacaggtcatagctaaggatctgctgccctccagagacaggcaacacctgcccttaataaaaatgaagcccgtgcctgatctcgtccctggcaactttaagtcacagctgcaaaaggtgccacctgagtggaaagcattgaccgatatgcctcagatgcgcatggagttggaaaggccgggggggaatgagattacccgcggcggctctacctcttacggtaccggaagcgaaactgagtccccacgtaatccatccagcgcggggagttggaactcaggatcctccggacctggatcaacaggtaaccgcaatcctggatcaagcggaaccggcggcacagcaacatggaagcctggctcgagcgggcctggctccaccgggtcctggaactccgggagtagtggtactggctccactggcaatcaaaaccctggttcacccaggccagggagtacaggcacttggaatccaggatctagtgagaggggttctgcaggccactggacctcggagagcagtgtgtcagggagcacaggacaatggcactccgagagcgggtcctttcgcccagattcacccggaagtggaaatgcccgccccaataaccccgactggggcacattcgaagaggtctctggcaacgtgtctccgggaactagacgcgaataccataccgagaagctggtgactagcaagggggataaggagttgcgtacaggcaaggagaaagtcacttctgggtcaaccacaactactaggcggtcctgtagtaagaccgttacgaaaactgtgatcggaccagacggccataaagaagtgacaaaggaggtggtgacatcggaggacggttccgattgccctgaggccatggacctgggcactttgtcagggataggtacactagatggattcaggcatcgacatccagacgaggctgcattcttcgacactgcctcaacaggaaaaacttttccaggtttctttagtcccatgctgggagagtttgtgtccgagactgagtcccgcggttctgagtccggcatatttaccaatacaaaagagtctagcagccaccatcctggtatagctgagttccctagcagaggtaaaagcagttcctactccaagcagtttacctccagtacatcttacaatagaggcgacagtacattcgagtcgaagtcatacaaaatggccgacgaagcgggctcagaggcggatcacgagggcacacactccactaagcgtggccacgccaagagcaggcccgttagagattgcgacgacgtccttcagacacacccctcaggcacacaatcaggcattttcaatatcaagctgcctggaagttctaagattttcagtgtttattgcgaccaggaaacgtcgttgggaggctggcttctgatccagcagagaatggatggatcccttaattttaatcgtacgtggcaggactataagagaggtttcgggagcttaaatgacgagggagagggcgagttctggttgggtaatgactatctacatctcctgacgcagaggggttccgtgctaagagtcgagctcgaggattgggcaggaaacgaagcatacgctgagtatcattttcgggtggggagcgaggccgagggatatgcattacaggtaagcagctatgaagggacggcgggagatgcccttatcgaaggttccgtcgaggaaggggccgaatatacatcccataataacatgcagttcagtactttcgaccgggacgctgaccagtgggaggagaattgtgccgaggtatatggcggcggatggtggtacaacaactgccaagctgccaacttaaatgggatctactatcccggagggtcatatgacccccgtaataacagtccttacgagattgagaatggtgttgtgtgggtgagctttcggggcgctgattactctttgagggcggtgcgaatgaagattaggcctctcgtaacccag

SEQ ID NO: 11063 - DNA, 2598 bp, synthetic construct
  misc_feature 1..2598: note = source = /note="Description of Artificial Sequence: Synthetic coding sequence"
  source 1..2598: mol_type = other DNA
atgttttccatgcgtatcgtgtgcctggtgctgagtgtcgtgggcacagcatggaccgctgattctggagaaggagactttcttgccgagggtggcggggttcggggccctcgggtggtagagcgtcatcagagtgcctgcaaagacagtgattggccattctgttccgacgaagattggaattacaagtgtccctcaggatgccgaatgaaaggtctgatagacgaggttaaccaggattttacaaataggatcaataagctgaaaaattccctgtttgagtaccagaagaataataaggattctcactcgcttacaaccaacataatggagatcttgcggggtgatttctctagtgctaacaatcgggataacacctataatcgagtgagcgaggacttgcggtcccggatcgaggtgttgaaacgcaaggtgatagagaaggtgcaacacatccagttgctgcagaagaatgtaagggcccagcttgtcgacatgaagagactcgaagtggatatagacattaagattcggtcctgcaggggcagctgcagccgagccctcgccagagaagtcgatctaaaagattacgaagaccagcagaagcaactggaacaggttattgctaaagacctgctcccctcaagagaccgacagcatcttcccctcatcaagatgaaaccggtacccgatcttgtgccagggaatttcaaatcacagctgcagaaggtaccccccgagtggaaagccttgacggatatgccacaaatgcggatggaactcgagcgcccaggaggcaatgagatcactagaggcggatcaacgagttatggcaccggctctgaaaccgagtcgccgaggaatccatcctcggccgggtcttggaactccgggtcatccggacccggttccaccgggaaccggaacccagggtcctccggcacgggtggtacagctacctggaaacccgggtccagcggccctggatcaaccggctcctggaactccggaagttctggcacaggtagcacaggcaatcagaaccccggttctccccggcctggatccacggggacatggaatcctggctcttcagagagggggagcgccgggcactggacctcagagagctcagtcagcggtagcaccggacagtggcattccgagtcgggatccttccggcctgactcccctgggtccggcaatgctaggcccaacaacccagactggggtactttcgaagaggttagcggaaatgtcagtcccgggacaaggcgagaataccatacagaaaaactagtcacctcaaagggcgataaggagctgcggactggcaaggagaaagtgacctctggctccacaaccaccacccgtcggtcttgcagcaagaccgtgacaaagacagtgatcggtcccgatggccataaggaagtgactaaggaagttgtcacgagcgaggacggcagcgactgtcccgaggcaatggatctcggaaccttatccggtatcggaacgctggatgggttccgtcatagacaccccgacgaggccgcattcttcgacaccgcgagcactggcaaaaccttccccggatttttttcccctatgctcggtgagtttgtttccgagactgaatctcgagggtcagagtcggggatcttcaccaacacaaaggaaagctccagccaccacccagggatcgccgagttcccatcacgcggcaagagttcctcctattcaaagcagtttaccagcagtacatcttacaaccggggagattcaactttcgaatcaaagtcttacaagatggccgatgaggccggatcagaggccgaccacgagggtacacattcaactaaacgagggcatgcaaagtcccggccggttagagattgcgatgatgttcttcaaacacacccctcagggacgcaaagcggtattttcaacatcaaacttcccgggtcctcaaaaattttctctgtgtactgtgatcaggaaacttctttaggcggctggctcctaatacaacagcgcatggatgggtccctcaacttcaaccgaacctggcaggactacaagaggggcttcgggtcactgaatgacgagggcgagggagaattttggctgggcaacgattatctgcacctcctgacccaacgagggagtgttttgcgggtggagctggaggattgggccggtaatgaggcatatgcggaatatcacttccgcgtgggaagtgaggctgagggctatgcattacaggtcagttcgtacgaaggtaccgctggagacgccttaatagaaggctctgtggaagagggtgctgagtacacttcacataacaacatgcagttcagcaccttcgaccgcgatgcggaccagtgggaggaaaattgcgccgaggtgtatgggggagggtggtggtataataattgccaggccgctaatttaaatgggatttactacccagggggcagttatgatcccaggaacaactcaccgtatgaaatcgaaaacggagtggtatgggtcagtttcagaggggccgactacagtctgcgggctgtgagaatgaaaattcgccccctggtgacccaa

SEQ ID NO: 11064 - DNA, 2598 bp, synthetic construct
  misc_feature 1..2598: note = source = /note="Description of Artificial Sequence: Synthetic coding sequence"
  source 1..2598: mol_type = other DNA
atgttctcaatgagaatcgtgtgtcttgtgctgtccgtggtcggaactgcgtggaccgccgactccggagaaggggatttcctcgccgagggcggaggtgtgcgggggccgagagtggttgaaagacatcagtccgcgtgcaaggactcggactggcctttctgctcagacgaggactggaactacaagtgcccttcgggatgcaggatgaagggactcatcgatgaagtcaaccaggatttcaccaacagaatcaacaagctgaagaattcgctgttcgagtaccaaaagaacaataaggacagccactccctcaccaccaatatcatggagattctgcgcggggattttagcagcgccaacaatagggacaatacttacaaccgagtgagcgaggatctccggtcgcgcatcgaagtgctgaagagaaaggtgatcgaaaaggtgcagcacattcaattgcttcagaagaatgtgcgcgcccagctggtggacatgaagagactggaggtggacattgacatcaagatccgttcgtgccggggatcctgctcgagggccctggcgcgggaggtggacttgaaggactacgaagatcagcaaaagcagctggaacaagtgatcgcaaaggatctgctgccgagccgggacagacagcatctgccgctgatcaagatgaagccagtgcctgacctcgtcccggggaatttcaaatcacagctgcaaaaagtgcctcctgaatggaaggccctcactgacatgcctcaaatgcggatggagctcgagcggccggggggtaacgagatcactcgcggtggctctacttcctacggcacgggctcagaaactgagtcgccgcgcaacccatcttccgcggggagctggaatagcggaagcagcggaccgggctccaccggcaatcggaacccgggatcatcgggtactggaggtaccgccacttggaagccgggttcgagcggacccggatcgaccggatcctggaactcggggtcgtcgggaactggatcgactgggaaccagaatccggggtcgccgcggcccggatccaccggcacgtggaatcctggttctagcgaaagaggatccgccggacattggacttcggaaagctcagtgtctggttcaaccggacaatggcactcagagtcaggatcgttccggccggattcgccgggaagcggaaatgccaggcccaataacccggactggggtaccttcgaggaggtgtcaggaaacgtgtccccgggtaccagacgcgagtaccacaccgaaaagctggtgacctccaaaggcgacaaagagttgaggaccggcaaggagaaggtcacgtcaggcagcacgaccacgacccgccgatcatgcagtaaaaccgtgactaagactgtgattggaccggatggtcataaggaggtcaccaaggaagtcgtgacgtcagaagatggctcggattgccctgaggcgatggacctgggaaccctttcgggaatcgggactctcgacggattcaggcataggcatccagacgaagcggcttttttcgataccgcgtctaccggcaaaactttcccgggctttttcagcccgatgctcggagaattcgtctcagagacggagtcccgcggttcggaaagcggaatcttcaccaataccaaggagtcgtcctcccaccatccggggatcgcggagttcccttcaagaggaaaatcctcctcctactcaaagcagtttacgagctcgaccagctacaatcggggcgattcaacttttgaatcaaagagctacaagatggcagatgaggctggaagcgaggctgaccatgagggtactcactccaccaagcgtggtcacgctaagtcaagaccagtgagagactgtgacgacgtccttcagacccatcccagcggaacccagtcgggaatcttcaatatcaaacttccgggatcgagcaagatctttagcgtgtactgtgatcaggaaaccagcctgggaggatggctgctgattcagcagaggatggacggatccctcaacttcaatagaacttggcaagattacaagagaggattcggctccctgaacgacgagggagagggcgaattctggctgggaaacgattacctccatctcctgacccagcgggggagcgtgctccgggtggaactggaggactgggccggaaacgaggcctacgccgagtaccatttccgcgtgggatccgaagccgaaggatatgcactgcaggtttcctcctacgagggtactgcgggcgatgccctcatcgagggatcagtggaagagggagccgagtataccagccacaataacatgcagttctcgaccttcgacagagacgctgaccagtgggaagagaactgcgcggaagtgtacggtggaggatggtggtacaataactgccaggcagctaatctgaacggaatctactaccctggaggcagctacgacccccgcaacaactccccatacgaaatcgaaaacggagtggtgtgggtttccttccggggagctgactactccctgcgggccgtcaggatgaagatccggcccctcgtgactcaa

SEQ ID NO: 11065 - DNA, 2598 bp, synthetic construct
  misc_feature 1..2598: note = source = /note="Description of Artificial Sequence: Synthetic coding sequence"
  source 1..2598: mol_type = other DNA
atgtttagcatgaggatagtgtgcctggtccttagcgtggtgggtacagcttggaccgcagactcgggagagggcgattttcttgcggaaggcggaggagtgcgcggaccccgcgtcgttgagcggcatcagtcagcctgtaaggatagtgactggcctttttgcagtgacgaagactggaattataagtgtccatccggttgtagaatgaaaggactcatcgatgaggttaaccaggatttcaccaaccggattaacaaactcaagaacagtttgtttgaatatcagaaaaacaacaaggactcccacagcctcacaactaacatcatggaaatcctcagaggcgatttcagctctgccaacaatcgagataacacctataatcgggtgagtgaggatctgcgctcccggatagaggttctgaagagaaaggtcatcgaaaaggtgcagcatattcagcttcttcagaaaaatgtgcgagctcagctcgtagatatgaagaggctcgaggttgacatcgacatcaagatccggagttgtagagggagttgttccagagccctggcccgcgaggttgatcttaaagattacgaagaccagcaaaagcaattggaacaggttatagctaaggatttgctgccatcacgcgacaggcagcaccttcctctgatcaagatgaaaccagtaccagacttagtgcctgggaattttaagtcccagctccagaaagttcctcccgagtggaaagcgttgacagatatgccacagatgcggatggaacttgagaggccaggaggcaacgaaatcactcgcggaggatccacatcatacggaaccggatccgagaccgaatcacctcgcaatccctccagcgcgggatcttggaatagcggctcaagcgggcctggctcgactggaaatcgcaacccagggtcttccggaaccggcggcactgccacctggaagcctggatcgtctggccccgggtctacaggtagttggaactctgggtccagcggcacgggcagtacagggaaccagaaccctggatcccctaggcccggcagcaccggaacttggaaccccggttcgtctgaacggggttctgcagggcactggactagcgagtccagcgtgtccgggtcaaccggccagtggcactcggagtctggatctttccgccctgactccccaggttccggcaacgctcgaccgaataatcctgactggggaacctttgaggaggtgtcgggaaatgtgtcacccggtacccgcagggaataccacactgagaagctcgtcacaagcaagggggataaagaactgagaacaggaaaagaaaaggtgacaagcggcagcactacaaccacacggagatcctgttctaagaccgtgacaaaaactgtcataggtcctgacggccacaaggaggtgactaaggaagtcgtgacctcagaagacggaagcgactgcccagaagcaatggatttgggcaccctttccggcattgggacattggacggctttcgacaccgccatcctgatgaggccgcttttttcgatacagctagcactggtaaaacttttcccggcttcttcagtcctatgctaggcgaattcgtatccgaaactgagtcccgcgggtcagagtccggtatcttcacaaacaccaaagagagtagcagccaccatccgggaatcgccgaattcccctcgcggggcaagtcctccagttatagtaagcagttcaccagcagcaccagttacaaccgcggggactctacgttcgaaagcaaaagctataagatggctgatgaagccggatccgaggccgaccacgagggcacacacagtaccaagcgagggcatgctaagagccgacccgttagggattgtgacgatgtcctgcagacacatcccagcggaacacagtctggaatcttcaatatcaagctgcccggctcttctaagatcttttctgtgtattgtgatcaggaaacatcactaggcggttggcttttgatccagcagagaatggacgggtccctgaattttaatcggacttggcaggactataaaagaggttttggctcattgaacgatgagggggaaggagagttctggttgggtaatgattacctgcacctactcacccagcgtggttctgtgctccgcgttgaacttgaagattgggccggcaacgaggcttacgcggaataccacttccgggtcggcagtgaagcagaggggtatgccctgcaggtgtcaagctacgaaggtactgccggcgatgcattgattgaaggaagcgttgaagagggagcagagtacaccagtcataacaatatgcaatttagcaccttcgacagagacgccgatcagtgggaggaaaattgcgcggaagtgtatggagggggctggtggtacaacaattgccaggccgctaacctgaatggaatctattacccaggggggtcttacgatcctcgcaacaatagcccttacgagatcgaaaatggtgtagtttgggtctccttcagaggggccgattattcattacgagcagtcaggatgaaaatccgcccgcttgtcactcaa

SEQ ID NO: 11066 - DNA, 2598 bp, synthetic construct
  misc_feature 1..2598: note = source = /note="Description of Artificial Sequence: Synthetic coding sequence"
  source 1..2598: mol_type = other DNA
atgttcagcatgcgcatcgtttgcctcgtgctctcggtggtcggtaccgcttggaccgcagattccggtgagggtgacttcctggctgagggaggtggtgtgcggggaccaagggtagttgagaggcaccaaagcgcgtgcaaagattccgactggccattttgctccgatgaggactggaattataagtgtcccagtggctgccgcatgaagggcctcattgatgaagtgaatcaagatttcactaatcgcatcaataagctgaagaacagcctgttcgagtatcagaaaaataataaggacagtcattcgctgaccactaatatcatggagattctgcgtggcgatttctccagcgcaaacaatcgagataatacgtacaaccgcgtgagcgaagatctgaggtcgcgtatcgaggttctcaagcggaaggttatagaaaaggtgcagcatatccagctcctgcagaagaacgttagggcccagctagtcgacatgaagcgcttggaggtggatatcgatataaagattcgttcgtgccggggttcctgcagccgggctctggctcgagaggtagatttgaaggactacgaggaccagcagaagcagctggagcaagtgattgcgaaggatctactcccgtccagggatcgacagcatctgccactaatcaagatgaagccggtccccgatctagtaccaggtaatttcaagtcacagctgcagaaagtaccgcctgaatggaaggcattgacagatatgcctcagatgcggatggagctagagcgcccaggaggcaacgaaatcacccgtggcggctcgacctcctacggcacgggatccgaaaccgaaagcccacggaacccctctagcgcaggctcgtggaatagcggatcgtccggaccaggctctaccggcaacagaaacccaggaagctcggggacgggtggcaccgccacctggaagccgggcagcagcggcccgggaagtacgggttcgtggaacagtggttcatcgggcactggctccacgggcaaccaaaaccctggcagcccccggccaggctcaacaggaacgtggaaccccggtagctcagagcgcgggagcgccggtcactggacgtcggaatcttccgtgtccggatccactggccagtggcactccgaatccggtagcttccgtccggattccccgggcagcggcaacgcccgcccaaataaccccgactggggtacgttcgaggaggtgtcaggcaacgtgtcccccggaacgcgtcgcgagtaccacacagagaaacttgttaccagtaaaggggacaaagaactgcgcacgggcaaagagaaggttaccagtggaagcacaactacaacgagacggtcgtgctcgaagactgtgaccaagacagttatcggccccgatggccacaaggaggttaccaaggaggtggtgacgagcgaggacgggtctgattgtccggaagcgatggatttgggaacattgagtggtataggaaccttggatggttttcgccaccgccatccagatgaggctgcattcttcgatactgcgagcacgggaaaaaccttcccgggcttttttagcccgatgctgggcgagttcgtcagtgagactgagtctcgcggcagtgagagcggcatttttaccaacaccaaggagagtagcagccatcatcccgggatcgctgaattcccgtcccgaggaaagagcagcagctattccaagcagtttacctcgagcactagctacaacagaggcgacagcacgttcgagtccaaaagctacaagatggccgacgaggcaggctcagaggccgatcatgaaggaacccactcaaccaagcgcggacacgctaagagtcgcccggtgagggattgcgatgatgtcttacagacgcaccccagcggaacccaaagtggcatcttcaacattaagctgccgggttcgtctaaaatcttcagtgtatactgtgaccaagaaacgagtttgggcggctggttgctgattcaacagcgcatggatggctcgctaaatttcaatagaacttggcaggattacaagcgcggctttggtagcctgaatgacgaaggagaaggagagttttggttgggtaacgattatttgcacttgctgactcaacgtggctcagtcttgcgagtcgagctggaagattgggccggcaacgaggcctacgccgaatatcacttccgggtgggatccgaggccgaaggctatgccttgcaggtgtcaagctacgagggtaccgctggagacgccttgatagagggatcagttgaagagggcgcagagtataccagccacaataatatgcagttctccacgtttgaccgtgacgcagaccaatgggaggaaaattgtgctgaggtatatggtggcggttggtggtataataactgccaagccgccaacttaaacggtatctactaccccggaggaagctatgatccaaggaacaattcaccatacgaaattgagaatggtgtggtttgggttagtttccggggggcagactattcgctgcgcgccgtacgtatgaagatccggcccctggtaacccag

SEQ ID NO: 11067 - DNA, 2598 bp, synthetic construct
  misc_feature 1..2598: note = source = /note="Description of Artificial Sequence: Synthetic coding sequence"
  source 1..2598: mol_type = other DNA
atgttcagtatgagaatcgtgtgtctggtactcagtgtggtcggcaccgcttggacggccgacagtggagagggagactttcttgccgagggaggcggggttagaggtcccagggtggtggagcgacaccagagtgcatgcaaggattctgactggccgttctgtagcgatgaggattggaattataaatgcccatcagggtgcaggatgaaaggcttgattgacgaagtgaatcaagactttacaaatcggattaacaagctgaagaatagtctgttcgagtaccagaagaacaacaaagattcgcactccctgactactaacattatggagatcctgaggggcgatttctcctccgcgaataacagagacaatacctacaacagggtgagcgaagatttaaggtcacgaattgaggtgttgaaaaggaaagtgatcgaaaaggttcagcacattcagttactgcagaaaaacgtgcgcgctcagctggtagatatgaaaaggctcgaggtggacatcgatattaagatcagatcttgcagggggagctgctctcgcgcactggcccgcgaagtagatttgaaggactatgaggaccagcaaaagcagctggagcaggtgatcgctaaagatctgctgcccagccgcgacaggcaacatctccctctgataaagatgaagccggtgcctgacttggttccaggtaatttcaaaagccagctccagaaggttcctccggaatggaaggctctgacggatatgccacagatgcgtatggaattggaaaggcccggcggaaatgagatcacccgcgggggtagcacgtcttacggtactgggtccgagactgagtcacccaggaacccaagttctgccgggagctggaatagcgggtccagtggccctggcagcactggcaatcgaaatcctggctcgagcggaaccggcgggactgctacctggaagcccggctcctcggggcctggtagcaccggctcctggaattcgggctcctcaggcaccggttcgaccggcaaccagaaccccggcagccccaggccaggcagcacaggaacttggaaccctggtagcagtgaacggggcagtgctgggcattggacttctgagtcttcagtgagcggaagcactggccaatggcattcagaatctgggtctttcagaccggactcccccggctcggggaatgccagacctaacaatcccgattggggtacctttgaggaagtgtccggaaatgtgtctccgggaactcgccgtgagtatcacactgagaagctggttacctctaaaggagataaggagctgaggactgggaaggagaaagtgacaagtgggagcactacaactactaggcgatcttgcagcaagaccgttacaaagaccgtgattgggccagacgggcacaaggaggtcacgaaggaagtggtgacctctgaggacggatcagattgccctgaagctatggacctgggaacattgagcggcattgggaccctggatggcttccgtcataggcatcctgatgaggcggccttcttcgacactgcctctaccggcaagacatttcctgggtttttcagccccatgctcggcgaattcgtgagcgagaccgagagcaggggcagcgagagcggcatcttcacgaataccaaagagtcctcatcccatcaccccgggattgcagaattccccagtagagggaagtcctcaagctatagtaaacaatttacctcaagtacgagttataaccggggcgactctacttttgagagtaaatcgtacaaaatggccgacgaggcaggttccgaggctgaccatgaggggacacattccactaagagggggcacgccaagagtagacccgtccgggactgtgacgacgtacttcaaacacacccctccgggacacagtccggaatcttcaatataaagctaccaggcagcagcaagatcttcagcgtctactgcgaccaggagacttccctcggcggatggctgctcatccaacagagaatggatggctccctgaatttcaaccggacatggcaagattacaagcggggtttcggaagtcttaacgacgagggcgagggcgagttctggctgggcaacgactacctccatttgttgacacagcgcggatctgttctgcgagtcgaactcgaggactgggccggaaacgaggcctacgcggaataccactttcgcgtcggtagtgaggccgaagggtacgctctgcaggtgtcgagctacgaaggcaccgcgggggacgccctgattgaggggtctgtagaggagggtgcggaatacacctctcataacaatatgcagttctccacctttgacagggacgctgaccagtgggaagagaattgcgccgaggtgtacgggggcgggtggtggtacaacaactgccaggctgcaaaccttaatggcatctattatccaggcgggtcatacgaccctaggaacaacagtccctacgagatcgaaaatggtgtggtatgggtttctttcaggggggcagactatagcctcagagcggttagaatgaaaatacgccctctggtgacccag

SEQ ID NO: 11068 - DNA, 2598 bp, synthetic construct
  misc_feature 1..2598: note = source = /note="Description of Artificial Sequence: Synthetic coding sequence"
  source 1..2598: mol_type = other DNA
atgttttccatgaggatagtgtgccttgtgctgagcgtggtcggaactgcctggactgcggattcgggtgagggggacttccttgcagaagggggcggcgtccggggtccgagagtggtcgagaggcaccaatcggcatgtaaggactccgattggcctttctgttccgatgaggattggaattacaaatgcccaagcggctgccggatgaagggactgattgatgaagtgaaccaagattttacgaacaggatcaacaagctgaagaactcgctgttcgaataccagaagaacaacaaagattcacactcgctgaccaccaatatcatggaaatacttcgtggtgatttttcgagcgccaacaacagggataacacttataaccgcgtcagcgaggatcttcggtcgagaatcgaggtgctcaaacgcaaggtcattgaaaaggtgcagcatattcagctgctgcagaagaatgtgcgcgctcaattggttgatatgaagcgacttgaagtggatatcgacataaagatcagatcgtgtcgcgggtcatgttcgagggccctggctagagaggtggatttgaaagattacgaggaccaacagaagcagcttgaacaagtcatagccaaggatctgttgccctcaagggatagacaacatctcccattgattaagatgaagcccgtgcccgatcttgtgcctggtaactttaagtcccaacttcagaaggtgccgccagagtggaaggctctcaccgacatgccccaaatgagaatggaactggagcgtccaggcgggaatgagattactcgtggaggttcgacctcctacggaaccggatcggaaaccgaatccccacggaatccatcgtcggcaggctcgtggaattcgggaagctcgggacctggttcaacgggaaatcggaaccccggaagctcgggtaccgggggcaccgcaacttggaagccgggttcgtcgggtcctggttcgactggctcttggaactcaggtagctcaggcaccggatctactggaaaccaaaaccctggatcacctcgcccaggttcaactggtacttggaaccctggatcgagcgagcgggggtcagcaggacactggacctcagaaagctcagtttcgggttccacgggccagtggcacagcgaatcaggctccttccgacctgattccccgggctccgggaatgcacggcctaacaatcccgactggggcacttttgaggaagtcagcggaaatgtcagccctggaactagaagagaataccacaccgaaaagctcgtcacctcaaaaggagataaggagctgagaactggcaaagaaaaagtcacctccggttccaccaccacgactaggagaagctgctccaagacggtgactaaaaccgtgatcggaccagacggtcataaggaagtcaccaaagaagtcgtgacttcggaggatggatcggattgtccggaagcgatggacctcggaacccttagcggaattgggacgcttgacggatttcgtcacagacatccagacgaggcagcatttttcgacaccgccagcaccggtaaaacgtttcccgggttcttttcccccatgctgggggaatttgttagcgagactgagtctcgcgggtcggaaagcgggattttcaccaacactaaagaatcctcatcacatcatccaggcatagcagaattcccttcacgggggaagtcgagctcctacagcaagcaattcacttcctcaacttcatacaatcgtggcgattcgacctttgaatcgaagtcctacaagatggcagacgaggccgggagcgaagcggatcatgaaggcactcattcaactaaacggggacacgctaagagcagacccgtgagggactgtgacgatgtgctccagacgcatccttccggtactcagagcggtattttcaacatcaagttgcctggtagcagcaaaatcttctctgtgtattgtgatcaagaaacctcacttggcggatggctgctgattcaacaaaggatggacggatcattgaatttcaatagaacgtggcaagattacaaacgggggttcgggtcccttaatgacgagggcgagggagagttttggctgggcaatgattacctccatcttctcacccaacggggatcagtccttcgggtcgaactggaagattgggcaggtaacgaggcctacgcggagtaccatttccgtgtgggatcggaagcggaaggatacgcgcttcaagtctcatcctacgagggaaccgcgggtgacgcactcattgagggatcggtggaagaaggtgcagaatacacttcgcacaataacatgcagttctcaaccttcgatagagatgcagaccagtgggaagaaaactgtgcagaagtgtacggtggtggatggtggtacaataactgccaagccgcaaacctcaacggcatttactaccctggcgggtcgtatgatccccgtaacaactcgccgtacgagattgagaacggagtggtgtgggtgtcgtttcgtggtgcggactactcgcttcgagctgtgcggatgaaaatcaggccccttgtgacccag

SEQ ID NO: 11069 - DNA, 2598 bp, synthetic construct
  misc_feature 1..2598: note = source = /note="Description of Artificial Sequence: Synthetic coding sequence"
  source 1..2598: mol_type = other DNA
atgtttagcatgcgtattgtgtgtctggtgctgagcgtagtggggacggcatggactgccgatagcggagaaggggacttcctggccgagggcggaggagtccgagggcctcgcgtggtggagcgacaccagtccgcatgtaaagactctgattggccattttgttcagacgaggattggaactacaaatgcccatccggttgtagaatgaagggattgatcgacgaggtcaaccaagacttcaccaatcgaattaacaaattgaaaaactcgctgttcgagtaccaaaagaataacaaagactcccattcgctgaccaccaacattatggagatcctcagaggcgatttttcgtcggctaacaacagggataacacctataatcgagtttcagaagatcttcggagcagaatagaagtcctcaaacgtaaggtcattgaaaaggtgcagcacattcaactccttcagaagaatgtccgtgcgcaactggtggatatgaagcgcctggaagtcgacatcgatatcaagatcagatcctgccgcggttcctgttcgagagcgcttgctcgcgaagtggacctcaaggactatgaggatcaacaaaagcaactggaacaagttatagccaaggatctgttgccaagccgcgataggcagcatctccctcttatcaagatgaagccagtaccagaccttgtgcctggaaacttcaaatcgcaacttcagaaggtgcccccagaatggaaggcgctgaccgatatgccccaaatgaggatggaattggaacggccgggaggaaacgaaatcacccgaggcggatcaacttcatacggaactggttcggaaaccgaatccccgcggaatccttcctctgcaggctcgtggaatagcggttcctcggggcctggaagcacgggaaacaggaatccgggatcctctggcactggaggtactgccacctggaagcccggatcaagtggtcctggttccactgggtcgtggaactcaggatcctcagggaccggctccaccggtaaccaaaacccggggtccccccgtcccgggagtactggaacttggaaccctggatccagcgaacgcggatcggcaggacattggactagcgaaagttccgtctccgggtccactgggcagtggcattcggagtcgggctcttttagaccagattctccaggatcaggtaacgcacgtccaaacaatcctgattggggtactttcgaggaagtgtcaggaaatgtgagccctggaactcggagagaataccatactgaaaaactggtgacttcgaagggtgacaaggaactcagaaccggaaaggaaaaggtgaccagcggaagcaccaccacgaccagaagaagctgctcaaagaccgtcacgaaaacggtgatcgggcccgacggacataaagaagtcacgaaagaagtggtgacctcagaggacggatccgattgcccagaagcaatggacctcggtactcttagcggaatcggcactcttgatggctttagacaccgccaccctgatgaggcggccttctttgatactgcttcgactggcaaaacttttcccggttttttctcaccaatgcttggagagtttgtgtctgaaaccgaaagccggggatcagaatccggtatattcacgaacactaaagaaagctcgtcacaccatcctggcatagcagagtttcctagtaggggtaagtcgagctcgtactccaagcaattcacctcgtcgaccagctataatcgaggagactcaacctttgaatccaagtcgtacaagatggccgacgaagccggttcagaagcagatcatgaaggtacccactcgaccaagcgtggacatgcaaaatcccgccccgtccgcgactgtgatgatgtgctgcagactcatccttccgggacccagtccgggatctttaacataaagctccccggttcatccaagatctttagcgtgtactgcgatcaggaaacgtctctgggagggtggcttcttattcagcaacgaatggacggttcgctcaatttcaatcgcacctggcaagattacaagcgtggcttcggatcgcttaacgatgagggagaaggcgaattttggctgggtaatgattacctgcatctgctgacccagagaggttcagtgctgagggtggagctcgaggattgggcgggtaacgaggcctacgcagaataccacttcagagtcggatccgaggcagaagggtatgcacttcaggtgtcgagctacgaaggtaccgcaggcgatgcacttatcgaaggctcagtggaggagggagctgagtacactagccataacaatatgcagttttcaacttttgatagagatgccgatcaatgggaggagaactgtgcagaagtgtacggaggaggctggtggtacaacaattgtcaagctgcaaaccttaatgggatatactaccccggcggatcatacgatccgcgaaacaactctccttacgagattgagaacggtgttgtgtgggtttcctttcgcggcgcagactactcattgcgagccgtgaggatgaagatacggccacttgtcactcaa

SEQ ID NO: 11070 - DNA, 2598 bp, synthetic construct
  misc_feature 1..2598: note = source = /note="Description of Artificial Sequence: Synthetic coding sequence"
  source 1..2598: mol_type = other DNA
atgttttcaatgagaattgtttgtcttgttctttcggttgtgggaactgcctggaccgcagattcgggcgaaggagactttcttgcagaaggtgggggagtgaggggccccagggtagtggaacgtcaccagagcgcctgtaaggactccgactggcctttctgttccgatgaagattggaactacaaatgtccttcgggatgcagaatgaagggattgatcgatgaggtcaaccaagatttcactaatcgcataaacaaacttaagaatagcctgtttgaatatcaaaagaacaacaaggactctcacagcttgacgaccaacattatggaaattctgcgcggtgatttttcatcggctaacaaccgagataatacttacaatcgcgtcagcgaagatcttagatcgagaatcgaagttctgaaaaggaaggtgattgagaaagttcagcatattcaactgctccagaaaaacgtgcgcgcacagctggtcgatatgaagagacttgaagtcgacattgatatcaagatccgctcctgccgcgggtcgtgctcaagagcccttgcgcgagaagtggatctcaaggattacgaagatcaacagaagcagcttgaacaagtcattgcaaaggacttgctccctagccgtgaccgtcagcatcttcctcttatcaaaatgaagccagtgccagatcttgtgccaggaaactttaagagccaacttcaaaaggtgccacctgagtggaaggcactcactgacatgcctcaaatgagaatggaactcgaaaggccgggtggaaacgagattacccgcggcggctccacttcgtacggtaccggttcagaaaccgaaagcccacgaaaccctagcagcgctggatcctggaattccggatcatcaggaccaggttcaacgggaaaccgtaaccccggttcgtcaggaaccggaggaaccgctacttggaagcctggctcttccggacctggttcaaccggtagctggaattcgggtagctcgggtactggtagcactggtaaccaaaacccaggttcccccaggccagggagtactgggacgtggaatcccggatcatccgagaggggatccgcaggacattggacttcggagtccagtgtttccggttcaactggtcaatggcatagcgaatccggatcattcagacccgactcaccgggatctgggaacgccagacctaacaatcctgactggggaactttcgaagaggtgtcaggaaatgtgagccccggcactcgcagggaatatcatactgagaaactggtcacgtctaagggtgataaggaactcaggaccggcaaggagaaggttacgtcgggaagcaccactactactaggcggagctgttcaaagaccgtcacgaaaaccgtgatcggtccggacggacacaaggaagtgactaaagaagtggtgacctcggaagatggttcggactgtcccgaggcaatggatctgggtactctgtcgggtattggtactcttgatggattccgacaccgacatccggatgaagcagccttcttcgacactgcctcgaccggtaagacttttcctggtttcttctcgcctatgcttggtgaatttgtgtctgaaaccgagtcgagaggtagcgagtcgggaattttcaccaataccaaagaatcgagctctcatcatccagggattgcagagttcccttcgaggggtaagtcatcgtcctactcaaaacagttcacctcctcgacttcatacaaccgaggagattccacctttgagtcgaagagctacaagatggcagacgaggcagggtcggaggccgatcatgagggtactcattcgaccaagagaggacacgcaaagagcagacccgtcagagattgcgatgatgtgcttcaaactcacccatcgggaacccagtcgggtatcttcaatatcaaacttcctggaagctccaagatctttagcgtgtactgcgatcaggaaacctcccttggcgggtggcttctgatccaacagcgcatggatggcagcctgaactttaaccgtacttggcaggattacaagagaggatttggttcccttaacgacgaaggggaaggagaattttggctggggaatgactaccttcaccttctgacccaacgcggatccgtgcttcgcgtggaactggaggattgggcaggtaacgaagcatatgccgagtaccattttagggtcggatcggaagcagaaggatatgcacttcaggtgtcatcttacgaaggaaccgccggggatgcgctgattgaggggtccgtggaagaaggagcagaatacacctcccataacaatatgcaattctccacttttgaccgggacgcagatcaatgggaggaaaactgtgcagaagtgtacggtggcggctggtggtacaataactgtcaagcagcaaacctgaatggtatctactacccaggaggatcatatgacccccggaataacagcccatacgagatagagaacggagtcgtgtgggtgtcgttcagaggggcggattattcgctccgggcagtgagaatgaagattcgacctctcgtcacccag

SEQ ID NO: 11071 - DNA, 2598 bp, synthetic construct
  misc_feature 1..2598: note = source = /note="Description of Artificial Sequence: Synthetic coding sequence"
  source 1..2598: mol_type = other DNA
atgttcagtatgaggatcgtgtgcctggtgctcagcgttgtggggacggcctggaccgcagacagcggagaaggcgactttctggccgaaggaggaggtgtcagaggaccgcgcgtggttgaaagacaccagagcgcctgtaaggactcagactggcctttctgtagcgatgaggattggaattacaaatgcccgtccggctgcaggatgaaaggactgatcgacgaggtgaaccaagacttcaccaatagaatcaataaactgaagaacagcctcttcgaataccagaaaaacaataaggactcccactccctgactactaacatcatggaaattctgcgcggagattttagctcggcgaacaatagagacaatacgtataaccgggtttcagaggacctgcgctcgcgcatcgaggtgctgaaacgcaaggtcatcgaaaaggtgcaacatatccagctcttgcaaaagaacgtgcgggcacaactcgtggatatgaaacgcctggaggtggatatcgacatcaaaatccgatcttgccgcggatcgtgctcgcgggctctggcccgcgaggtcgacctgaaggattacgaggatcagcagaaacaactcgagcaggtcatcgcgaaggatctcctgccctcacgcgatcggcagcatcttccactcatcaaaatgaaaccggtgcctgacctggtgcccggaaacttcaagtcccaactccagaaggtgccaccggaatggaaggccctcactgacatgcctcagatgaggatggaactcgaacgcccgggtggaaatgaaatcacccggggagggtcaacctcctacggaactggttccgaaactgaatccccacgcaaccctagcagcgctggatcctggaactcgggatcgtcaggaccgggaagcactggaaaccggaaccctggaagcagcggaacgggaggcactgccacttggaaaccaggctcgtccggacctggatccaccgggtcgtggaactctggctcgtcgggaaccggctcgactgggaatcagaacccgggtagccctcgcccaggatccactggaacttggaacccaggttcatcggaacgcgggagcgcaggacactggacctcggagagttccgtctcgggatctaccgggcaatggcactccgagtccggatcattcagaccggatagcccgggcagcggaaacgctcgccctaacaacccggactgggggactttcgaggaggtatcaggtaacgtctcaccgggaactcgccgggagtaccatactgaaaaactcgtcacttccaagggagacaaggagttgcgcactggcaaggaaaaggtgacttcgggaagcacgaccaccactcgccggagctgttctaagacggtcacgaaaactgtgatcggaccggacggacataaagaggtgaccaaagaagtggtgacgagcgaagatggaagcgactgcccggaggccatggatctcggaacgctcagcggaattgggaccctggacgggttccggcacagacacccggatgaagccgcattctttgacactgctagcaccggcaagaccttcccaggattcttttccccaatgctgggcgaatttgtctcggaaaccgaaagccggggatcagagtctggcattttcactaacaccaaggagagctcctcgcatcatcctggaatcgccgaattcccgtcgcggggcaaatcctcttcatactccaagcaattcacctcgagcacttcctataatcgcggagattccactttcgaatcgaagtcgtacaagatggcagacgaagccggatccgaagccgaccacgaaggaacccacagcaccaagcggggacacgcaaaaagtagaccagtgagggactgcgatgatgtgttgcagacccaccctagcgggactcagagcggaatcttcaatatcaagctccctggctcatcaaagatcttctcggtctactgtgatcaggagacgtcgctcggtggttggctgctcatccagcagcggatggatggatccctgaacttcaatcgtacctggcaggattacaagagggggttcggatccttgaacgacgaaggcgagggagaattttggctggggaatgactaccttcacctccttactcagcgcggatcagtgttgagagtggaactggaagattgggcgggtaatgaggcgtacgcagaatatcatttccgggtgggatcagaagctgaaggatacgccctccaggtgtcgtcgtatgaagggacggccggagacgccctgatcgagggaagcgtggaagagggcgccgagtatacttcccataacaacatgcaattcagcactttcgaccgagacgccgatcaatgggaagaaaactgtgcagaagtgtatggaggaggctggtggtacaataactgccaggccgcaaatctcaacggtatctactacccaggcggctcctacgacccgcgcaacaattccccgtacgaaatcgagaatggggtcgtctgggtgtcctttagaggagcggactactccctgagggctgtccggatgaaaatccgcccgctggtcacgcag

SEQ ID NO: 11072 - DNA, 2598 bp, synthetic construct
  misc_feature 1..2598: note = source = /note="Description of Artificial Sequence: Synthetic coding sequence"
  source 1..2598: mol_type = other DNA
atgttctcgatgcggatcgtttgtctcgtcctctcggtggtgggtactgcttggaccgcagactcgggggagggtgattttctggccgaaggtggcggggtcagaggaccgcgagtggtggagcgccatcagtcagcctgtaaagactcggattggccgttctgttcggatgaagattggaattacaagtgtccgtcgggatgcaggatgaagggattgatcgatgaggtgaaccaggatttcaccaatcggatcaataagctgaagaattcgctgttcgagtaccagaaaaacaacaaggattcccactcactcaccactaacatcatggagatcctcaggggcgacttcagctcggccaacaacagggacaacacctacaaccgtgtctcggaggacctcagatcccgaatcgaggtgctgaaaaggaaggtgattgaaaaagtgcagcacatccaactgctgcagaagaatgtgcgcgctcaactggtcgacatgaaaagactggaagtggatatcgacatcaaaatccggtcctgcagaggatcctgctctcgggcactggcaagagaggtggatctgaaagactacgaggatcaacagaagcaattggagcaagtcattgctaaggaccttcttccttcccgcgatcgccagcacctgcctctgatcaagatgaagccagtcccagatctggtgccgggaaatttcaaatcacagctgcaaaaagttccgccggagtggaaagcccttaccgatatgccacagatgagaatggagctggaacgcccgggaggaaatgagatcacccgcggcggatccacctcgtacggtactggctccgaaacggaaagcccaaggaacccttcatcggccggatcctggaactcaggctccagcgggccaggttcaaccggtaaccgcaatccgggaagcagcggaacgggcggaactgcaacttggaagcccggatcatcaggccctggctcgactggatcatggaactcagggtcctcgggaaccggatcgacgggcaatcaaaatcctggcagcccgcgaccaggatcgactggaacgtggaacccggggtcgtctgaacggggatcggccggacattggacttccgagtcgtcggtgtcgggatcaaccggccaatggcactcagagtcgggctccttcagaccggacagcccgggctccggaaacgcccgcccgaataaccccgattggggaactttcgaagaggtgagcggaaatgtgtcgccgggtactcgcagggaataccataccgaaaagctggtgaccagcaagggagacaaagagctgagaactggaaaggaaaaagtgacttcaggaagcaccactactaccagacggagctgcagcaaaaccgtgactaagactgtgatcggaccagacggccacaaggaggtgactaaggaggtggtgacctcggaggacggatcagattgccctgaagccatggaccttggcactttgtcgggtatcggaacccttgacggattccgccatagacatcctgacgaggcggcgttctttgatactgcttccaccggaaagacttttcctggcttcttcagcccgatgctgggagaattcgtctcagaaaccgaatcacgcgggtcggaatctggaatctttactaatactaaggaaagctcgtctcaccacccgggaatagccgagttcccgtcgagaggaaagtcatcatcatactcgaagcaattcactagctcgactagctacaataggggagattcaactttcgagtccaaaagctacaaaatggccgacgaagcgggatcggaagccgaccacgaaggcacccactcaaccaagcggggacacgccaagagccgccctgtgagggattgcgacgatgtgctccagactcatccgtccggaactcagagcggcatcttcaacataaaactgccaggctcttcaaagatctttagcgtttactgcgaccaagagacttcgctcggaggttggctgctcattcagcaacggatggacggatcgctcaacttcaatcgcacctggcaggattacaagcgggggttcggatccctgaatgatgaaggggaaggcgagttctggctcggcaatgactacctgcacctgctcactcagcgcggctccgtcctgagagtcgaacttgaggactgggcaggaaacgaggcatacgcagagtatcacttcagagtgggatcggaggcagaaggctacgcgctgcaggtgtcctcctacgagggaaccgcaggcgatgcattgatcgagggttcggtggaggagggagcggagtacaccagccataacaatatgcaattttcgacgttcgatcgggacgcggaccagtgggaggaaaattgcgccgaggtctatggaggcggttggtggtacaataactgccaggccgcgaacctgaacgggatctactatccaggtggcagctacgacccgcgcaataacagcccatacgaaatcgaaaacggcgtggtctgggtgtccttccgcggagcggactactccctcagggctgtgcgcatgaagattcggccgctggtgactcaa

SEQ ID NO: 11073 - DNA, 2598 bp, synthetic construct
  misc_feature 1..2598: note = source = /note="Description of Artificial Sequence: Synthetic coding sequence"
  source 1..2598: mol_type = other DNA
atgttctccatgagaatcgtgtgcctggtgctctccgtggtgggcacggcatggactgctgattcaggagagggcgatttcctggccgaaggaggtggggtccgtggtccgcgggtggtggagcggcaccaatctgcatgtaaagacagtgactggcctttttgctccgacgaggattggaactacaagtgcccctcaggttgtcggatgaaaggtttgatcgacgaagtcaatcaggacttcactaatagaatcaataagctcaaaaactcattgttcgaataccagaagaataacaaggattcccactccctgaccacgaatatcatggagatccttaggggcgatttctccagcgcaaacaacagggataatacttacaaccgggtttcagaggacctcaggtcaagaattgaagtcttgaagcggaaggtgatcgaaaaggtccaacatatccagctgctgcagaaaaatgtgagagcccaactggtcgatatgaaacgccttgaagtggatatcgacatcaagattcgctcctgccgggggagctgcagtcgggcactggcccgcgaggtggatctcaaggactatgaagatcagcagaagcaactggagcaagtgatcgcgaaggacctgctgccgagccgcgacagacagcaccttccactcatcaagatgaagccggtgcccgacctggtccctggaaacttcaaatcgcagctccagaaggtgcctccagagtggaaagcgctgaccgacatgccgcaaatgcgcatggagctggaaaggcctggaggaaacgaaatcactaggggaggatccacctcttatggcactggcagcgaaacggagtccccccgaaatccgagctcagcgggaagctggaattccggatcctcgggcccagggtccaccggaaaccggaacccgggctcctcgggaaccggcggcaccgcgacttggaagccgggcagctcggggccgggatccaccggatcttggaactcaggatcgtccggtactgggtcaacggggaaccaaaatccagggtcgccgcgcccgggctccactgggacctggaatcccggttcgtccgaacgcggttcagcaggccattggacgtccgaatcttcggtgagcggcagcactggtcagtggcactcagaaagcggttcttttaggccggacagcccaggaagcggaaatgctcgccccaataatccagattggggaactttcgaagaagtgtcgggaaacgtgtcacccggaactcgccgggaataccacaccgagaaactggtcacttcgaagggagacaaagagctccggaccgggaaagagaaagtcacctcgggctcgaccaccacgacccggcgctcctgtagcaaaacggtgaccaagaccgtgattggacctgatggacataaggaggtcaccaaggaagttgtcacttccgaagatggaagcgactgcccagaggcgatggatctcggaaccctgtctggaatcggcaccctggacggtttccgccatcggcatcccgatgaggcggccttctttgataccgcatcgaccggtaagactttccccggattcttctcgcctatgctgggagaatttgtgagcgaaaccgaaagccgcggatcggagtccggtatattcaccaacaccaaagaatcttccagccaccaccccggaatcgcagaatttccttcacggggtaagtccagttcgtactcgaagcagttcacttcgtcaacctcgtacaaccgcggagacagcacttttgagtcgaagagctacaaaatggcggacgaagccggcagcgaggctgaccatgaggggacgcactcgaccaagcgcggccacgccaaatcacgccctgtgcgcgattgtgacgacgtcctgcagactcacccatccggcactcagtccggaatcttcaacataaagctgcccggcagctccaagatcttcagcgtgtattgcgatcaggaaacttccctgggcgggtggctcctgatccaacaacgcatggacggttcgctgaactttaatcggacttggcaagactacaagcggggttttggaagcctcaacgatgagggggaaggtgaattttggctgggaaatgactacttgcacctcctcacccagcgcgggtctgtgctccgcgtggagctcgaagattgggctggcaacgaagcctacgccgagtaccattttcgcgtaggatcagaagccgaaggctacgcacttcaggtgtccagctacgaaggcactgccggggacgctctcatcgaaggaagcgtggaagagggagctgaatacaccagccataacaacatgcagttcagcacgttcgatcgggacgccgatcaatgggaagaaaactgtgccgaggtttatggaggaggttggtggtacaacaactgtcaagctgcgaacctgaacggtatttactacccggggggttcctacgaccctagaaacaacagcccctacgaaatcgaaaacggagtcgtgtgggtgtcgttcaggggcgccgactattcattgcgggccgtgcggatgaaaattcggccactggtgacccag

SEQ ID NO: 11074 - DNA, 2598 bp, synthetic construct
  misc_feature 1..2598: note = source = /note="Description of Artificial Sequence: Synthetic coding sequence"
  source 1..2598: mol_type = other DNA
atgttctccatgagaatcgtctgcctggtgctgtcggtggtgggaactgcatggaccgcagactcgggagaaggcgatttcctggcagaaggcggaggggtgcggggaccgagggtcgtcgagagacaccagtcagcatgcaaggactcagactggcccttttgctcagacgaagattggaattacaagtgcccatcagggtgtcgcatgaaaggactgattgacgaagtgaaccaggatttcacgaatagaatcaacaaacttaagaattctctcttcgaataccagaaaaacaacaaagattcacattctttgaccactaacatcatggagatcttgcggggggacttctcctcagcgaacaatcgggacaatacttacaacagagtgtcggaagatctgcgcagcagaattgaagtgctgaaacgaaaggttatcgaaaaggtgcagcatatccagctgctgcagaagaacgtccgtgcccaacttgtcgacatgaagaggctcgaggtggacatcgacatcaagatccgatcatgccgcggatcctgcagcagagcactggcgagagaggtggatcttaaggactacgaagatcaacaaaaacagctcgaacaggttatcgcaaaggatctcctgccatcgagggacaggcagcacctcccattgatcaagatgaagccagtgcccgacctggtcccgggcaacttcaagtcccaattgcaaaaggtcccgcccgaatggaaggctctcacggacatgccgcagatgcggatggagcttgaacggccggggggaaacgaaattactcgcggagggagcacctcctacggaactggaagcgagactgaatcccctcgaaatccatcgtcggccggttcatggaactctggatcgtccggaccggggtccacgggaaatcggaatcctggctcctccggaaccggcgggactgcgacttggaagcctggatcgtcgggccccgggagcaccggctcatggaacagcggatcgagcgggactggatccaccggaaatcagaatccgggatcaccaagacctggatccactggcacctggaacccgggatcatcagaacgcggatccgccggtcattggacctccgaatcttcggtgtcgggttccacgggacaatggcattccgaatcaggatcatttcggccagactcgcctgggtccgggaacgctcgcccaaacaatccagactggggcacgtttgaagaagtctcgggcaatgtgtctccgggaaccagaagagagtaccacactgagaagctcgtcacctctaaaggagataaggagttgcggaccggaaaggaaaaagtgacttccggatccaccaccactactcggcggtcgtgcagcaagaccgtcacgaaaaccgtgatcggtcctgatggacacaaggaagtcacgaaagaggtggtgacctcagaagatgggagcgactgccccgaggcgatggacctgggcactctgagcggaattggaactctcgatggcttccgccatcgccatccggatgaggctgcatttttcgacaccgcttcgaccggaaagaccttccctggattctttagccctatgctcggcgaattcgtgagcgaaaccgagtcccgcggctccgaatcaggtatcttcactaataccaaagaatcctcctcccaccacccgggaatcgccgagtttccgtccagaggcaagtcatccagctactcaaagcagttcactagctcgacttcgtacaacaggggtgactccacctttgaaagcaagtcgtataagatggccgacgaggcaggatcggaagccgaccacgagggcactcactcaactaagcgggggcacgccaagtcgcggcctgtccgcgattgcgacgatgtgctgcagacccacccttcgggcacccaatcgggtatcttcaacatcaaactgccggggtcatcgaagatcttctcggtctactgtgatcaggaaacgagcctgggtggatggcttctgatacagcagcggatggatggatccttgaacttcaaccggacttggcaagattacaagcggggattcggttcactgaacgacgaaggcgagggagagttctggcttggaaatgactacctgcacttgcttactcagagaggatcggtgctccgggtggaacttgaggactgggctggaaacgaggcctacgcagagtaccacttcagagtgggatcggaagcggaaggatacgcgctgcaggtgtcatcgtacgagggtaccgcgggcgacgcgctgatcgaggggtcggtggaggagggagcagaatacacgtcccacaacaacatgcagtttagcacctttgatagagacgcggaccagtgggaggagaattgtgccgaagtgtatggtggtggttggtggtacaacaattgccaggccgcaaacctgaacggaatctactaccctggcggatcatatgaccctcgcaacaattcgccttatgagatcgaaaacggagtggtgtgggtttccttccggggcgctgattactcactgcgcgcggttcgtatgaaaatccgcccgctggtgacgcag

SEQ ID NO: 11075 - DNA, 2598 bp, synthetic construct
  misc_feature 1..2598: note = source = /note="Description of Artificial Sequence: Synthetic coding sequence"
  source 1..2598: mol_type = other DNA
atgtttagcatgcggattgtgtgcctggtcctgtctgtcgtgggaaccgcctggaccgctgattcaggggagggcgattttcttgctgagggtgggggcgtaagaggcccaagagtcgttgaacgacaccagagcgcctgtaaagactcagattggccattttgttctgatgaggattggaattacaagtgcccttctggttgccgaatgaaagggctgattgatgaggtaaatcaagactttacaaatagaataaataagttgaagaacagcctgttcgagtaccagaagaacaacaaagattctcactctctgacaaccaatatcatggagatcctccggggagatttttcatcggccaataaccgtgacaatacatacaacagagtgtctgaagatctgcgctctcgcatcgaggttttaaagcgcaaggttatagaaaaggtgcagcacatccagctgctgcagaaaaatgtgagggcccaactggttgacatgaagagattggaggtggatatcgatattaaaatcaggtcctgcaggggctcctgctctcgcgccttggcccgagaggtggatctcaaagattatgaggatcagcagaaacagctggagcaggtgatagcaaaggatctgttgcccagtcgggataggcagcatctgcccctgattaagatgaaacccgtgccagatcttgttcccggaaatttcaagtctcaactacaaaaggttccaccagaatggaaggcactgaccgacatgccgcaaatgcggatggaactcgagcggccaggcggaaatgagatcaccagaggggggtctaccagctacggaacaggtagcgagaccgaatcacctaggaatcctagttccgcgggatcttggaattctggatcgtccggacccggttccaccggcaaccggaatcctggttctagcgggactggagggaccgcgacgtggaagcccggttcctcaggccctggctcaaccgggtcctggaactctggcagctcagggaccggtagcacagggaatcagaatcctggctccccaagacctggctcaaccggtacttggaatcctggttccagtgaacgtggatcagcgggccattggacctccgagtctagcgtttctggctctacaggccagtggcactcggaaagcggcagttttaggcccgatagtccaggttctggcaatgcacgccctaacaaccccgattggggcacctttgaggaggtgagtggtaatgtcagtcccggtaccaggcgggaataccacactgaaaagctcgttacgagcaagggcgacaaagagctaaggacagggaaggaaaaggtaaccagtggctcaaccactacgacccggcggtcttgtagtaagaccgtcaccaaaaccgttattggccccgatgggcacaaggaggtcacgaaggaagtggtgactagtgaagacgggagcgattgtcccgaggccatggacctgggaactttatcagggatcgggactctggatggatttaggcatcgccacccagacgaggcggccttttttgacaccgcgtccaccggaaagacattccctggattcttttcacctatgctcggggaattcgtgtccgagactgagagtaggggtagcgaaagcggcatctttaccaacacaaaggaatctagctcgcatcacccaggaatcgccgagttccctagtagaggaaagtcttccagttactcaaagcagttcacttccagcacatcttataataggggtgatagcacgttcgagtctaagtcatacaagatggccgacgaggctggctctgaagctgatcacgagggaactcacagtacgaagcgtgggcacgcaaaatctcggccggtgcgagactgtgacgacgtccttcagacacacccctctggaacacaaagtggcattttcaacatcaaactcccaggctctagcaagatcttcagtgtgtactgcgaccaggaaacatctctagggggatggttgttgatccagcagcgcatggacggcagcctgaactttaacagaacctggcaggattacaaacgaggattcggttcactcaacgatgagggtgagggagaattctggctcggaaacgattatttgcacctgctcactcagagaggctccgtccttcgcgtcgaactggaggactgggccggcaacgaggcatacgccgagtatcatttccgcgttggcagtgaggcggagggctatgcgctgcaggtgtcttcttatgagggaaccgccggtgacgccctaatagagggcagtgtcgaggaaggagccgagtacacaagccataacaatatgcagttttctaccttcgacagggatgccgaccagtgggaggaaaactgcgccgaggtgtacgggggcggttggtggtataacaactgtcaggcagcgaatttaaatggaatttactatccaggagggtcgtatgacccacgcaataacagcccttacgaaatagagaatggagtggtatgggtgagctttcgaggagctgactattccctacgggccgtgcggatgaagatccgcccactcgttacccag

SEQ ID NO: 11076 - DNA, 2598 bp, synthetic construct
  misc_feature 1..2598: note = source = /note="Description of Artificial Sequence: Synthetic coding sequence"
  source 1..2598: mol_type = other DNA
atgttctcgatgcgcatcgtctgcctggtgctaagtgtcgtggggacagcctggacagcagactccggagaaggagatttcctcgccgaaggcggaggcgtgcgaggcccacgggtggtggaaagacaccagagcgcttgtaaagattcagattggccgttctgctcagatgaggactggaattataagtgtccatccggctgccgaatgaagggcctgatcgatgaggtgaatcaggattttaccaacaggatcaacaagctgaagaatagccttttcgagtatcagaaaaacaataaggattcacatagtctcaccaccaacattatggagattctacgcggcgatttctcatccgccaataatcgggataacacatataatcgcgtgtctgaagacttgcgatcacggattgaagtgctgaaacgcaaagtaatcgaaaaggtgcagcacatacagctcctgcagaagaacgttcgggcccagctggtcgatatgaagaggctcgaggtggatatcgatatcaaaatccgaagctgcagaggctcttgctcacgagccctcgcccgggaggtggatctcaaggactatgaagaccagcaaaagcagcttgaacaggtgatcgccaaagacctgcttcctagtcgcgatcgtcagcacctacctcttatcaaaatgaagcctgtgcctgacctggtcccgggcaacttcaaaagtcaactccagaaggtcccccccgagtggaaggccttgacggacatgccgcagatgagaatggaactcgaaaggccgggtggcaacgaaatcacccgtggtggcagcacatcatatggcacagggtctgagaccgagtcaccccgaaacccgtcatctgcaggatcatggaactccggctcaagcggacctggttccacggggaacaggaatccaggttcaagtggtactggcgggactgctacttggaaaccgggatcatcaggccctggcagcacaggctcttggaactccggttcttccgggacgggctccacaggcaaccagaaccccggctccccaaggcccggcagcacgggcacttggaacccgggcagctccgaaaggggaagtgccgggcactggacatccgaaagttcagtgtctggatccacagggcagtggcatagtgagtctgggagctttcggcctgactcccccggctcaggtaacgcccgtccaaataatcccgactggggaaccttcgaagaagttagcggaaacgtcagccctggcactcggcgagagtaccacactgaaaagttggtgactagcaagggcgacaaagagctgcggacgggcaaggaaaaggtgacaagtgggagcacaactactactcggcgctcctgtagtaagactgtcacgaaaactgtgattggccccgatggacataaggaagtgaccaaagaggtggtcacttcagaggacggctctgactgcccagaggcaatggacttgggcaccctctccggcatcggtacccttgatgggtttcgacaccgccatccggatgaggctgccttttttgacactgcgtcaactggcaaaaccttcccaggctttttcagccctatgctcggcgagttcgtcagtgaaaccgagtcgcgagggtccgagtccggaattttcacaaatactaaagaatcaagcagccatcacccaggcatcgccgaattccccagcaggggcaagtcgtcttcttactccaaacaattcacatcttccacctcctacaaccgcggcgactccacattcgaatccaagagctataagatggccgatgaggcagggagcgaggcagatcatgaagggacacacagcacgaaaagaggacacgcgaaatcaagacctgttcgggactgtgatgacgtcctgcagactcacccatccggcacccagtctggcatcttcaatattaaactgccggggtcgagcaagattttctccgtttattgcgatcaagagacaagcctgggcggatggcttctgattcagcagagaatggatggctccttaaatttcaacaggacatggcaggactacaaacgggggtttggatcactgaacgacgagggagagggagagttctggcttggcaatgactacctgcatttactgacccagcgaggttccgtcctgagggttgagcttgaagactgggcaggtaacgaagcctatgccgaatatcactttcgggtgggctctgaagccgaagggtatgcattacaggtttcatcttatgagggcaccgccggagatgctctcatagaggggtccgtcgaggagggtgcagagtacactagtcataacaacatgcagttcagcactttcgaccgtgacgcagaccaatgggaggagaattgcgcagaggtctatggagggggctggtggtataacaattgccaggctgcgaatctcaacggcatctactatcctggggggtcctacgaccccaggaataacagcccctatgaaatagaaaatggtgttgtgtgggtgtccttcaggggcgcagactactcgctgcgagctgtccgaatgaaaattcgacccctcgtaacgcaa

SEQ ID NO: 11077 - DNA, 2598 bp, synthetic construct
  misc_feature 1..2598: note = source = /note="Description of Artificial Sequence: Synthetic coding sequence"
  source 1..2598: mol_type = other DNA
atgttctctatgcggattgtgtgtctcgtcttatccgtcgtgggtacagcttggacagctgattctggtgaaggagatttcctggccgagggcgggggcgttagaggtccacgggttgtcgagcggcaccaatcagcttgtaaagactctgactggccattctgttcagatgaggattggaattacaaatgtcccagcgggtgtcgcatgaagggtctgattgatgaagttaaccaggactttaccaaccggattaacaagctcaagaattctctgtttgagtaccagaaaaacaataaagactctcactcactcacgactaacatcatggagattctgagaggtgacttcagctcagctaacaaccgggataacacctataacagagtgagtgaagatctgcgaagcaggatcgaggtgctcaagcggaaggtgattgaaaaggttcagcacattcaactgctacagaaaaatgtacgcgctcagctggtggacatgaaacgcctcgaggtggacattgatatcaagatccgatcttgcagggggtcctgctcccgggcgttagccagggaagtggatcttaaagactacgaagatcagcaaaaacaactcgaacaagtcatcgctaaggacctgcttccatctagggatagacagcacctccctcttatcaagatgaagccggtgcccgatctagtacctggtaatttcaagagccagcttcaaaaagttcctcctgagtggaaagctcttacagatatgccacaaatgagaatggaactggagcggccaggaggtaacgaaatcacacggggagggagtacatcttatggtaccggcagtgagactgaatcacctcgtaacccgagcagcgcaggttcctggaattcagggtctagtggccccgggagcacggggaacaggaatccagggagtagcggaacaggtgggacagccacctggaagcccgggagctccgggccaggtagcaccgggagttggaacagtgggtcttctggcaccggcagtactggcaatcaaaatccaggaagtccaaggcccggcagtaccggcacgtggaaccctggctctagcgagagaggcagcgcaggacactggacatcagaatcttcagtttccggatctactggacagtggcattccgagagtggcagcttcaggcccgacagcccagggagtggcaatgcaaggcctaacaatcctgactggggcacttttgaagaggtttcaggaaacgtgtcccccggcacccggcgcgaatatcacactgaaaagctcgtgactagtaaaggtgataaggagctcaggacaggaaaagaaaaagtgacgtcaggctccactactacaacgagaagaagctgctctaaaacagtaaccaagactgtgattggcccggatgggcataaggaggtgaccaaggaggtcgtcacgtctgaagacggctcagattgccctgaggcaatggatttaggtacactgtccgggataggcacacttgacggatttcgccatcgacatcctgacgaggctgcattttttgataccgcaagcacggggaaaaccttcccaggattcttctctcctatgctcggcgagtttgtctcagaaacagaatctcgaggttcagagagcggcatctttactaacacgaaagagtcatctagccatcatcctggcatagcagagttcccaagcagaggcaagtcctcctcgtactccaagcagtttacctcatccacctcctataatcgtggcgactccacattcgagtccaaatcttacaagatggcagacgaggcaggatctgaagccgaccacgagggcacacacagtactaagagaggacacgctaaatcgcgccctgtgagagattgcgacgatgtgctgcaaacgcaccctagcggaacacagtcagggatttttaacatcaaactcccaggctcaagtaagatttttagcgtgtactgtgaccaggaaacttcccttggcgggtggctgctaattcagcagcgcatggatggcagcctcaatttcaaccgcacttggcaggattataagagaggcttcggatccctcaacgatgagggcgaaggggaattttggctcgggaacgattatcttcatctgctgacccagagaggttcggtgctgagagttgaattggaggattgggctgggaacgaagcctatgcagaatatcacttccgggtgggctccgaagccgaaggatacgcgcttcaggtgtcttcatatgaaggcaccgcgggtgacgccctgattgaggggtccgtggaggaaggggcagaatatacatctcataacaacatgcagttttccacctttgacagagatgccgatcaatgggaggagaattgtgcagaggtctacgggggcggttggtggtacaataactgccaggcggccaacctgaacgggatttactatccaggaggctcatacgaccccagaaacaactccccgtacgagatcgaaaatggagtcgtgtgggtttctttcagaggagctgactattcgcttcgggctgtgcgcatgaagatccggcctttagttacacag

SEQ ID NO: 11078 - DNA, 2598 bp, synthetic construct
  misc_feature 1..2598: note = source = /note="Description of Artificial Sequence: Synthetic coding sequence"
  source 1..2598: mol_type = other DNA
atgtttagcatgagaatcgtgtgtcttgtactgtctgtggtcggaaccgcttggaccgccgactcgggagaaggcgatttccttgctgaaggcggcggtgttaggggacccagagtggttgagagacaccaaagtgcctgcaaagacagcgattggcccttctgctcggacgaagactggaactataaatgtccaagtggctgtaggatgaaaggacttattgacgaggtgaatcaggacttcacgaaccggatcaataaactcaaaaactctctctttgagtaccaaaagaacaacaaggattcccactcgctgacaacaaatattatggaaattctgagaggcgatttttctagtgcgaataacagagataacacctataatagagtgtcggaagatctgcgctccagaatagaggtgttgaagagaaaggtgatcgagaaggtccagcacatacaacttttgcagaagaacgttcgagcgcagctggtcgacatgaagaggctggaggttgacatcgatattaaaatacgctcatgtcgtggaagctgctctcgcgctctagcacgtgaggtggatctcaaggactacgaagatcagcagaaacaactggagcaggtgattgctaaagacttgctgccctctcgcgatcgtcagcatctcccccttataaagatgaaacctgtccccgacctagtgccaggtaactttaagtctcagctccagaaggtgcctcctgagtggaaagcactaacagatatgcctcaaatgcggatggaattggagcggcccgggggtaacgaaattacccgcggcggttcaacgtcctatggcaccgggagcgagactgagagtcctcgaaacccatccagcgccgggagctggaatagcgggagctctggtcccgggtccaccggaaacaggaatcccgggagcagcggcacaggtggcaccgctacctggaagccagggtccagtgggcctggttccaccgggtcctggaacagcggcagtagcggtacagggtccacgggcaatcaaaacccagggtcacctcggccaggctccactggcacctggaacccagggagcagtgaacggggatccgccggtcactggacatctgaaagtagcgtaagcggctctactgggcagtggcactcagagagtggatccttcagacctgactctcccggaagcggtaatgcccggccaaataaccccgactgggggacctttgaggaggtcagcggcaacgtcagtccgggaactaggcgggaataccacaccgagaaactggtgacttccaagggcgataaggagcttagaactgggaaagagaaagtgacaagcggctccacaaccactacaaggcggtcctgttcgaagaccgtcaccaaaactgttattggtcccgatggacacaaagaggtgaccaaggaagtggtgacttcagaggatgggagtgattgtccagaagctatggatctcggtacgttgtctgggatcggaacactagatggttttagacacagacacccagacgaggccgccttcttcgatacggccagtacaggcaagacctttccaggcttttttagccctatgttgggcgagttcgtctcggagaccgagtctcgcgggtccgagtcaggtatttttactaacaccaaggaaagctccagtcaccatcctggtatcgctgaatttccttcgagaggtaagtccagcagttactctaagcagtttactagcagcacctcatataacaggggcgactctaccttcgaatcaaagtcttacaagatggccgatgaagcaggatccgaagcagatcacgagggtacccactctaccaagagaggacatgccaaaagtcgccccgtgagagactgtgacgatgtgctacaaacacatccttccggaactcagtccgggattttcaatatcaagctgccaggcagcagcaagatattttccgtatattgtgatcaggagacaagcctgggcggctggctgcttattcaacaacggatggacggcagcctgaacttcaaccgaacatggcaggactataaacgtggattcggttccctgaacgatgagggtgagggagagttctggctcgggaacgactacttgcacctccttacccagaggggaagcgtgttaagagtggaactagaggactgggccgggaacgaagcttacgccgagtaccacttccgggtgggtagcgaggccgaggggtacgccctgcaggtgtcctcttatgagggtaccgcaggcgatgcactcattgagggctcggttgaagagggggcagagtacacgagccataacaacatgcagtttagcacatttgacagagatgccgaccaatgggaagaaaactgcgcagaagtgtacggtgggggttggtggtacaacaactgccaggcagccaacctgaacggtatttattatcccgggggcagctatgacccccgcaataattctccttatgaaattgagaacggcgtggtctgggtcagcttccggggcgccgactactccctgagagccgtccgaatgaagatacgccctctcgtcacccag

SEQ ID NO: 11079 - DNA, 2598 bp, synthetic construct
  misc_feature 1..2598: note = source = /note="Description of Artificial Sequence: Synthetic coding sequence"
  source 1..2598: mol_type = other DNA
atgttttcgatgcgaattgtttgtctggtgctttcagtggtcggtactgcatggaccgcagactcgggagaaggagatttccttgctgaaggaggaggagtgcggggaccgagagtggtggaacgtcatcaatcggcatgtaaggactcagattggcccttttgttcggacgaggattggaattacaagtgtccatcgggatgccggatgaaaggactgattgatgaagtgaatcaagattttactaaccgcattaacaagctgaagaatagcttgtttgaataccagaagaacaataaggactcgcattcgcttactactaatatcatggaaattctgagaggggatttttcaagcgcaaacaacagagataacacctataacagagtgtcagaagatctccggtcgcgcatcgaggtcctgaagcgtaaggtcatcgaaaaggtccaacatattcagcttctgcagaaaaacgtccgcgcacagcttgtcgatatgaagaggctcgaggtagacatcgatatcaaaatccgttcgtgtagaggctcgtgctccagagccctggctagagaggtggatcttaaggattatgaagatcaacaaaagcagcttgagcaggtgattgcaaaggacctgctcccatctcgggatcggcagcacctgccactcattaagatgaagcccgttccagatcttgtgccagggaatttcaagtcgcagcttcagaaagtgccccctgaatggaaagcattgactgatatgcctcagatgcggatggagctggaaagaccgggcgggaatgagatcacccgaggtggatcgacttcgtacggtaccggttccgaaacggagtctcctagaaatccatcgagcgcgggatcctggaacagcggtagctcgggaccaggaagcactggaaaccgcaatccaggttcttcgggtaccggtggcaccgcaacttggaaacccgggtcatcggggcctgggtcgaccggtagctggaattcaggctcttccggcactgggagcaccggcaaccagaacccgggatctccccggcctggatcgactggtacctggaaccccggatcgtcagagcgcggatcagcaggtcactggacttcagagtcctccgtgtcgggctccaccgggcagtggcacagcgagtccggttcgttccgcccagatagcccaggtagcggaaacgcacgcccgaataaccccgattggggaactttcgaggaggtgtccggtaacgtgtccccaggaaccagaagggaatatcataccgaaaaactggttacttcgaagggagataaggaacttcgcactggaaaggagaaggtgacgtccggcagtaccaccactactaggaggagctgttcgaaaaccgtcacgaaaactgtcataggtccagatggacacaaggaagtgaccaaagaggtggtgaccagcgaggacggatcggattgtcccgaggcaatggatctgggaaccctgagcggaataggtaccctcgacggatttcgtcaccggcatccagacgaagcggcgttctttgatactgcgtcaaccggcaaaacttttcctggcttctttagccctatgcttggagaatttgtctccgaaaccgagtcacggggttccgagtcgggaatcttcacgaataccaaggagtcatcctcgcatcatcccgggatcgcagaattccctagccgggggaaatcgtcctcctattccaagcaatttaccagctccacgtcatacaacaggggcgattcgaccttcgagtccaagtcctacaagatggcagatgaagcaggaagcgaggcggatcacgaaggtacccatagcacgaagcggggacatgcaaagtcgaggcccgtgcgggattgcgacgatgtgcttcaaactcacccttcaggtactcagtccggcatctttaacatcaaactgcctggatcctcgaaaatctttagcgtctattgtgaccaagaaacctcactgggtgggtggctgcttattcagcaaagaatggatggatccctgaactttaaccggacctggcaggattacaaacgcggtttcggatcactgaatgatgaaggagagggggagttttggcttggaaacgattaccttcacctgctgacccaaagaggatccgtcttgcgagtggaacttgaagattgggcaggcaacgaagcatacgcagaataccatttccgtgtgggatccgaagccgaaggttacgctcttcaagtctcgagctacgagggcactgcaggggacgctctcattgagggatcggtcgaggaaggggcagaatacacgtcccacaataacatgcagttctcgacgttcgatagagacgccgatcaatgggaagagaattgtgcagaggtgtacggaggcgggtggtggtacaacaattgtcaagcagcgaacctcaatggaatatactacccaggtggatcgtacgacccaagaaacaactcaccatacgagattgagaacggtgtcgtctgggtcagttttcgcggtgcagattacagcctccgggcagtgagaatgaaaatacgaccgctggtgactcaa

SEQ ID NO: 11080 - DNA, 2598 bp, synthetic construct
  misc_feature 1..2598: note = source = /note="Description of Artificial Sequence: Synthetic coding sequence"
  source 1..2598: mol_type = other DNA
atgttcagcatgaggattgtgtgtctagtcttgtcagtcgttgggacagcttggactgcagactctggagaaggtgatttcttagccgaaggaggtggagttcggggccctcgtgtggttgagaggcaccaatccgcttgcaaggacagtgactggccattctgctctgacgaggactggaattataaatgtccatccggctgccgtatgaagggactcatcgatgaagtgaaccaagatttcaccaaccgcattaacaagttgaagaatagtctgtttgagtatcaaaagaacaacaaggacagccactctttgacaacaaatataatggagatccttaggggcgatttttctagcgcgaataatcgggataatacctataacagagtctccgaagaccttcgcagcaggattgaggtgctgaagcgcaaggtaatcgagaaggtacagcacatacaactgttgcagaagaacgtcagggctcaacttgtcgacatgaaacgcctggaagtggacatcgatattaagattaggtcttgtagaggctcctgttcacgggcattagcacgggaggtcgacctgaaagattacgaggaccagcagaagcagctggagcaggtcatagccaaggacttactccccagtagggatagacagcatcttccactaataaagatgaagcccgttcctgacttggtgccaggcaatttcaagtcacagctccagaaagtccctcctgagtggaaagccctgacagatatgccacagatgcggatggagctggagagacccgggggaaacgagatcactaggggcgggagcacttcctatgggaccgggtcagaaactgaaagtcctaggaacccatcgtctgccggcagctggaattccggctcttctgggccggggagcacaggaaatcggaaccccggaagtagcggcacaggaggaacggcaacatggaagcccgggtctagtgggcctggttccacagggtcctggaattccggttcgagcggtaccggctccaccggaaatcaaaatcccgggtcccccaggcccggatctacaggaacatggaaccctggtagttccgagagaggatctgccggccactggacgtcagagtctagcgtgagcgggagcactggacagtggcacagtgaaagcggctcgtttcgccccgactcacccggaagcggaaacgcacggcccaacaaccccgattggggaacatttgaggaagtgagcggcaacgtgtcccccggcactcggcgcgaataccatacggagaagttggtgacttctaagggtgacaaggagcttagaacggggaaagagaaagtgacttcgggcagtacgacaaccacccgcaggtcttgcagcaaaacggtgacaaaaaccgtgatcggccccgatggacacaaagaggttacaaaggaggtggtcacaagcgaggacggctccgattgcccagaagccatggacctcggcacattgtctggcattggaactctcgatggattccgtcacagacaccctgacgaggccgccttctttgacaccgcttccaccggaaagacatttcccgggttcttcagtccgatgctcggtgaatttgtgtcggaaaccgaatcccgcggatctgagagcggaattttcacaaacaccaaggagtcctcttcccatcacccaggaatcgccgagtttcctagccgcgggaagtccagtagttacagtaagcagtttacctccagtacgtcttacaaccgcggggactccactttcgaatcaaaatcttacaagatggctgatgaggcggggagtgaagccgaccacgaggggacacactccacaaaaaggggacatgctaaatcaagaccggttagagactgcgacgatgtactgcagacacatccctccggcactcagagcggcatattcaacattaagctgcctggctcgtccaaaatattctctgtctattgtgatcaggagacgtcactgggcggatggctcttgattcagcagcggatggatggctcactgaactttaaccgaacttggcaggactataaaaggggattcggtagcttgaacgacgagggagaaggggagttctggctcgggaacgactatctgcacttgttgacgcagaggggctctgtactcagagtcgaactggaggattgggcggggaacgaggcatacgccgagtaccacttcagagtgggttccgaggccgaagggtacgccctgcaggtttctagctacgagggtacagcgggcgacgcgctcatcgaaggttccgtggaagagggggctgagtatactagtcacaataatatgcagttctctacattcgacagagacgcggatcaatgggaggaaaattgcgccgaggtatacggcggaggttggtggtacaacaactgtcaagctgccaacctgaacgggatttactacccaggcggctcttacgatccccgcaacaactccccatacgagattgaaaacggggtcgtgtgggtgagctttcggggagctgactactctttgagggcagtccgcatgaagatacggcctctggtgacccag

SEQ ID NO: 11081 - DNA, 2598 bp, synthetic construct
  misc_feature 1..2598: note = source = /note="Description of Artificial Sequence: Synthetic coding sequence"
  source 1..2598: mol_type = other DNA
atgttctcaatgagaatcgtatgcctggtcctttccgttgttggcaccgcctggactgcagactcaggggagggcgacttcctggccgagggaggcggcgtgcgtggtccccgcgtggtggaacgccaccagtctgcatgcaaggattctgattggccattctgttccgatgaggactggaactacaagtgtccttccggctgtcgtatgaagggactgatcgatgaggttaaccaggatttcacgaaccgcatcaacaagttgaagaattcacttttcgaataccagaagaataacaaagactcccactcccttactactaatattatggagattttgcgcggtgatttcagctccgcaaataatagggacaacacgtataaccgggtttctgaggatctgcggtcccgcatcgaggtcctcaagcgtaaggtcatcgagaaagtgcaacacatccagctgttgcagaagaatgtcagagcgcagttggtcgatatgaagcgtctcgaggttgatattgatatcaagattcggagctgccgcggcagctgctcacgcgctctggcacgtgaggtggacttgaaagattacgaggaccagcaaaagcagctcgagcaggtcattgctaaggaccttttaccttctcgggacaggcagcatctccccctgattaagatgaagcccgtcccggaccttgtgcccggcaactttaagtcccagctgcaaaaggtcccccccgagtggaaggccctgacggacatgccgcagatgcgtatggagctggagcgtcccggcggtaacgaaataacccgcggtggtagcacctcctacggaactggatcggaaacagagtcaccccgcaaccccagtagcgccggctcctggaactcgggcagttctggacccggtagcactggtaacagaaaccccggatcctcgggaactggaggcaccgctacgtggaagcccggatcctccggaccgggctccaccggctcctggaactccggttcttcgggcaccggcagcactggaaaccagaatcctggcagtcctcgccccggcagcaccggtacctggaatcccggaagctccgagcggggcagcgccggacattggacatctgagagcagcgtctctggctccacgggacaatggcacagcgagtcaggttcctttcgccccgattcccccggttcgggcaatgccagacctaataatcccgattggggtacttttgaggaggtttccggtaacgttagccccggcacacggcgggagtatcacacagagaagttggttacgagcaagggcgacaaggagcttcgtaccggcaaggagaaggtgacctccggtagtaccaccaccacccgtcgatcctgttcgaaaaccgtcaccaaaaccgtcattggaccggacggacacaaggaggttaccaaggaggttgtgacgagtgaggacggctctgactgtcccgaggccatggacctgggtaccttatctggtattgggacgctggatggatttcggcataggcaccctgacgaggccgccttcttcgacacggcttcaacgggtaagacgttccccggcttctttagcccgatgttgggcgaatttgtttctgagaccgagtctcgtgggagcgagtccgggattttcacaaacaccaaggagtcctcttcacatcaccccggcatcgctgagtttccgagccgcggcaaaagcagctcctattcaaagcagttcacctcttccacgtcctacaatcgtggtgacagcacttttgagtcgaagagctacaagatggccgacgaggccgggtcggaggccgaccacgagggcacccactccactaaacgcgggcacgcgaagtcccggcccgtgagagactgtgatgacgtccttcaaacccatcccagcggaactcagagcggaatttttaacatcaagctgccaggatcatccaagatcttttctgtgtactgcgatcaggagacgtctctcggcggctggctgttgatccagcagcgtatggacggatccctcaacttcaaccgcacctggcaggattataagcggggttttgggagccttaacgacgagggcgagggggaattctggctcggtaatgactatctacatctcctcacccagaggggttctgtactacgcgtcgaactcgaggattgggccggcaacgaggcctatgctgaataccacttccgtgtgggttccgaggccgagggctacgcccttcaggtttcctcctacgaggggaccgccggcgacgccttaattgagggttcggttgaggagggcgccgagtatacaagccacaacaacatgcagtttagtaccttcgatcgcgatgctgaccagtgggaggaaaactgcgccgaggtctacgggggcggctggtggtacaataactgccaggccgctaaccttaacggtatctactaccctggtggctcttatgaccctcggaataacagtccgtacgaaatcgaaaatggagtggtctgggtctcgttccgtggcgctgactactccttgcgtgcagtccggatgaaaatcagaccactggtcacgcag

SEQ ID NO: 11082 - DNA, 2598 bp, synthetic construct
  misc_feature 1..2598: note = source = /note="Description of Artificial Sequence: Synthetic coding sequence"
  source 1..2598: mol_type = other DNA
atgttcagcatgcgcattgtgtgcctggttctctccgtggtagggaccgcctggacagctgatagcggagaaggagatttcttagctgaaggtgggggtgtacgaggcccaagagtggttgagaggcaccagtctgcatgcaaggattccgactggccattttgttctgatgaggattggaactataagtgcccaagcggatgccggatgaaggggctcatcgacgaggtgaaccaagattttacaaacagaatcaacaagctaaaaaatagtctgttcgaatatcagaagaataacaaagacagtcactccctgaccacaaacatcatggaaatactccggggagatttttcaagtgctaataacagggacaacacttataatcgtgtaagtgaggatctaaggtctcgaattgaggtgctaaaaaggaaggtgatcgaaaaagtccagcacattcagcttttacagaaaaatgtgcgggcccaactcgtagatatgaagagactcgaggtggacatcgatatcaagatccgttcctgccggggctcctgcagcagggcattggctcgcgaagtggatctgaaggattacgaagaccagcagaaacagctcgagcaggtaatcgctaaagacttgctgccatctcgggaccggcagcacttgcccctgattaagatgaagccagtgcccgacctggtgccgggtaattttaaatcgcagctccagaaagtacccccagagtggaaagctctgacagatatgccacaaatgagaatggaacttgaacggcccggcggcaacgaaatcacccgaggcggtagtacaagctacggtacgggatccgaaacagagtctcctagaaatccaagctcagcaggctcctggaacagtggctcatcaggaccaggctcaactggcaaccggaatccgggtagtagcggcaccgggggcacagccacctggaaaccaggcagctccggaccaggtagcacaggctcatggaatagcggttcttctggaactggctccacaggaaaccagaaccccggcagccctaggccgggcagcacgggaacctggaatccaggaagctcagaacgaggtagcgctgggcactggacctccgaaagctcagtctcaggctcaacaggccagtggcactctgagtctggatcatttcggcccgacagccctgggtcaggcaacgccagaccaaataaccctgactggggtaccttcgaggaagtctcaggcaatgtctcaccaggcacaagacgtgagtaccacacagaaaaactggtgacctccaaaggagacaaagagctccggaccggcaaggagaaggtcacctccggttcaaccactaccactcggagaagttgctcaaaaaccgtgactaaaaccgtgatcgggccagacggccataaagaggttacaaaggaagtagtgacaagcgaagacggatccgattgtcctgaggctatggacttaggcaccctgtcaggaattgggaccctggacgggtttcgacataggcatccagatgaggccgctttttttgatactgccagcaccgggaagacctttcctggcttttttagtcccatgctcggcgaatttgtgagcgagacagaaagcagaggatcagaaagtggcatatttacaaataccaaggaatcatcctcgcaccaccctggcattgcagaatttccatctcgcggcaagtcctcctcttatagtaagcaattcacttcatcaaccagctacaaccggggagattctacattcgagagcaaatcatataaaatggccgatgaggcaggcagtgaagctgatcacgagggaacccactccaccaaacgtgggcatgccaaatctcggccagtacgtgactgcgacgacgtcctccaaacacacccgtccggaactcagagcggcatttttaacatcaagttgccagggtcgagcaagattttcagcgtctattgcgatcaggaaacctccctgggaggctggttgctcattcagcaacgcatggatggttccctcaatttcaaccgaacatggcaggactataagcgaggttttggttctttgaatgacgagggggaaggcgaattctggctgggtaatgactatctgcacctgctcacgcagagaggaagcgtgcttagagtggaactggaggattgggctggcaacgaggcctacgcagagtaccactttcgcgtcgggtctgaggcagaggggtatgctctccaagtaagctcctatgaaggaacggcgggcgatgccctgatcgagggctccgtggaggagggcgctgagtatacaagtcacaacaacatgcagtttagtacctttgatcgcgacgctgaccaatgggaagagaattgtgccgaagtttacggcggaggatggtggtataataattgtcaggcagctaatctgaacggcatctactaccccggggggtcgtatgacccccggaataattcaccatacgagatcgaaaatggtgttgtgtgggtgtctttccgcggcgcagactacagtctgcgggccgtaagaatgaagatacgtcccctggtgacccag

SEQ ID NO: 11083 - DNA, 2598 bp, synthetic construct
  misc_feature 1..2598: note = source = /note="Description of Artificial Sequence: Synthetic coding sequence"
  source 1..2598: mol_type = other DNA
atgttttctatgagaatcgtgtgtcttgtcctgagcgtggtgggtacagcgtggacagcagattcaggggagggcgacttcctggccgagggtggaggagtacgagggccacgagtcgttgagagacatcagtctgcttgcaaggatagtgactggccattctgctctgatgaagattggaattataagtgcccctcaggatgcaggatgaaaggattgatcgacgaagtgaaccaagatttcactaaccgcattaacaagcttaaaaacagcctgtttgaataccagaaaaacaacaaggactcccacagtctcacaaccaatattatggagatcctgcgcggtgacttctcatctgctaataaccgtgacaacacttacaacagagtgtccgaagatctcagatctaggattgaggtactgaagcgaaaggttatagagaaggtgcagcacatccagctgctacaaaaaaatgtcagggctcagctggttgatatgaaaagactcgaggtggacatcgatatcaagataagaagttgtcgggggtcttgttcacgggctctggcccgagaagtggatctcaaggattatgaggatcagcagaagcagctggaacaagtgattgccaaggatcttctcccttcacgggacagacaacatttaccactcattaaaatgaagcctgtgcctgatttggtacccggaaacttcaagtcacaactccagaaggtccctcccgaatggaaagcactcacagacatgccccagatgagaatggagctggaaagaccgggaggtaatgaaataaccaggggtgggagcacaagctatggcacgggttccgaaacggagagccccagaaatccgtcaagcgccggctcctggaactccgggtcatcggggccaggaagtaccgggaacaggaaccctgggagttctggcaccggaggaactgctacatggaaaccaggcagttcgggaccaggttcgaccggaagttggaactctggtagcagtggtaccggttctacaggtaaccagaatcctggatctcccaggcctggatccacaggaacttggaatcccggctccagcgagcgcggatccgctggacattggacaagtgaatcctcggtatctggcagcacggggcaatggcactcagagagcgggtctttccggccagactcccccgggtcggggaacgccagacctaacaatcccgactggggcaccttcgaggaggtgagcgggaatgtgtctcccgggacaagacgagagtatcacactgaaaaacttgtgacttccaagggtgataaggaactgcgcacagggaaggaaaaagttacctcaggctcaaccacaactacgcgtcgcagctgttctaagaccgtcaccaagaccgtcatcggaccagatgggcacaaagaggtgaccaaggaggtggtgacctccgaggatgggtccgactgccctgaagccatggacttgggaaccctatcaggtatcgggacattagatggcttcaggcatcgccaccccgatgaggccgccttttttgacactgcttccacgggaaagacgttcccaggttttttctctcctatgcttggtgagtttgtcagcgaaacggaatctcgaggctctgagtccggtattttcacaaataccaaagagtcttcctcacaccacccaggcatcgctgagtttccatcacggggtaaatcatctagctactccaaacaatttacgtcctcgacatcatataaccgtggggatagcacatttgaatccaagtcttacaagatggctgacgaggccggatctgaagccgatcacgaagggactcattccacgaagaggggccacgcgaagtccagaccggttcgcgactgtgatgatgtgctacagacgcatccatccggaacacagagcggcattttcaatatcaaactgcccgggtcctccaagatattctctgtctactgcgaccaggaaacgagcctgggcggctggctgctgatacagcaaaggatggacggctcacttaatttcaatcgcacatggcaagactacaagagaggctttggttcactcaacgacgagggggagggcgagttttggctgggaaatgactacctgcacctgttaacccagcgcggcagtgttctcagggttgagctggaagattgggcgggcaacgaggcatacgccgagtaccactttcgcgtgggatctgaggcagaagggtatgctttgcaggtctcatcttatgaagggactgcaggcgacgccctgatcgagggttccgtggaggagggagctgagtacactagccataataacatgcagtttagcacctttgacagagacgccgatcagtgggaagaaaactgtgctgaagtttacgggggcgggtggtggtataacaattgccaagctgcaaacctcaatggcatctactaccctggcggaagctatgatccgcgcaataattccccctacgaaatagagaatggtgttgtttgggtcagctttcgcggagctgattacagtctgcgggctgtaaggatgaagatcaggcctctggtaacacag

SEQ ID NO: 11084 - DNA, 2598 bp, synthetic construct
  misc_feature 1..2598: note = source = /note="Description of Artificial Sequence: Synthetic coding sequence"
  source 1..2598: mol_type = other DNA
atgttttccatgaggatcgtgtgtctggtgctgtccgtcgtcggcaccgcttggacagccgactccggagagggggacttccttgcagaggggggcggcgttagaggcccaagagtagtggagcggcatcaatcagcctgtaaggactccgattggcctttttgttccgatgaggactggaactacaaatgcccctccggttgtagaatgaaggggctgattgatgaggtaaaccaggattttacaaaccggataaataaactcaagaactcattgtttgaataccaaaagaacaacaaagactcacattccctcactacgaatatcatggagatccttcgcggtgatttcagctcagcaaacaacagggacaatacctacaaccgcgtgagcgaagacctcaggagccgaatagaggtgctgaaaaggaaggtgattgagaaggtacaacacatccagcttctccagaaaaacgtcagagctcagctggtggacatgaagcgacttgaggtggacattgacatcaaaattcggtcatgccgcggaagctgttcaagggccctggcgagggaggtggacctgaaggactacgaggaccagcagaaacagctggagcaagtgattgctaaagatctgcttccaagccgggaccgccagcatttgcctttgatcaaaatgaagccggtgcctgatctggtgcccgggaactttaagagccagcttcaaaaggtacctccagaatggaaagctctgacagacatgcctcaaatgcggatggagctggagagacctgggggaaatgaaatcacacgcggcggatctacctcctacgggactggctctgaaacagagtcccctcgcaaccccagttccgctgggagttggaacagtggctcctctgggccaggttccacagggaaccgaaaccccggctccagtgggacaggcggaaccgccacctggaagcccgggagttcaggcccggggtctacagggtcctggaactcagggagtagcgggacaggtagcaccggtaaccagaatcccggcagcccccggccggggagtacaggaacttggaacccgggctccagtgagcgaggaagtgcaggacattggacctctgaatcttccgtgagcggatctactggacagtggcacagtgaatctggctctttccggccggattctccgggttccggaaatgctaggcccaacaatccggactggggcacatttgaggaggtctcaggcaatgtctcccccgggactcgccgagagtatcatactgagaagcttgtgaccagcaagggggataaagagctccgcacaggcaaggaaaaggtcacatcaggaagcaccactaccactcgaaggtcttgctccaagactgtaaccaagaccgtcatcgggcctgacggccacaaggaggtcacaaaggaagttgtcacctccgaagatggttccgactgcccagaggcgatggacctcggcacgctgagcgggattgggaccctcgatggtttcaggcacaggcatccagatgaggccgcgttcttcgatactgcaagtaccgggaagacattccctggcttcttctcacctatgctgggggagtttgtttccgaaacagaaagtcgcggatctgaaagcgggatctttaccaacacaaaagaatcttctagccaccatcccggaatcgctgagttcccatcaagagggaagtcttcatcttactctaaacaattcacctctagcacctcttacaataggggggatagtaccttcgagtcaaagagctataagatggcagacgaggccggtagcgaggccgatcacgaaggcacacattccacgaagcggggacatgccaagtccagacccgtgcgggactgcgatgacgtgcttcagacacatcccagtggaacacagtctggtatctttaacataaagttgcctggctccagcaaaatattctctgtctattgcgaccaagagacatctctgggcgggtggttgttgatccaacagcgcatggatggcagtctcaatttcaacaggacctggcaggattataaacggggattcggctctctcaacgacgaaggcgagggagaattctggttggggaacgactatctccacctcttgacccagcgaggcagcgtcctgcgagtcgagctggaagactgggctggtaacgaggcatacgccgaataccacttccgagtcggaagtgaggcagaggggtacgcccttcaagtcagttcatacgaggggaccgctggggatgcgctcatcgagggctctgtggaggaaggcgcagagtatacctctcacaacaatatgcagttttccacatttgatcgggacgctgaccagtgggaggaaaattgcgctgaggtgtatggcggcggatggtggtataataactgccaagcagcgaacttgaatggaatctactatccgggaggctcatatgacccaaggaataattccccctacgagattgagaacggggttgtctgggtgagtttcagaggggctgattactccctgcgcgccgtccgcatgaaaatccgcccactcgtgacccag

SEQ ID NO: 11085 - DNA, 2598 bp, synthetic construct
  misc_feature 1..2598: note = source = /note="Description of Artificial Sequence: Synthetic coding sequence"
  source 1..2598: mol_type = other DNA
atgtttagcatgaggatcgtgtgtctggtcctgtcagtcgtgggcaccgcctggaccgccgactctggagaaggcgactttctggccgagggcggaggcgtccgcgggccaagagtcgttgaaaggcaccagagcgcctgtaaagacagcgattggcccttctgcagcgacgaagactggaattataagtgtcctagtggctgtagaatgaaggggctgatcgacgaagtaaaccaagacttcaccaatcgaattaacaaattgaaaaactctcttttcgaataccagaaaaataataaggattcgcactcgttaaccacaaatataatggagattctgaggggagacttcagctcagccaataaccgagataacacatacaatcgcgtaagtgaagatttacggagtcgaatcgaggtgcttaagaggaaggtgattgaaaaggtgcagcacattcagttgctccagaagaatgtgcgtgctcagttggtagatatgaaacgcctggaggttgacatcgacatcaaaatccgaagctgtaggggctcatgtagcagggccctagcccgagaggtggatctgaaggattatgaggaccagcaaaagcagctggaacaagtgattgctaaggacttacttcccagtcgggaccgacagcacctgcccctgatcaagatgaagccggttcccgacctcgtgcctggcaacttcaaatctcagttgcagaaagtgcctccagaatggaaggcgctaacagacatgccgcagatgagaatggagctagaacggcccggggggaatgagatcactagagggggatcaaccagctacggcactggtagcgagaccgagagccctcggaacccctcctctgctggatcctggaacagcggaagctcaggccccggatcaacagggaatcgcaaccccgggtcctcaggaacgggcggcactgccacatggaaacccggaagttccggacctgggagcacgggatcttggaactccggctcttctggtacgggctctacgggaaatcaaaacccggggtcccccagaccggggagcacgggtacctggaatcctggcagcagcgaacgtggctccgctggccactggacctcggaatcctccgtaagtggctccacaggacaatggcacagtgagtctggctcttttagacccgactcgccaggttctgggaatgcgaggcctaacaaccccgactggggcacctttgaagaggtcagtgggaatgtgtctcccggcacgcgtcgcgaatatcatacagaaaagctcgtgacatctaagggagacaaggaactccgaactggaaaagagaaggtgacttctgggtccaccactacaacgagaagaagctgctcaaaaacagttaccaagactgtaatcggccccgatggtcataaggaggttacaaaggaggtcgtgacttccgaagatggatcggattgccctgaggcaatggatctgggcacgttgtcagggatcggtacattagatggtttccggcaccggcacccagatgaggccgccttcttcgatactgcatctacggggaaaacattcccagggttcttcagtcccatgctcggggagttcgttagtgagactgagtcccggggatctgaatccggtatcttcactaataccaaagaatcttcctcccatcaccccgggatagctgagttcccttcccggggtaaatcatcctcttactctaaacagttcaccagttccactagttataaccgtggcgacagtaccttcgagagcaagtcatataaaatggcggacgaagctgggtcggaggcagaccacgaaggcactcactcgactaaacgcggccatgctaaatctcgtcctgtgcgggactgcgacgacgtgttgcagacacatccttccgggacccagagcgggatttttaatatcaagctgcctggctcctccaagatctttagtgtctattgcgatcaggaaacatcgctggggggttggctgctcatacaacagcggatggatggatctctaaactttaatcggacctggcaggattacaagcgtggtttcggcagcctcaacgacgagggagagggcgagttttggctcgggaacgattacttgcatttgcttacgcagcggggtagtgtgctccgggttgagctcgaggactgggctgggaacgaggcatatgccgagtatcattttagagtgggctcagaggcggagggatacgccctgcaggtgtcatcctatgaggggacggcaggtgatgccttaattgaaggctctgttgaggaaggggcagaatacacatcacacaataatatgcaattctcaacgttcgatcgcgatgctgaccaatgggaagaaaactgcgcagaggtttacggcggaggttggtggtataataattgccaggctgccaacctcaacggcatctactaccctggaggctcctatgatccacgcaacaacagcccatacgaaatagagaacggagtcgtgtgggtgagtttccgaggagccgattacagcctgagagcagttcggatgaaaatccgacctctagtgactcag

SEQ ID NO: 11086 - DNA, 2598 bp, synthetic construct
  misc_feature 1..2598: note = source = /note="Description of Artificial Sequence: Synthetic coding sequence"
  source 1..2598: mol_type = other DNA
atgttcagtatgcgaattgtgtgtcttgttctgagtgtggtgggaacagcgtggacagctgactccggagaaggcgatttcctggcagagggagggggagtacgggggccacgggtagtcgagcggcatcaatccgcttgcaaggactcagattggcctttttgctctgatgaggactggaactataagtgcccttcgggatgtcgaatgaagggactcatagacgaagtgaaccaagacttcacgaataggatcaacaaactcaaaaactccctgtttgaataccagaagaataacaaggacagtcacagtcttacgaccaatatcatggaaatactcagaggggacttttcaagcgccaacaatcgggacaacacgtacaatcgcgtgtcggaagatcttcgaagcagaatcgaagtgctgaaacgtaaagtgatcgaaaaggtccagcacatccagctgctccagaagaacgtgcgcgcgcagctggtggatatgaagcggctggaagtggacatcgacatcaaaatcagatcttgccggggctcctgctcaagggccctcgctcgagaggtcgatctcaaagattatgaggatcagcaaaagcaactggaacaggtcattgcaaaggacttgcttccatctcgcgacagacagcacttgccactgattaagatgaagcccgtccccgacttagtccccgggaactttaagtcccagttgcagaaagtccctcccgaatggaaggctctgacagatatgccccagatgagaatggagctcgaaagaccaggtggaaacgagattacaaggggtggatctacatcttacgggaccgggtctgagactgaatctccacggaatccgtcaagtgctgggagctggaattctggcagttcagggccgggttcaacaggtaaccggaaccctggctcttcaggaactggaggcacagcaacctggaagcctggaagcagcggaccaggctctactggctcctggaactcaggctctagcggcacaggctcaaccggcaaccaaaatcccggaagtccccgtcccggcagtactggaacatggaatcctggaagctcagagcgaggctcagcaggccactggacctccgagtcctcagtgagtggatcgactggacaatggcatagcgagagcgggtcatttcgaccagactctccaggatctggcaatgcacgaccaaataatcccgactggggcacttttgaggaggtgtcgggaaacgtgtcgccaggaacgcgccgggagtatcacacagagaaattagtcaccagtaagggggataaagagctcagaacggggaaagaaaaagtgaccagtggatcaactaccacaacaaggcgctcatgttcaaagacagtaaccaagacagtgatcgggccggacgggcacaaagaggtgaccaaagaagttgtgacctccgaagacggttccgactgtcccgaggccatggacctggggacactttctggaatcgggactctggacggctttcggcaccggcacccggacgaggcagcctttttcgacacagccagcaccggcaaaaccttcccgggcttcttttccccgatgcttggggagtttgtgtcagagaccgaatcgcgcgggtcggagagcggaattttcaccaatactaaggagagttcaagccaccaccctgggatcgctgagttcccaagtcgaggtaagtcaagttcctatagcaaacaatttacatcctccacaagttataatcgaggtgattctacattcgagtccaagtcttacaagatggcggatgaggctggttcagaggctgatcacgaaggtacacactctaccaagagggggcatgctaagagccggccggtacgtgattgcgacgatgtgctgcagacccatccaagcgggacccagtcgggcatcttcaacattaaactgcccggatcatccaagattttctctgtatactgtgaccaggagacgtcactggggggatggctcttgattcagcagagaatggatggttctctaaattttaacagaacatggcaggactacaagcggggatttggcagcctgaatgacgagggagagggagaattttggctgggcaatgactatctacacctgcttacccaacgtggatctgtgctgcgcgtcgagctggaagattgggccgggaatgaggcgtacgccgagtatcacttccgcgtggggtccgaggctgaaggctatgctttgcaagtgtcctcctacgagggtaccgccggcgacgctttaatagagggttcggtagaggagggagctgaatatacatctcacaataatatgcagttctcaacctttgatcgtgacgcggatcagtgggaagaaaactgcgcggaggtctacggtggaggttggtggtacaacaactgccaggccgcaaacctgaacgggatctattatccaggggggtcctacgacccgcgcaataactcaccctatgaaatcgaaaacggcgtcgtttgggtcagcttccgtggagctgattatagcttgcgcgctgttcgaatgaagatccggccattggttactcaa

SEQ ID NO: 11087 - DNA, 2598 bp, synthetic construct
  misc_feature 1..2598: note = source = /note="Description of Artificial Sequence: Synthetic coding sequence"
  source 1..2598: mol_type = other DNA
atgttttctatgcgcatcgtatgcctcgttctgtccgtagtgggaactgcttggacagccgattcaggagaaggagattttttagccgaaggaggaggggtcaggggaccacgggttgtagaaagacaccagtccgcatgcaaagactcagattggcccttctgtagtgatgaagattggaactataaatgcccctccggatgcagaatgaaagggctgatagatgaggtgaatcaggatttcacaaatcggataaacaagctcaaaaactcattattcgaatatcaaaaaaataacaaagattcccacagtctcactactaacataatggaaatacttcgaggagatttctcttctgctaataatagggataacacatacaatcgagtatcagaagacctgaggtcccgaatcgaagtgctcaagaggaaagtaatagaaaaagttcagcacatccagctgctccagaaaaatgtgcgggcccagctagtagatatgaaacgcctggaggtcgacattgacatcaagatacgctcatgtcgggggtcgtgctctagagctttagccagagaagtggatctcaaagactatgaagatcagcagaaacagctcgaacaggtaatcgctaaagatctcctgccttcccgagatcgccagcatctacctctcataaaaatgaaacccgttcccgacctggttccgggaaacttcaaatcacagttacagaaagtgcctcccgagtggaaagccctgactgatatgccacagatgcggatggaactcgagcgaccaggaggaaacgagatcactcggggaggatccacatcgtacggaactgggagtgaaactgaatcacccaggaatccatcttccgctgggtcctggaactccggatcctccggaccaggatcgacaggaaatcggaatccagggtcatcagggactggggggacagcaacatggaaacccgggtcttcagggcctggatccacaggatcttggaactccggaagttcaggaactgggtcgacaggaaaccagaacccagggtcgcctagacccgggagtactggaacttggaaccccggatcatcagaaagggggtcagccgggcactggacttcggaatccagtgtgtctgggtctacaggacagtggcatagtgaaagtggaagttttcggccagatagtcctgggtctggaaacgcccgaccaaacaaccctgattggggaacattcgaagaagtatccggaaatgtctctcctgggactagaagggaatatcacactgaaaaacttgtgactagtaaaggggataaggaactgagaactgggaaagaaaaggtgacatcaggatccactacaacaactaggaggtcctgttctaagactgtcacaaaaactgtgattgggcctgatgggcataaagaagtgacaaaagaagtggtcactagtgaagatggatctgattgtcccgaagccatggatctggggactctctctgggatcggaacacttgatggatttcgccatcggcatcctgatgaagccgcgttttttgatacagcatctacaggaaaaacatttcctggattcttttccccaatgctcggggagtttgtttctgaaacagaaagtaggggatccgaaagtgggatattcacaaacactaaagaatcttcatcccaccatcccgggattgcggaattcccctctagggggaagtcatcaagttactctaaacagtttacatctagtacttcttataacagaggggattccacattcgaatcaaagtcctataaaatggctgacgaagccgggagtgaagccgatcatgaagggactcattccacaaaacggggacacgctaaatcccgcccagtcagggattgtgatgatgttcttcagacacatccctctgggactcaatcaggaatatttaacatcaagctgcctggaagttctaaaattttctccgtgtattgtgatcaggaaacttcactcggagggtggctactcatccagcaaaggatggatggatccttaaattttaaccgaacttggcaggattataaacgggggttcggaagtctcaatgatgaaggagaaggagaattttggcttggaaacgattatcttcatcttttaacacagcgggggtctgtgctgcgagtggaactcgaagattgggccggaaacgaagcatatgctgaatatcatttcagagtagggtccgaggccgaagggtacgctttacaggtttcatcctacgagggaactgctggagatgccctgatagaagggtctgtcgaagagggggccgagtatacttctcataacaatatgcagtttagtacattcgatcgggatgctgatcagtgggaagaaaactgtgccgaggtttacgggggggggtggtggtataacaattgccaggcagccaatcttaacggaatctattaccccggaggatcttatgatcctcgaaacaatagtccatacgaaatcgaaaacggggtcgtgtgggtcagtttccggggggctgattattctctgcgcgctgttagaatgaaaattcggcctctcgtgactcag

SEQ ID NO: 11088 - DNA, 2598 bp, synthetic construct
  misc_feature 1..2598: note = source = /note="Description of Artificial Sequence: Synthetic coding sequence"
  source 1..2598: mol_type = other DNA
atgttttcaatgcggattgtgtgcctggttttatcagtggtaggtaccgcttggactgccgattctggcgagggagacttcttggccgagggagggggagttcgggggccacgagtggtggagcggcaccagtctgcctgcaaggatagcgattggcccttttgtagtgacgaagactggaattataagtgtccaagtggctgcagaatgaagggtctgattgatgaggtgaaccaggacttcaccaatagaatcaacaaactaaagaattcactattcgagtaccagaagaacaacaaagacagtcactctctcacaaccaacatcatggagattttaaggggcgatttctcatccgcaaataatcgtgacaacacctacaatcgtgtgagtgaggatctacggagccgtatagaagtactgaagcggaaagtgattgaaaaggtgcagcacatccagctgcttcagaaaaacgtgagggcccagctagtcgatatgaaacggctcgaggtcgatatcgacataaaaataaggagttgtcgaggaagctgtagccgagccttagcacgggaagtggatctgaaagactatgaggatcaacagaagcagctggaacaagttattgccaaggaccttctgccgtccagagacaggcaacacctgccgctcatcaagatgaaacccgtcccagatctggtgcccggaaatttcaagagtcagctacagaaggtgcctcctgaatggaaggctttgactgatatgccccaaatgcgcatggaattagaacgacctggtggcaatgaaattacccgtggggggtcgacatcttatggtacaggcagtgaaacggagagtccaaggaaccccagctctgctggatcctggaactctggatccagtggaccgggatcaactggcaatagaaatcccgggagcagtggcacaggggggaccgcaacttggaaacctggctccagtggacctggatcaaccggctcttggaatagcggttcctcaggcaccgggtccaccggcaatcagaaccctgggtcaccgagaccaggaagcactgggacatggaacccaggatcatcagaaaggggctctgctgggcattggacaagcgagtcttcggttagtggctctacggggcagtggcattctgagtcaggttcctttcgcccagactctccaggctctggcaacgctaggccaaacaatcctgattggggtaccttcgaggaagtaagtggcaacgttagccctgggacccgcagagagtatcacactgaaaagctggtaacttcaaaaggcgataaagagctgcgtaccggcaaagagaaggtgaccagcggatctacaacaacaacccgtaggagctgctctaagaccgtgactaaaactgtcataggtccggacggccacaaggaagttacaaaggaagtggtgaccagtgaagacggtagtgattgtcctgaagcaatggatttagggaccctttccggtataggcaccctagacgggttccggcacagacacccagatgaagccgcgttttttgacacagcctccactggcaaaacatttcccggtttcttttctccgatgctcggggaattcgtcagcgagacagaatcccgtggatccgaatcaggaatctttacgaatactaaggagagcagcagccatcatcccggcattgcagagttccccagtagaggcaaatctagtagttatagcaaacagtttaccagttccaccagctacaacaggggggatagtacctttgaatctaaatcctataagatggccgatgaggctgggtccgaagccgatcacgaaggcacacattccacgaaacggggccacgctaagagcagaccagtacgtgattgtgatgacgtgctccagacccacccgtctggcacacagtccgggatattcaatatcaagctgccaggatcaagcaagatttttagcgtgtactgtgatcaggaaacttctttaggaggctggcttctgatccagcaacggatggacgggtccttgaacttcaaccggacctggcaagattacaagcgcggcttcggctccctgaatgacgaaggagagggcgagttctggctggggaacgactacctgcacctgttgacgcaaagggggagtgttttgcgagtggagctggaggattgggctggtaacgaggcatatgccgaataccactttcgcgtggggagcgaagccgagggctatgcactgcaagtctcgtcatatgagggcaccgctggggatgctctcatcgaaggcagtgtggaggaaggggccgagtatacctctcataacaacatgcagttcagtacattcgaccgcgatgccgatcagtgggaggagaactgcgcggaagtctatggcgggggatggtggtataataactgtcaggccgccaatctaaacggtatctactaccctggtggctcgtacgacccccgcaacaattctccatacgaaattgagaacggcgtcgtttgggtgtcttttagaggtgctgactacagcctccgtgcagtccgcatgaagatacggcctcttgtgacccaa

SEQ ID NO: 11089 - DNA, 2598 bp, synthetic construct
  misc_feature 1..2598: note = source = /note="Description of Artificial Sequence: Synthetic coding sequence"
  source 1..2598: mol_type = other DNA
atgttttcgatgagaatcgtgtgcctcgtgctttccgtggtgggaactgcatggaccgcagactcaggggaaggtgactttctcgcagagggtggtggggttcgtggcccgagagtggtggagcgccatcagagcgcgtgcaaagatagcgattggcctttctgttcggatgaggattggaactacaagtgcccttccgggtgcagaatgaaggggctgatcgatgaagtcaaccaagacttcacgaacagaatcaacaaactgaagaattcactcttcgagtaccagaagaataacaaagattcgcattcgctgactaccaatatcatggagattctgcggggggatttctccagcgcaaataaccgggacaacacctacaacagagtgagcgaggacctgcggagcagaattgaagtgctgaagcgaaaggtcattgagaaagtgcaacacatccagcttttgcagaaaaacgtgagagcccagcttgtcgacatgaagagactggaggtggacatcgacattaagatcaggtcatgtagaggctcctgtagccgtgcgctggcacgcgaagtcgacctgaaagactacgaggaccaacagaagcaacttgagcaggtgatcgccaaggatttgcttcctagccgagatcgccagcatcttcctctgattaagatgaagcctgtcccagatctcgtgccggggaatttcaagtctcagcttcaaaaggtgccacctgaatggaaagccctgactgacatgcctcaaatgcgtatggagttggagaggccaggtggtaacgagattacgagaggtggctcgacgtcatatggcaccggttcggaaacggaatcgcctcggaacccttcctcggcagggtcgtggaactccgggagctccggacccgggtcaactggaaataggaatcccggcagctctggaactggtggaaccgcaacttggaaacccggttcgtcgggaccggggtccactggtagctggaacagcggttcatctggtaccgggtcgaccggtaaccaaaacccaggatcaccaaggcctggatccacgggaacgtggaatcctggttcctccgaacgggggtccgcaggacactggacttcagaatcctcggtgtccggatcgaccggtcagtggcacagcgaaagcggatcatttcggcctgattctccaggttccggtaacgcacggccgaataaccctgactggggtacttttgaagaggtgtcaggtaatgtctctcccggcactcggcgcgagtaccacactgaaaagctggtgacctcaaagggggacaaagaacttcgcaccggtaaggaaaaggtgacctcgggaagcactaccactactagaagatcatgttccaaaaccgtgactaagaccgtcatcggtccagatgggcataaagaagtgaccaaagaagtggtcacctcggaggatggaagcgactgtcctgaggcaatggatcttgggacgctctcgggtattgggacgcttgatggcttccggcatagacatcccgatgaagctgctttcttcgataccgcatcaactggcaagacgtttcctggatttttctcgcctatgctcggtgagtttgttagcgaaactgagtccaggggatcggaatccggcattttcaccaacaccaaagagagctcctcacaccacccgggaatcgccgagtttccatcgaggggtaagtcgagctcgtactcgaaacagtttacgagctctacttcgtacaatcgaggtgattccactttcgaatccaaatcctataagatggccgatgaggcaggttccgaggccgatcacgaaggtactcactcgactaagcgcggacatgccaaatcaagacccgtgagggattgtgatgacgtgctccagactcatccatcaggtacccaatcgggaatattcaatatcaagctgccaggatcgtcgaagatattctcggtgtactgcgatcaagagacttccttggggggctggctgctcatccaacagcggatggacggaagccttaacttcaatagaacgtggcaagattacaagcgtggttttggatcactgaatgacgaaggtgaaggggaattttggcttggaaacgactacctccatcttctgactcagaggggctcagtcctgcgggtcgaactggaagattgggcaggaaacgaagcgtacgcagaataccatttcagagtcgggtcggaagcggaagggtatgcacttcaggtgtctagttacgaggggaccgccggagatgcactgattgaggggtccgtcgaagagggcgcagaatacactagccacaacaatatgcaattctccacttttgatagggatgcagatcaatgggaggaaaattgtgcagaagtctacggagggggttggtggtacaacaactgtcaggccgcaaacctgaacggaatttactaccctggtggaagctacgatcctagaaacaactccccctacgaaatcgagaacggagtggtgtgggtttcgtttcgaggcgcagactactccctgcgagcggtgcgaatgaagatacgcccccttgtcactcag

SEQ ID NO: 11090 - DNA, 2598 bp, synthetic construct
  misc_feature 1..2598: note = source = /note="Description of Artificial Sequence: Synthetic coding sequence"
  source 1..2598: mol_type = other DNA
atgttcagcatgcgtatagtgtgcctggtgctcagtgtagtgggcaccgcgtggacagcagattcgggagagggcgatttccttgccgaaggcgggggtgttagaggcccaagggtcgtcgagagacaccagagtgcctgtaaggacagtgactggccattctgctccgacgaggattggaactataagtgccctagtggttgccgcatgaaaggcttaatcgacgaggtgaatcaggacttcaccaatcgcattaataagctgaagaactccctgttcgagtaccaaaaaaacaacaaggacagccattcgttgaccactaatataatggagattttgaggggagacttttcttcagccaacaacagagacaatacatacaatcgtgtgagcgaggacctaaggtcacgtatcgaggtcttaaagcgtaaggtcattgaaaaggtgcagcatatccaactcctgcagaagaatgtgagggcacagctggttgatatgaagcggttggaagtcgacattgatataaagattcggtcttgtaggggctcttgtagccgggccctggctagggaagtcgacttgaaggattacgaagaccaacagaaacagcttgagcaggtgatagcgaaagacctcttgccaagccgcgatcgccagcatctgccccttatcaagatgaagcctgttccagatctagtccccggaaacttcaagtcccagcttcagaaggtcccaccggaatggaaagccttgacagatatgccacagatgcgcatggagctagaaaggccgggtgggaacgagattacacgtgggggatcaacgtcttacggcactgggtctgagacagaatctccccgaaacccaagcagcgctggatcctggaacagcggtagcagcggccctggctcgacaggtaataggaatcctggtagttctggtacgggtgggaccgcaacttggaaacctgggtcttccggcccaggctcaaccgggtcctggaatagcggatcttctgggacaggctcaacaggaaatcagaaccctggctccccccgtcctgggtctacgggtacatggaacccgggatcctcggaacgcggttctgctggacactggacaagcgaaagtagcgtgtcaggctcaaccggtcaatggcacagcgaaagtggctcgttccgacctgactcaccagggtccggtaacgctcgtcccaacaatcccgactggggcacctttgaagaagtctctgggaacgtgtccccgggcactcgccgggaataccacacagagaagctcgtgacatcaaagggggacaaagagctgcgcactggtaaagagaaggtaacttcgggctcaactactactacccgccgctcctgcagcaaaacagtaaccaagactgtaatcgggcctgacgggcataaggaggtgaccaaggaggtggtcacctctgaagatggatcggattgtcccgaagctatggacttaggaaccctcagcggcatcgggacactggacggattccgccatagacacccagacgaggcagccttttttgacaccgccagtactgggaagacctttccaggctttttctccccgatgctcggagaattcgtgagcgagacagagtctcgaggttcggagtccggcattttcaccaacacaaaggagtctagcagccatcatcccggcattgccgagttcccaagtcggggaaaatccagctcatattctaaacagtttacatcttcgacttcatacaatcggggcgactcaacctttgagagcaaaagctacaaaatggctgatgaggccggctccgaggcagaccacgaggggacccattcaaccaagcgcggccatgccaaaagcaggcccgtgagggattgcgacgacgtgctccagacgcatccctctggcacacagagtggcatctttaatatcaaattaccgggatctagcaagatatttagtgtgtactgcgatcaggagacatccctggggggatggttgctgatacagcagcgcatggacggctcattgaattttaataggacatggcaggactataaaaggggcttcggctcactcaacgacgagggcgagggcgagttttggttaggcaacgactacttgcatctcttgacacagagagggtccgtcctgcgggtggagctcgaagattgggctggaaacgaagcctacgcggagtaccatttcagagtagggtctgaggcagaagggtatgccctgcaggtctcctcgtatgaagggaccgccggagacgcattaatcgagggaagcgttgaagaaggagcagaatacaccagccacaataacatgcagttttccacctttgacagagatgctgaccaatgggaggagaattgcgccgaggtttatggagggggttggtggtataacaattgccaggccgccaacttaaatgggatctactatccgggaggcagttacgacccacgaaataatagtccctatgaaatcgagaacggagtcgtttgggtcagtttcaggggagccgattattctctgcgcgccgtgcgaatgaaaataagaccccttgtgacccag

SEQ ID NO: 11091 - DNA, 2598 bp, synthetic construct
  misc_feature 1..2598: note = source = /note="Description of Artificial Sequence: Synthetic coding sequence"
  source 1..2598: mol_type = other DNA
atgttctcaatgagaattgtatgcctggttctctcagtggtcggaaccgcctggactgccgacagcggagaaggggacttcctggctgaaggaggcggagttagaggaccgcgggtcgtcgaacgccaccaatcagcctgtaaagactcggactggccgttctgtagcgacgaagattggaattacaagtgtcccagcggatgcagaatgaaaggactgattgatgaagtgaaccaggattttactaatcgcataaataagctcaaaaactcgctgtttgaataccagaaaaataataaagactcccactcgctgaccaccaacatcatggaaatcctgcgtggagacttctcctccgccaacaaccgcgacaatacctacaacagggtttccgaggatctccgatcgaggatcgaggtgctcaagcggaaggtgatcgagaaggtgcaacatatccagctgctccaaaagaacgtgcgagcgcaactggtggacatgaagcgcctggaagtcgacatcgacatcaagatccgctcgtgccgcggatcctgcagcagagccctggccagagaagtggacctgaaggattacgaagatcagcaaaagcagctcgaacaggtgatcgctaaggaccttcttccgtcacgggaccgccagcacctcccacttatcaaaatgaagcctgtgccggacctggtgccggggaatttcaagtcgcagttgcagaaggtcccgccggagtggaaagcacttaccgatatgccacaaatgcggatggaactggaacgccccggaggcaacgaaatcactcgcggaggcagcactagctacggaactggatcggaaactgagtcgccgcggaacccgtcatcagcagggtcctggaactcgggttcctcgggaccgggaagcactggaaacagaaaccctggatcctcgggaaccgggggaaccgctacttggaagccaggctcgtccggaccgggttcaactggctcgtggaatagcggaagcagcgggaccggctcaaccggtaaccagaatccaggaagcccgcggcccggatcaactgggacttggaatcccggttcatccgagcgcggctcagctggtcactggacttcagaatcgagcgtctcaggctctactggacaatggcattcagagtcaggatcgtttagaccggactcgcctggctctgggaacgcccgcccaaataatcccgactggggaactttcgaggaagtgtccggaaacgtctcccctggtacgcgccgcgaataccatactgagaagttggtgacgagcaagggagacaaggaactgcgcaccggaaaagagaaagtgacttcgggatccaccaccactacccgcagaagctgctcaaagactgtgacgaaaaccgtgattggccctgacggacataaggaggtcactaaggaagtggtcacttccgaagatggatccgattgtccggaggctatggatctgggcactttgtcgggcattggcactctggatggattccggcatcgccacccggacgaagcagcgttcttcgacaccgcttcgactggtaaaaccttcccgggcttcttctcgccaatgctgggagagttcgtgagcgaaaccgaatcgagaggaagcgaatcgggcatcttcaccaacaccaaagaaagctcatcccaccatccaggaatcgccgagttcccttccagagggaaaagtagctcgtactccaagcagttcaccagctcgacctcctataacaggggtgacagcacgtttgagtccaagtcatacaagatggcggatgaagccggatccgaagccgaccatgaaggcacccacagtaccaagaggggacacgcaaagtcgcggccagtgcgcgactgcgacgatgtcctccagacgcaccctagcgggacccaatccggaatcttcaatatcaagttgcccggctcgagcaagatcttctcggtgtattgcgatcaggagacttcgctggggggttggctgctcatccaacagcggatggatggatccttgaacttcaatcggacgtggcaggattataagcggggctttggatccctgaacgacgaaggtgagggcgagttttggctgggtaatgactacctccacctcctgacccagcgggggagcgtgctcagggtcgagcttgaggattgggcgggaaacgaggcgtacgcagagtaccatttcagagtcggctccgaggccgaggggtacgcgctgcaggtgtcctcttacgagggaacggctggagatgccctgatcgaagggagtgtggaagaaggagccgaatacacctcacacaacaacatgcagttttccaccttcgaccgagacgccgatcaatgggaggagaattgcgcagaagtgtacgggggcggttggtggtacaataactgccaagcagcgaacctcaacggaatctactaccctggcggctcttacgatccacggaacaactcaccatacgagattgagaacggcgtcgtgtgggtgtcgtttcggggtgcggactactccctgagggccgtgcgtatgaagatccggccgctcgtgacccag

SEQ ID NO: 11092 - DNA, 2598 bp, synthetic construct
  misc_feature 1..2598: note = source = /note="Description of Artificial Sequence: Synthetic coding sequence"
  source 1..2598: mol_type = other DNA
atgtttagcatgcgcatcgtctgcctcgtgctctcagtggtcgggacggcatggacggcagactcgggggaaggtgattttctggccgaaggcggaggcgtgcgaggtccccgcgtagtggagcgtcatcagtctgcgtgcaaagactctgactggcccttctgcagcgacgaggactggaactacaagtgtcccagcggctgtagaatgaagggtctcatagatgaggtcaatcaggattttaccaacagaattaacaagttaaaaaattcattattcgagtatcagaagaataacaaagatagccacagtcttactacaaacatcatggaaatcttacgaggcgattttagctcggcaaacaaccgtgataacacctacaacagagtgtcggaggaccttcgtagtagaatagaggtgctcaaacggaaagttatagagaaagttcagcatattcagcttctccaaaaaaatgtgagggcacagctggtggatatgaaaagactcgaagtagatattgatatcaagatcaggagctgccgagggtcttgctctcgagcgctcgcgcgggaagtcgatttgaaagactacgaagaccagcagaagcagctcgagcaggtgatcgctaaggacttgttgccctccagggacaggcagcatctcccgctgatcaagatgaagccagtgccagatttagttccaggtaacttcaaatcacaactgcaaaaagttccccctgagtggaaggcattgacagacatgccgcagatgcgcatggagctggagaggccaggaggaaacgaaattactcggggcggttctacatcctacggtactggttccgagaccgagtccccacggaatccctcttcagcggggtcgtggaacagcggctcgagcggacccgggtcgactggcaaccgcaaccccgggagctctggaaccggcggtaccgccacctggaagcctgggtcctcgggtccgggctctaccggcagctggaacagcggcagctccggaaccggctccacggggaaccaaaaccccggctccccacgccccggcagcacagggacgtggaacccaggtagttccgagcgaggcagtgctggtcactggacgtcggagtcgagtgtgtcaggaagtacgggtcagtggcatagcgagtctggctctttcaggccggactctcctggttctggtaatgcccggcctaataaccccgactggggaacctttgaggaggtgtctggaaatgtaagtccaggcactcgccgtgagtaccacaccgagaaattggtcactagtaagggcgataaggagttgcgtacaggcaaggagaaagtgacttcaggctcaacaactaccactagaagatcttgttcaaagaccgtgacgaagaccgtcatcggacccgacggccacaaggaagtgaccaaggaagtcgtcacttcagaggacggtagcgattgcccagaggctatggacctgggtacgttgagtggtattgggacgctagatggatttcgtcaccggcatcctgatgaagctgcgttcttcgatacggcaagcaccggcaagacgttcccgggattttttagccctatgctcggcgaatttgtgtcggaaaccgagagtcgggggtcggaaagtggaatttttaccaacaccaaagagagctcttcccatcaccctggtatcgccgagttccccagccgaggtaagtccagcagttactccaaacagttcacctcttctacttcttataatcgcggcgattcgacctttgagtctaagtcctacaagatggctgatgaagctggctcggaggcagaccacgagggcacccattctactaagcgtggacatgccaagagcagacctgttcgagattgcgacgacgtgcttcaaacccatccaagcgggactcagtctggcatcttcaacattaagctcccaggttcaagtaaaatattttctgtgtactgtgaccaggagacgtcgttgggggggtggcttcttatccagcaacgcatggacggtagcctgaactttaaccgcacgtggcaggattacaagcgtggtttcgggtccctaaacgatgagggggagggggagttctggctgggtaacgactacctgcatctattaacacagaggggttcagtgttgcgcgtcgaactagaagattgggctgggaatgaagcatacgctgaataccatttccgcgttggatctgaagcggagggttatgcgctccaagtctcaagttatgagggtacagctggcgacgctctcatcgagggctccgttgaagagggagccgagtacacgtcgcacaacaacatgcaattttccacgttcgaccgcgatgctgatcaatgggaggagaactgcgcggaggtttatgggggcgggtggtggtacaacaactgtcaggccgccaacctcaacggaatttattatccgggcgggtcgtatgacccgcgaaataatagcccctacgaaatagaaaacggagtagtctgggtaagttttcggggggcagattactcactgcgtgcagtccgcatgaaaatacgtccactggtgacacaa

SEQ ID NO: 11093 - DNA, 2598 bp, synthetic construct
  misc_feature 1..2598: note = source = /note="Description of Artificial Sequence: Synthetic coding sequence"
  source 1..2598: mol_type = other DNA
atgtttagcatgcgaattgtatgtctcgtcctgtccgtggtggggactgcatggaccgccgattcgggagaaggtgattttctcgcagaggggggcggtgtccgggggcctagagtggtggagcggcatcaatccgcatgtaaggattcggattggccgttctgttcggacgaggactggaattacaagtgtccatccgggtgccggatgaaaggattgatcgacgaagtgaaccaggattttacgaaccggatcaacaagctgaagaactcgctttttgagtaccaaaagaacaacaaagattcgcactcgctgactaccaacattatggaaatcttgcgaggggatttctcatcggcaaacaacagagacaatacctataacagggtcagtgaagatctccgctctcgaattgaagtccttaagagaaaggtgatcgagaaggtccaacatattcaacttcttcaaaagaacgtgcgcgcacagctcgtggacatgaaacggttggaagtcgacatcgacattaagatcagatcatgcagaggatcgtgcagccgcgctcttgctcgtgaagtggatctcaaggattacgaagatcagcaaaaacaacttgaacaggtcatcgccaaggatctgctgccctcacgcgaccggcagcacctgccactgataaagatgaagcctgtgcctgacctggtgcctggaaactttaagtcccagcttcagaaggtgccacctgaatggaaagcattgaccgacatgcctcaaatgagaatggaactggaacggcctggtggaaacgagattaccaggggcgggagcacctcgtacggaaccggatcagaaaccgagtctcctcgtaatccgagctcggcaggttcatggaactcaggctcgtccggtcctggttccaccgggaacaggaatcctggctcatccggaaccggtggtaccgcgacctggaagcctggatcttccggccctggaagcaccggttcctggaattcgggttccagcggtaccggatcgaccggaaaccagaacccaggttcccccagacctggcagcaccggaacctggaaccctggaagcagcgaaagaggttcggccggacattggacctcggaaagctcggtgtcgggaagcaccggccagtggcattcagaatcaggtagcttcaggcctgattcgccgggctcaggaaacgcaaggcctaataaccccgattggggaacttttgaggaagtgtcaggaaatgtcagccccggaactcgtcgtgaataccataccgaaaagctggtgacctcgaaaggagataaagaactcagaacggggaaggaaaaagtcacctctggaagcactacgaccacccggagatcctgttctaaaaccgttaccaagacggtgatcggacccgatgggcataaagaagtgaccaaagaggtcgtgaccagcgaggacgggtcagattgtcccgaagcaatggacctgggaaccctgtcgggcattggaactctggatgggtttagacaccgacatccggatgaggcggccttttttgatacggcatccactggaaagacgtttccaggattctttagcccgatgcttggtgaatttgtgagcgagactgagtcgagagggtccgagtcaggtatcttcactaacactaaggaatcatcgtcacatcatcctggaatcgctgaatttccttcgcgggggaagtcgtcgtcttactcgaagcagttcacctcctccacgtcctacaataggggagattccacttttgaaagcaagagctacaagatggccgatgaagccggtagcgaagccgaccacgaaggaacccattcaactaagcgtggacatgcgaagtcacgccctgtccgcgattgcgatgatgtgctgcagacgcacccgtcgggcacccaatccggtattttcaacattaagctccctggttcctccaagatattctctgtgtactgcgaccaagaaacctcactcggaggatggctgctcatccagcagcgcatggatggttccctcaactttaacagaacctggcaagactacaagcgaggatttggatcacttaatgacgagggcgaaggtgaattttggctcgggaatgactacctgcatcttcttacccaacgtggatcggtgctgcgggtcgagctcgaggactgggcgggtaacgaagcgtacgccgaataccatttcagagtgggctccgaggcagaaggttacgccctccaggtcagttcgtatgaaggtaccgccggcgatgccctgattgagggcagcgtcgaggagggtgcggagtacacctcccataacaatatgcagttctcgacttttgatcgcgatgcagatcaatgggaggagaactgtgctgaggtctacggtggaggatggtggtataacaactgtcaggcagcaaacctgaacggtatttactacccgggtggttcgtacgatccccgtaacaacagcccatacgaaatcgaaaacggcgtggtgtgggtgtcgttcaggggagcagactattcactgagagcggtccggatgaagattagacccctggttacccag

SEQ ID NO: 11094 - DNA, 2598 bp, synthetic construct
  misc_feature 1..2598: note = source = /note="Description of Artificial Sequence: Synthetic coding sequence"
  source 1..2598: mol_type = other DNA
atgttttccatgaggattgtgtgccttgtgctgtccgtggtgggtaccgcctggactgctgactccggagagggggacttcctcgcagaaggaggcggagtgcgaggaccgcgggttgtcgagcggcaccaatcggcctgcaaagactcggactggcctttctgctcggacgaagattggaattacaagtgcccgtcgggatgcagaatgaagggcttgattgacgaggttaatcaggacttcaccaaccgcatcaacaagctcaaaaactccttgttcgaataccagaaaaacaacaaagactctcacagcttgaccaccaacatcatggagattctcaggggagatttctcctccgctaacaacagagataatacctacaaccgggtgtcggaggacttgcggtccagaatcgaggtgctcaagcgcaaagtcatcgagaaggtgcagcacatccaactgctgcagaagaacgtgcgcgcgcaactggtcgacatgaagcgccttgaagtggacatcgacattaagatccggtcctgtcgcgggagctgttctcgcgctctggccagggaagtggacctcaaggactatgaggaccaacagaagcagctggaacaagttatcgctaaagacctcctgccgagcagggaccgccagcatctgccgcttatcaagatgaagccggtgccggacctggtgcctggaaactttaagtcccaactccagaaggtgcctcctgaatggaaggccctcaccgacatgccccagatgcgcatggaactggagcgccctggcggaaatgagatcacccggggaggaagcacttcatacggaaccgggtccgaaaccgagagcccacgcaacccgtcctccgccgggagctggaacagcggctcatccggacctggctcgacgggtaaccgcaaccctggctcgtcagggacgggcggaaccgcgacgtggaagcccggcagttcaggacctgggtcaaccggatcatggaactcaggttcctccggaactggatcgaccggaaaccagaacccagggtccccgcggccgggatcgaccggcacttggaacccgggctcgtcagagcggggcagcgccggtcactggacctcagaatcctcggtgtccggctccacgggacaatggcacagcgagtcaggatctttcaggccagattctcctggctcaggaaatgcgcgaccaaacaatccggactggggcaccttcgaagaggtcagcggcaatgtgtcgcccgggactcggcgcgaatatcacactgaaaagctggtgacgtccaagggcgataaggaactgaggactggaaaggagaaggtgaccagcgggtcaactaccactactagaagatcctgctctaagaccgtgactaaaactgtcatcggaccggatggacacaaggaggtcaccaaggaagtggtcacttcagaggatggatcggattgcccagaagctatggatctgggcactctgagcggcatcggcaccctggacggcttcagacacaggcatccagacgaagctgctttcttcgacactgcgtctaccggcaagactttcccgggattcttctcaccaatgctcggcgaattcgtctccgagactgagtcccgggggtcagagagcggaatcttcactaacactaaagaaagctcgagccaccaccccggaatcgccgagtttccttcgcggggtaaatcctcgtcctactcaaagcaatttacctcgtcgacttcgtacaataggggagacagcaccttcgaaagcaaaagctacaaaatggccgacgaagcaggaagcgaggcagaccacgagggcacccactcgaccaagcggggacatgccaagtcgcgcccggtgcgcgattgcgatgacgtgctccagacccacccttcgggaacccagagcggaatattcaacatcaaacttccggggagcagcaagatcttctccgtgtactgcgatcaagaaacttcgctcggagggtggcttcttattcaacagcggatggacggatcgctgaatttcaaccgcacctggcaggactacaagcgggggttcgggtccctgaacgacgaaggagagggagaattctggctgggtaatgattaccttcacctgcttacccaaagaggatcagtgctgagagtggaactggaggactgggctgggaatgaggcatacgccgaataccatttccgggtgggctcagaagcggagggatacgcactgcaggtcagtagctacgaagggaccgccggagatgccctgatcgaaggatccgtggaggaaggagcggaatacacttcgcacaacaacatgcaattttctactttcgatcgcgatgcggaccagtgggaagagaactgcgcggaagtttacggaggtggatggtggtacaacaactgccaggcagccaacctcaatggaatttactacccgggaggctcgtacgacccacgcaacaattctccctacgaaattgaaaacggtgtggtgtgggtgtcattccggggtgccgactattccctgcgggctgtgcggatgaaaatccggcccctggtcactcag

SEQ ID NO: 11095 - DNA, 2598 bp, synthetic construct
  misc_feature 1..2598: note = source = /note="Description of Artificial Sequence: Synthetic coding sequence"
  source 1..2598: mol_type = other DNA
atgttcagcatgcgaatagtttgtctggttttgtcagtcgttggaacggcctggacagcggattcgggcgagggggactttctcgcagaaggcggcggagtgcgaggccctcgcgttgtcgaaaggcaccagagcgcatgtaaagatagtgattggccgttctgctccgacgaagattggaattataaatgcccctcaggctgcaggatgaaaggacttattgacgaagttaatcaggacttcaccaaccgaatcaataaattgaaaaactccctgtttgagtaccaaaagaataataaggactcacattccctcactacaaacatcatggaaatcctgcgtggggacttcagctctgctaataaccgcgacaacacttacaatcgagtatcggaggatctgaggtctcgcatagaagttttgaaacgaaaagtaatcgagaaagtacaacacatccagttgcttcagaaaaacgtaagggcacagctggtcgacatgaagaggctggaggtggatatcgacataaaaataagatcctgtcgcgggtcctgttctagagcactggcccgagaagtggatctgaaggattatgaagatcaacagaagcagctcgaacaagtaattgcgaaagacctgcttccctctcgagatcggcagcacctgccccttatcaagatgaaaccagtgccagatctagtgcctgggaatttcaagtctcagctccagaaggttcctcctgaatggaaggctctgactgatatgccgcagatgaggatggaattggaaaggcctggcggcaacgagataaccagaggtggttcaacctcatatggcacaggtagcgaaacggagtccccccggaatccaagttctgctgggtcctggaattctggttcttcggggccaggctccaccggcaaccggaatcccggctcctcaggcactgggggtactgctacctggaagccgggatcatcaggccccgggagtacaggttcttggaacagtgggtctagtgggactggatctaccgggaatcagaatcccgggtctcccagaccaggttccacgggtacgtggaatccaggcagctcagagcggggaagcgcaggacactggacatcagagtccagcgtgagtggttccactggacaatggcacagcgagtctggtagttttaggcccgatagtcccggcagtggaaacgcccggcccaataatcccgattgggggaccttcgaggaggtctctgggaatgtctctcccggcacccggagggagtaccacactgagaaactcgtgacttcgaaaggagataaggagctgcgtacaggcaaagaaaaagtcacttccgggtcgacgacgacaactaggagaagctgctccaagactgtgaccaagacagtcataggcccagatggtcacaaagaagttaccaaggaggtagtcaccagtgaagatgggtccgattgccccgaggcaatggaccttggaactttgtccgggatagggacactggacggattccgccaccgtcaccctgatgaggccgctttcttcgacaccgcctcaacaggcaaaacgtttcccggttttttttcgccgatgctaggggagttcgtctctgaaacagaatcgcgggggagcgagagcggcatatttacaaatactaaagagtcatcgtctcaccacccagggatcgccgaatttccttcaaggggaaaatccagcagttactccaagcagttcacatcttccactagctacaacaggggagattcaactttcgaatcaaagtcatataagatggccgacgaagcgggctccgaagccgatcatgaagggacccacagtactaaacggggacatgcgaagtcccggcccgtccgagactgcgacgatgtgctccagacccacccctctggtactcagagcggtatcttcaatataaagctccccggttcatctaagatattttccgtgtactgtgaccaggaaacaagcctgggcggatggcttctgatccaacagaggatggacggatcgctgaatttcaaccggacgtggcaggactataagaggggctttggtagtctcaatgacgagggcgagggggagttttggctgggcaacgattatctgcacctgttgacccagcggggcagtgtcctcagagtggaactggaagattgggccgggaacgaggcttacgccgagtaccacttcagagtaggctcagaagccgagggttacgccctgcaggtgtctagctacgagggaactgcaggagacgctctcatcgaaggctcggtagaagaaggtgccgagtatacttcacacaataacatgcagttcagtacctttgaccgggacgctgatcagtgggaagaaaattgtgcggaagtgtatggtggaggctggtggtataacaactgccaagcagcaaaccttaatggaatatattatccggggggttcatacgacccccggaataatagtccatacgagattgagaatggggtagtgtgggtgtcttttcgcggggccgactactctctacgagcagtgcgcatgaaaatacgccccttagttacacag

SEQ ID NO: 11096 - DNA, 2598 bp, synthetic construct
  misc_feature 1..2598: note = source = /note="Description of Artificial Sequence: Synthetic coding sequence"
  source 1..2598: mol_type = other DNA
atgtttagcatgcgcatagtttgtctagtgttatcggtggtcgggaccgcctggaccgcagattctggcgaaggggacttcctggctgagggtgggggtgttcgggggccacgggtggtcgagcgccaccaatccgcctgtaaggactcagattggcccttttgtagtgacgaggactggaattataagtgcccttctggttgcaggatgaaagggctgattgatgaagttaatcaggacttcaccaaccgaatcaataagcttaagaatagcctgtttgaatatcaaaaaaataataaggactctcattccctgactaccaatatcatggagatcctgagaggggatttttccagtgcgaataatagggacaatacatacaaccgcgttagcgaagaccttagatctagaatagaggtcttaaaacgaaaagttatagagaaggtccagcatatacagttgctccagaagaacgtaagggctcaactggtggacatgaagagactggaagttgacatcgatatcaagatccgaagttgccgaggctcctgctcccgggctctcgcgcgagaggttgacctcaaagactatgaggatcagcagaagcagttggagcaggtaatcgccaaggatctcttgccttctagggataggcagcatttaccgctcatcaaaatgaaaccagtgcctgacctggtgccagggaatttcaagagccagcttcaaaaagttcctccagagtggaaggcgcttaccgatatgcctcaaatgagaatggaattagagagacccggtggcaatgaaattacacgcggaggttcaactagttacggcaccggatcagagaccgagtctcctagaaatccatcttctgcggggagctggaattccggatcttccggccccggaagtactggtaaccggaatcctggctccagcggaacaggcggaaccgcgacatggaaacctggcagttcaggacccggcagtaccgggagctggaatagtggaagctcaggaaccggcagcaccggaaatcagaaccccggttcaccacggccagggagcacaggaacatggaacccgggttcctccgagagagggtcagccggccactggaccagcgaatctagcgtttctggctctaccggccagtggcattcagaatctgggtcctttcgcccagatagcccggggtccggaaacgcgagaccaaataacccagactggggcaccttcgaagaggtctcagggaatgtctccccaggaacccgacgcgagtaccacaccgaaaagctggtgacttcaaagggcgacaaagagctgcgaacaggcaaggagaaggttacctcaggatctacaaccaccaccaggcgtagctgcagcaagaccgtgacgaagacggttataggtcccgacggccataaagaagtgactaaggaggtggtgacttctgaagacggcagtgactgtcctgaagcgatggatctcgggaccctctcgggtatcggaacattggacgggttcaggcaccgacacccagatgaggccgcatttttcgacacagcttcgacgggcaagactttccctggattcttcagccccatgctgggcgaattcgtttcggagactgaaagtcgagggtccgagagcggcatctttacaaacactaaagagtcatcctcccaccatcccggaattgctgaattcccgagcagagggaagagctctagctatagcaagcagttcaccagtagcacgtcatataatcgaggtgactcaacgttcgagtcaaagagctataaaatggccgatgaggccgggtcagaagcagaccacgagggaacacattctacaaagcgaggacacgcaaaatcccgcccagtcagggattgtgacgatgtgttgcaaacacacccttcaggcacgcaatcagggatttttaatataaagttgccagggtcctccaagatctttagcgtctactgcgaccaagagacaagcctgggtggctggttattaatccagcagcgcatggacgggagtctcaacttcaaccgaacatggcaggattataagcgcggattcggaagcttaaacgacgaaggagagggcgaattctggttggggaatgactatctgcatctgctgacacaaagggggtcagtgctgcgagtagagctggaggattgggccggcaacgaagcatatgctgagtaccatttcagggtggggagcgaggcagaggggtacgctctacaggtaagctcatacgagggcacagccggcgacgcacttatcgaagggagcgtcgaggagggagcggagtatacgagccataataatatgcagtttagcacgttcgaccgcgacgcagaccagtgggaggaaaattgcgcagaggtctacggcggcggctggtggtacaacaattgccaggctgccaatttaaatggaatctactatcccggtggtagttatgacccgaggaacaactcaccctacgaaattgaaaacggcgtggtatgggtcagcttccgtggggcagactattcactgcgggcggtgcgaatgaaaatacgccccttggtgacccag

SEQ ID NO: 11097 - DNA, 2598 bp, synthetic construct
  misc_feature 1..2598: note = source = /note="Description of Artificial Sequence: Synthetic coding sequence"
  source 1..2598: mol_type = other DNA
atgttcagtatgcgaatcgtttgcctggtcttgtccgttgtcgggaccgcatggacagccgactctggagagggagatttcctggccgaaggcgggggggttcgcggacccagggtggtggagaggcatcagtcagcatgtaaagacagcgattggccgttttgtagcgacgaggactggaattataaatgtccaagtggctgtagaatgaagggcctgatcgacgaggttaaccaggacttcactaaccgaatcaacaaactgaagaacagtttgttcgagtatcaaaagaacaacaaagattcccatagcctgaccaccaacattatggagatattgagaggggacttctcatccgctaataatcgggacaatacttataatagagtgagtgaagacctgcgatctcgcatcgaagtcctgaagaggaaagtgattgagaaggtgcagcacattcagctgctgcagaagaatgtgcgagcccagctggtggatatgaaaaggctcgaagtggatattgatattaaaatcagatcctgtagagggtcctgctctcgggccctggccagagaagtcgatttgaaggattacgaagatcagcaaaagcagttggagcaggtgatcgccaaggacctcctgcctagtagagacaggcagcatctgccactgatcaaaatgaaaccggttcctgatcttgtccccggtaacttcaagtctcagttgcagaaagtaccaccagaatggaaagcactgacagacatgccccaaatgcgaatggaactggaacgccccggcggaaatgagattacccgcggcgggagtacaagttatggaacaggttccgagacggagtcccccagaaatccttcctctgccggctcctggaactctggctcctctggtccagggagcactggcaatagaaaccccggatcaagtggtacaggcgggaccgccacatggaagccaggatcaagcggccctggttctaccggttcatggaacagcggttcctctgggaccggctcaaccggtaatcagaacccggggagtcccaggccaggcagcacaggcacctggaatcctggctcctctgaacgaggcagtgccggccactggacttcagagtcaagcgtgagtggaagtaccggccagtggcacagtgagagcgggagcttcaggcctgatagtccaggctcaggcaacgcgcggccgaacaaccctgactggggcaccttcgaggaggtgtctggcaatgtaagtccagggaccagacgggaataccatacagaaaaattggtgacatccaagggcgataaggaacttaggaccggcaaggagaaagtgaccagcggttctactacaacaacccgaaggagctgttccaagaccgttactaagaccgtgattgggcccgacggtcacaaagaggttaccaaagaagtggtgacttcagaagacggatctgactgtcccgaggccatggacctggggaccttgagcggaataggaactttggacggttttcgccacaggcacccggacgaagcagctttcttcgatactgcttcaaccggaaaaacatttccgggattctttagtccaatgctcggggagtttgtgagtgagacagaatctcgaggcagtgaaagcggtatttttaccaataccaaggaatcctctagtcatcacccggggatcgccgaatttccttctcgcggaaaatcttccagctactcaaaacaatttactagtagtaccagttataaccggggcgactcaacatttgagagcaaaagttacaagatggcggacgaagcgggaagtgaagcagatcacgaaggtactcactccacaaagagaggccacgcaaagagtagaccagtacgcgactgtgatgatgtgctgcaaacacacccttctggcacacagtcaggcatcttcaacatcaaactgccggggtccagcaagatcttctcagtttactgtgatcaggagaccagccttggcggatggctgctcattcagcagcgcatggatgggagcctgaatttcaacagaacttggcaggactataaaagaggatttggctctcttaacgacgagggggagggtgagttctggctcggaaacgactatctgcacctgttgacccaacggggcagtgttctccgagtggagctcgaggattgggcagggaacgaggcatatgcagagtatcattttcgagtggggagtgaagcagagggatatgccctgcaggtgagctcctacgagggtactgctggagacgcattgatcgaggggtcagtagaagagggagctgagtatacgtcccacaataatatgcagttttcaacctttgatagggacgccgatcagtgggaggagaattgtgccgaggtgtacgggggcggctggtggtacaacaactgccaggctgccaatcttaacggtatctactatcccggagggtcttatgacccgcgaaacaatagcccatacgaaatcgagaacggcgttgtgtgggtttctttcagaggggcagattacagcctccgggcagtgcggatgaagatccgccctctcgtgactcag

SEQ ID NO: 11098 - DNA, 2598 bp, synthetic construct
  misc_feature 1..2598: note = source = /note="Description of Artificial Sequence: Synthetic coding sequence"
  source 1..2598: mol_type = other DNA
atgttctcaatgagaatcgtgtgcctggttctgagcgtagtcggcacggcgtggaccgccgactctggcgaaggtgacttcctagcagagggtgggggcgtgagggggccacgcgttgtagagcgacaccagtcagcttgtaaagattctgattggccgttctgttcagacgaagattggaactataagtgtccatctggttgtagaatgaaaggcctcatagatgaagtcaaccaggactttactaataggattaataagctcaagaacagtctattcgaatatcagaagaacaacaaggactcccattccctgactaccaacattatggagatacttcggggtgatttctcgtccgcaaataatcgagataacacttacaatagagtgtctgaagacctccgcagtcggattgaggtgctcaagaggaaggtaattgagaaggtgcagcatatccagcttctacagaaaaacgttagggcgcagctcgtggatatgaagcggctagaggttgatatcgacatcaaaattcggagctgcagaggcagttgctctcgcgcccttgctcgggaggtggacctcaaggactacgaggaccagcagaagcagctggaacaggtcatcgccaaggaccttctaccctcccgcgaccgtcagcacctgccattaatcaaaatgaagccagtcccagatctggtgcccgggaactttaaaagccagttacagaaggttcctccagagtggaaagccttaactgatatgccgcagatgaggatggaactggaacgccccggcgggaatgagatcactcgaggagggagcacctcttacgggaccggttccgagactgaatctccccggaatccatcatcggccggcagctggaacagtggctcatccggccccggcagcactgggaaccgaaatccaggctctagcggcacagggggaaccgccacctggaagcccggttcctccggcccagggagcacaggcagctggaattccggctcaagcggcactgggagcaccgggaatcagaacccgggcagcccacgtcctggttctactgggacttggaaccctggctctagtgaaagaggttctgcgggtcattggacttctgagtcctcggtctctggttcgacagggcagtggcatagcgaaagcgggtcgttccgccccgacagccctggatctggcaatgcacgtccaaataacccagactggggaaccttcgaggaggtgagtggaaacgtgtctcctggaaccagacgagagtatcacaccgaaaagcttgtcacgtctaaaggggataaggaactccgcaccggcaaggaaaaggtgacatcaggctccaccaccaccactcggaggtcttgttcaaaaacggtgactaaaaccgtgatcgggccagatgggcacaaagaggtgactaaggaggtagtgacctctgaagacggaagcgactgtcctgaggcgatggatttagggacattgtccggaattggaaccctggacggctttagacatcgccatccagacgaggctgctttttttgatactgcttcaacaggcaagacattccctggttttttcagtcccatgctgggtgagtttgtctctgagactgagtctaggggctccgagtcaggtatatttacaaacactaaagagtcctcctcccaccacccaggtattgctgagtttccctctcgcggaaaatcctctagttattcgaaacagttcacttcctctacctcttataacaggggcgacagtacgttcgaatcaaaaagctacaagatggctgacgaagccggttccgaagcggaccatgaagggacccatagcactaaacgtgggcacgccaaatctcggcctgtacgtgattgtgacgatgtcttacagacccatcccagtggtactcagagcggaattttcaacattaagctgcccggcagctctaagatcttcagcgtctattgtgatcaggagacatcgctcggcgggtggctcctgatccaacagagaatggacggcagtttgaattttaaccgcacctggcaggactataagaggggcttcggaagcctgaatgacgagggggagggtgaattttggttaggtaacgattatctccacttacttacgcagaggggatcagtgcttcgcgtcgagctggaagattgggcgggaaacgaagcatatgcagaataccactttcgcgtcggatccgaggcggaagggtatgcgctacaggtgtctagctacgagggcacagcaggggacgcgcttatcgaggggtccgtggaggaaggcgcagagtacacaagccacaacaacatgcagtttagcacgtttgaccgagatgctgaccagtgggaagagaactgcgcagaggtctatgggggagggtggtggtacaacaattgccaggcagccaatctgaatgggatatattacccagggggttcatacgatcctcggaacaactccccgtacgagatagaaaacggggtggtgtgggtgagctttcgaggcgccgactacagtttgcgggcagtccggatgaaaatcagaccactggttacccag

SEQ ID NO: 11099 - DNA, 2598 bp, synthetic construct
  misc_feature 1..2598: note = source = /note="Description of Artificial Sequence: Synthetic coding sequence"
  source 1..2598: mol_type = other DNA
atgttctccatgagaatcgtgtgtctggtacttagtgtggtggggactgcctggactgctgactctggagaaggagacttcctagcagagggagggggagtgcgggggcctagggttgtagaacgacaccagtccgcctgcaaagattcagattggcccttctgctccgacgaagattggaattataagtgtcccagtggatgtcgaatgaaggggctcatagacgaggtgaaccaggactttacaaataggatcaacaagctaaaaaattctctgtttgaataccagaagaataataaagattctcattctctgacaactaatatcatggaaatcctgagaggagatttttcaagtgccaacaaccgggataatacgtataaccgggtctccgaagacctacgaagtcggatcgaagtgctcaagcgaaaagtcattgaaaaagtccagcacatccaactcctacagaaaaacgttcgagctcagcttgtagacatgaagaggctagaagttgatattgatatcaaaatcagatcatgccgtggaagttgttctagagccctggctagggaagtcgatttgaaagattacgaagatcagcagaaacagctcgagcaggtgatcgctaaagatctgttgccttcacgcgaccgacagcacttacccctgataaaaatgaaaccagtgccagatcttgtccctgggaactttaagtctcagctgcagaaggttccaccagaatggaaagctctgactgatatgccccagatgcgaatggagctcgaaagacccgggggaaacgagataacaaggggagggagtacttcatatggaactggatctgagacagaatcacctcgcaacccctcctcagccgggagttggaactcagggagttcaggacctggatccactgggaatcgcaaccctggatcttcgggaacaggagggactgcgacatggaaacccggatcatcaggacccgggtctactgggagttggaactccgggtccagtggaacaggatcaacaggaaaccagaacccaggatccccccgaccaggatctactgggacgtggaaccccggatcctctgaaagagggagtgctggacattggacatcagaaagttccgtctctgggtcaactggacagtggcatagtgaatcagggtcatttaggcccgattcacccggatcagggaatgcacggcctaacaacccagactggggaacattcgaagaggtgtccggaaacgtgtctcctggaacaaggagggagtatcacacagaaaaactcgtcacttctaaaggggataaagaattgcgcactgggaaggagaaagtcacttctggatcaactacaacaactcggcggtcgtgttccaaaactgtgactaaaactgtaatcgggcccgatggacataaagaagtgacaaaggaagtggtgactagtgaagatgggtcggattgtcccgaagcaatggatctcggaacactgtctggaatagggacactcgacggatttcggcatcggcaccctgatgaggccgcattctttgatacagctagtactggaaaaactttccccggattcttttcccccatgttgggagaatttgtgagtgaaacggaatctagaggatctgaatcagggatcttcacaaacactaaagaatcttcatcccaccaccctgggatcgctgaattcccctctagggggaaaagttcttcctatagtaaacagtttactagttccactagttacaaccgaggggattccacatttgagtcaaaatcttataaaatggcagatgaagcaggatccgaagccgaccatgaagggacacactctacaaaaagggggcatgccaaatccagaccagttcgggattgcgatgatgttcttcagactcatccctctggaacacagtcaggaatatttaatatcaaacttccaggatcctcaaagatttttagtgtgtattgtgatcaggagacttctttgggaggatggctcctgatacagcagaggatggacggatcgctcaattttaataggacgtggcaggattacaaacggggatttgggtcgttaaacgacgagggggagggggaattttggttgggaaatgattatcttcacctgctgacacagagagggtccgttttacgtgtagagcttgaagattgggccgggaacgaagcctacgcggagtatcacttcagggtgggatctgaggccgagggatacgcactacaggtttcctcctatgaaggaactgccggagatgccctaatcgaaggatctgtggaagaaggggccgaatatacttcacacaacaatatgcagttctcaacatttgatcgggacgcagatcagtgggaggaaaattgtgcagaagtttacggaggaggatggtggtataataattgccaggccgctaatctcaacggaatctattaccctggagggtcctacgaccctaggaataatagtccttatgagatagaaaatggggtggtgtgggtgtcattcagaggggcagactattctttgcgggccgttaggatgaaaattaggccactcgttacgcag

SEQ ID NO: 11100 - DNA, 2598 bp, synthetic construct
  misc_feature 1..2598: note = source = /note="Description of Artificial Sequence: Synthetic coding sequence"
  source 1..2598: mol_type = other DNA
atgttctcaatgcgaatcgtgtgcctggtcctttcggtcgtcggaacggcatggacagctgactcaggcgaaggcgactttctggcggagggcggtggagttagagggcctcgagtggtggaaagacaccaatctgcatgcaaggattctgattggccattttgttcagatgaggattggaactataagtgtccatccggctgccgtatgaaaggattaattgatgaggtgaaccaagattttacaaatcgcatcaacaaacttaaaaatagtctatttgagtatcagaaaaataacaaagattctcactcactaacaaccaacattatggagatcctgagaggtgatttctcgtcggcaaataatagagataacacgtataatcgagtaagcgaagatttacgctctcgtatagaggtacttaaacgtaaggtcattgagaaggtgcaacacattcaacttcttcaaaaaaatgtgcgggcgcaattggtcgatatgaaacgcctggaagtagatatcgatattaaaataagatcatgtagaggttcatgcagccgtgctctcgcccgagaggttgatcttaaagattacgaggaccagcaaaagcagcttgaacaagtaatcgccaaagaccttctaccgtcccgggatcgccaacatttgccattaatcaaaatgaaacctgtacccgacttagtcccaggaaattttaaatcacagttgcagaaagtgcctccggaatggaaagctctgacagacatgccgcagatgcgaatggagcttgaacgtccaggcggaaacgaaatcacgcggggagggtcgacatcctatgggacaggctctgaaaccgagagtccacgaaatcccagctccgctggctcttggaatagcgggtcaagcggaccgggaagtacgggcaatcgaaatcctggtagcagcggaaccggtggtacggcgacatggaaaccagggagctcaggaccaggatctactggcagctggaattctggcagcagcggcacaggatccacaggcaaccaaaatccgggctcgcccagaccaggaagcactggcacctggaatccgggcagctctgaacgggggtcggcgggccactggacatcggagtcaagcgtgtctggttcgaccggccagtggcactcagaatctggctcttttagaccggattctccgggtagcggtaatgcaaggccaaacaatcctgattggggaacatttgaggaagttagtggaaacgtatctcctggtactcgaagagagtatcacacagaaaaattggttacctcaaaaggggacaaagaacttagaacgggaaaagaaaaagtaacttcaggcagtactacgacaacacggcgatcatgctccaaaacggttaccaaaactgtcattggaccggatgggcataaagaagtgacaaaagaagttgtcacaagcgaggatggatctgattgtcctgaagcaatggacctaggaactttgtctggcattggtacattagatggatttcggcaccgacatcctgatgaggcagcgtttttcgataccgccagtacaggaaaaacatttcccggatttttcagcccgatgttaggagaatttgtgtctgaaacagaatcgcgcggttctgaatcgggaatttttactaatacgaaagaaagttcaagccatcatccggggatcgcggaattcccgtcaagaggcaaaagctcctcatatagtaaacagtttacatcttctacaagctataaccgtggagacagcacatttgagtcaaaaagctataagatggcggatgaagctggctctgaagcagaccatgagggaactcattctacaaagagaggccatgcaaaatcccgtccggttcgagattgcgatgatgttcttcaaactcacccgtcgggaacacaatcaggcatttttaacatcaagctgcctggcagttctaaaattttttcagtctattgcgatcaagaaacgagtttaggaggctggttgctcattcagcaaaggatggatggtagcctaaactttaaccgcacatggcaagattacaaacggggcttcggcagtttaaacgatgaaggcgaaggtgagttttggttaggaaatgactatttacatttgcttacgcaaagaggatctgttctgagagtggagcttgaggattgggcggggaacgaagcgtatgctgaataccactttcgtgtgggaagcgaagcggaaggatatgcactccaagtaagtagctacgagggtacagctggggacgccctcattgaggggagcgtcgaagaaggcgcagaatatactagccataataacatgcaattttccacctttgaccgcgatgcggatcagtgggaagaaaattgtgcagaagtgtatggaggaggatggtggtataacaattgtcaggccgcaaatctgaacggtatctactatccgggaggatcatatgatcctcgtaataacagcccgtacgaaatagaaaatggtgtcgtctgggtgagcttccgaggggccgattattctcttagagctgtacgtatgaaaattagaccgttagtcacgcaa

SEQ ID NO: 11101 - DNA, 2598 bp, synthetic construct
  misc_feature 1..2598: note = source = /note="Description of Artificial Sequence: Synthetic coding sequence"
  source 1..2598: mol_type = other DNA
atgttttcgatgcgtatagtttgtttagttttatcggtagttggtacggcgtggacggcggattcgggtgaaggtgattttttagcggaaggtggtggtgttcgaggtccgcgagttgtagaacgacatcaatcggcgtgtaaagattcggattggccgttttgttcggatgaagattggaattataaatgtccgtcgggttgtcgaatgaaaggtttaatagatgaagtaaatcaagattttacgaatcgaataaataaattaaaaaattcgttatttgaatatcaaaaaaataataaagattcgcattcgctaacgacgaatataatggaaatattacgtggtgatttttcgtcggcgaataatcgagataatacgtataatcgtgtttcggaagatttacgttcgcgaatagaagtactaaaacgtaaagtaatagaaaaagttcaacatatacaactactacaaaaaaatgtacgagcgcaactagtagatatgaaacgtctagaagtagatatagatataaaaatacgttcgtgtcgtggttcgtgttcgcgagcgctagcgcgagaagtagatttaaaagattatgaagatcaacaaaaacaactagaacaagttatagcgaaagatttactaccgtcgcgtgatcgtcaacatttaccgttaataaaaatgaaaccggtaccggatttagttccgggtaattttaaatcgcaattacaaaaagttccgccggaatggaaagcgctaacggatatgccgcaaatgcgtatggaattagaacgtccgggtggtaatgaaataacgcgtggtggttcgacgtcgtatggtacgggttcggaaacggaatcgccgcgaaatccgtcgtcggcgggttcgtggaattcgggttcgtcgggtccgggttcgacgggtaatcgtaatccgggttcgtcgggtacgggtggtacggcgacgtggaaaccgggttcgtcgggtccgggttcgacgggttcgtggaattcgggttcgtcgggtacgggttcgacgggtaatcaaaatccgggttcgccgcgtccgggttcgacgggtacgtggaatccgggttcgtcggaacgtggttcggcgggtcattggacgtcggaatcgtcggtatcgggttcgacgggtcaatggcattcggaatcgggttcgtttcgtccggattcgccgggttcgggtaatgcgcgaccgaataatccggattggggtacgtttgaagaagtatcgggtaatgtatcgccgggtacgcgtcgtgaatatcatacggaaaaactagtaacgtcgaaaggtgataaagaactacgaacgggtaaagaaaaagttacgtcgggttcgacgacgacgacgcgacgttcgtgttcgaaaacggtaacgaaaacggtaataggtccggatggtcataaagaagttacgaaagaagttgtaacgtcggaagatggttcggattgtccggaagcgatggatttaggtacgctatcgggtataggtacgctagatggttttcgtcatcgtcatccggatgaagcggcgttttttgatacggcgtcgacgggtaaaacgtttccgggttttttttcgccgatgttaggtgaatttgtatcggaaacggaatcgcgaggttcggaatcgggtatatttacgaatacgaaagaatcgtcgtcgcatcatccgggtatagcggaatttccgtcgcgtggtaaatcgtcgtcgtattcgaaacaatttacgtcgtcgacgtcgtataatcgtggtgattcgacgtttgaatcgaaatcgtataaaatggcggatgaagcgggttcggaagcggatcatgaaggtacgcattcgacgaaacgaggtcatgcgaaatcgcgaccggtacgtgattgtgatgatgttctacaaacgcatccgtcgggtacgcaatcgggtatatttaatataaaattaccgggttcgtcgaaaatattttcggtatattgtgatcaagaaacgtcgttaggtggttggttactaatacaacaacgtatggatggttcgttaaattttaatcgtacgtggcaagattataaacgaggttttggttcgttaaatgatgaaggtgaaggtgaattttggctaggtaatgattatttacatttattaacgcaacgaggttcggtactacgagttgaattagaagattgggcgggtaatgaagcgtatgcggaatatcattttcgagtaggttcggaagcggaaggttatgcgttacaagtatcgtcgtatgaaggtacggcgggtgatgcgttaatagaaggttcggttgaagaaggtgcggaatatacgtcgcataataatatgcaattttcgacgtttgatcgagatgcggatcaatgggaagaaaattgtgcggaagtatatggtggtggttggtggtataataattgtcaagcggcgaatctaaatggtatatattatccgggtggttcgtatgatccgcgtaataattcgccgtatgaaatagaaaatggtgtagtttgggtatcgtttcgaggtgcggattattcgttacgtgcggtacgaatgaaaatacgaccgttagttacgcaa

SEQ ID NO: 11102 - DNA, 2598 bp, synthetic construct
  misc_feature 1..2598: note = source = /note="Description of Artificial Sequence: Synthetic coding sequence"
  source 1..2598: mol_type = other DNA
atgttctcgatgcggatcgtgtgcctggtgctgtcggtggtcggaacggcctggaccgccgattctggcgaaggcgatttccttgctgagggcggtggagtccgcggcccgcgcgtggttgagcgccatcagtcggcatgcaaagattccgactggcccttctgctcggacgaagattggaattacaagtgccctagcgggtgcaggatgaaaggcttgatcgacgaggtgaaccaggacttcaccaacagaattaacaaactgaagaatagccttttcgagtaccagaagaacaacaaggattcgcattccctgaccaccaacataatggagattctgcggggcgacttctcgtcagccaataacagagacaatacctacaatcgggtgtcagaagatctgcgctccaggatcgaagtcctcaaacgcaaggttatcgaaaaggtgcagcatatccagctgctgcaaaagaacgtgcgcgcgcaactggtggacatgaagcgcttggaggttgacatcgatatcaagatacgcagctgtcggggaagctgctcacgggcgctcgctcgcgaggtggatctgaaggactacgaagatcaacaaaaacaactggagcaagtgatcgctaaggacctcctgcctagccgcgacagacagcatctgccactcatcaagatgaagccggtcccggacctggtcccaggaaatttcaagtcccagctccagaaggtccccccggagtggaaggccctcacggacatgccacagatgagaatggaacttgaaagaccgggaggcaacgaaatcactcgtggaggttctacgtcgtacgggactgggtccgagactgaatccccgcgaaacccgtcaagcgctggctcatggaactcgggatcgtcgggaccggggtcgactggaaaccgcaaccctgggtcatcaggcacgggcggaactgcgacttggaagccaggaagcagcggaccgggcagcactgggtcgtggaatagcggctcctccggaaccggcagcaccggaaaccagaatccaggatcccctagacccgggtcgactggcacttggaaccctggatcatcggaacggggaagcgccggacactggacttccgagtcctctgtctccggatcgacgggccagtggcattctgaatcaggtagcttcagacccgattcgcccggatcgggtaatgcgcgccctaataaccccgactgggggacgttcgaagaagtttcgggcaatgtgagcccgggcactagacgcgagtaccatactgaaaagctggtgacttccaagggagacaaagaactccggactggaaaagaaaaggtcacttccgggtcaaccaccaccaccagacggtcatgctcgaaaacggtgaccaagaccgtgatcggaccggatgggcacaaggaagtgactaaggaagtggtcaccagcgaagatggctccgattgccccgaggcgatggatctcggtaccctgagcggcattggcaccttggatggatttagacataggcacccggacgaagcggcattcttcgacactgcctcaaccggaaaaaccttcccgggattcttctccccgatgctgggagaattcgtgtcggagactgagtcccggggttcagagagcggaatcttcaccaataccaaggaaagctcgtcacaccaccctggtatcgccgaattcccttcccgcggaaaatcttcatcatactccaaacagttcacttcgtccacctcctataaccgcggagattcgacgttcgaatccaagtcctacaagatggctgacgaggccggctcggaggcggaccacgaaggaacccactcaactaaacgcgggcacgccaaaagccgcccagtgcgcgactgtgacgatgtgctgcaaacccacccgtccggaactcaaagcggaattttcaacatcaagctgccgggatcctctaagatcttttccgtgtactgcgaccaggaaacctcacttggcggttggctcctgattcaacaaaggatggacggatcgctgaacttcaatagaacctggcaggattacaaaagaggattcggatctctgaacgatgagggagagggggaattttggctgggaaatgattatctccacctgctgacccagcgcggatcggtgctcagagtggagctggaggactgggccggcaacgaagcctacgcagagtaccactttagagtcggttcggaggccgaaggatacgcactgcaagtgtcaagctacgaaggcaccgcgggagacgccctcattgaagggtccgtggaagagggagctgaatacacgtcccacaacaatatgcagttctcgactttcgaccgggatgcagatcaatgggaagaaaattgtgccgaagtttacggtggcggatggtggtacaacaattgccaggctgccaacctgaacggtatctactaccctggcgggtcatacgaccctcggaacaattcgccgtacgagatcgagaatggggtcgtgtgggtgtccttccggggggccgactactcactgagagcagtgcggatgaagatccgccctctcgtcacccaa

SEQ ID NO: 11103 - DNA, 2598 bp, synthetic construct
  misc_feature 1..2598: note = source = /note="Description of Artificial Sequence: Synthetic coding sequence"
  source 1..2598: mol_type = other DNA
atgttctccatgagaatcgtctgtctggtcctttccgtcgtgggaactgcttggacggcagactccggtgaaggagactttttggcagaaggaggaggagtgcgcggcccacgggttgtggaaagacatcaatcggcatgtaaggattccgattggccgttttgcagcgacgaagattggaactacaagtgcccgtcagggtgtagaatgaaggggcttatcgatgaagtcaaccaggacttcaccaacaggataaacaaactgaaaaactccctttttgaatatcaaaagaacaacaaggatagccattccctcactactaacattatggaaatcctgagaggcgattttagctccgcaaataacagagataatacctacaaccgggtgtccgaagatttgcggtcgaggatcgaagtgctcaagcggaaggtgattgagaaggtgcagcatatccagcttcttcagaagaacgtgcgggcacaattggtcgatatgaaacgcctggaagtcgacatagacatcaaaatacgcagctgtaggggttcttgttcgagggcactggcgcgagaagtggatcttaaggactacgaagatcagcaaaaacaactggaacaggtgattgccaaggatctccttccatcgcgggacagacaacatctgcctctcattaagatgaagccagtgcccgatctggtccccgggaatttcaaatcccaacttcagaaggtcccgcccgaatggaaggcactgactgatatgccccaaatgcgcatggaactcgaacgacctggaggaaatgagatcactaggggagggtccacttcctacggaacgggaagcgagactgaatcgcctcgcaatccttccagtgcaggctcgtggaactctggttcctccggcccaggctcgaccggtaatcggaacccaggttcaagcggtactggaggaaccgcaacgtggaagcctgggagttctggtccagggtctaccggtagctggaatagcggaagcagcggaaccggaagcaccggcaatcaaaaccctggttcgccaagacctggaagcacgggaacctggaatccaggttcatcggaacgcggttcggcaggacattggacctcggagtcatcggtgagcgggtccactggccaatggcatagcgaatccggttcgtttcgtcccgactcgcctgggagcggtaatgcgcgtccgaacaatcctgactggggtacttttgaggaagtgtcaggaaatgtttcgcccggaaccagacgggagtaccacactgagaagctggtgacttccaagggagataaggagctgaggaccggaaaggagaaagtcacctcgggatccacgaccactaccagacggtcctgtagcaagaccgtgaccaaaaccgtcataggacctgacggtcataaggaagtgactaaggaggtggtcacttcggaagatggaagcgactgtcctgaggcaatggatttgggtactctttcgggcattggtactctcgatggatttagacaccgacatccggatgaagcagcatttttcgacactgcctcgactggtaagaccttccctgggtttttcagccctatgcttggggaatttgtgtcggaaactgagtcacgtggtagtgagagcggaatctttaccaacaccaaagagtcatcgtcgcatcatccaggtattgcggaatttccttcccggggcaagagcagctcctacagcaaacaatttactagctcaacctcgtacaaccgtggggattccactttcgaatccaagagctacaagatggcggatgaggcgggttcagaagcagaccatgaaggcactcattcaaccaagagaggacatgctaagtccagacccgttagagattgtgatgatgtgcttcaaactcatccttcaggtacccagtcggggatcttcaacataaagctcccaggtagctccaagatcttctccgtgtattgtgatcaagagacttcgttgggaggatggctgttgattcagcaacggatggatggttcactgaactttaatcgcacttggcaggactataaacgagggttcggttcgcttaacgacgagggagagggtgaattttggcttggtaacgattaccttcatctcctcacgcaaaggggttccgtcctgcgtgtcgagctggaggattgggcaggtaacgaggcgtacgcagaataccatttcagggtcggatcggaagcggaaggatacgccctgcaagtgtccagctacgaaggaactgcaggagacgcgctgatcgagggttccgtcgaggaaggggcagagtacacttcgcacaataacatgcagttttcaacttttgatcgcgatgcagaccaatgggaggagaactgtgcagaagtgtacgggggtggttggtggtacaacaactgtcaagcagccaacctcaacggcatctactaccccggtggaagctacgatccgcgtaacaactcaccatacgagatcgaaaacggagtggtgtgggtgtcatttcgaggagctgactactccctccgtgccgtgcggatgaaaatcagaccactggtgactcag

SEQ ID NO: 11104 - DNA, 2598 bp, synthetic construct
  misc_feature 1..2598: note = source = /note="Description of Artificial Sequence: Synthetic coding sequence"
  source 1..2598: mol_type = other DNA
atgttctctatgagaattgtctgtttggttttgagtgtcgttggaaccgcctggacggctgactcaggtgagggagatttcctagcagaaggaggtggagtgcgaggaccaagagtcgtagagcgacatcaatcggcatgtaaggatagtgattggcctttttgttctgacgaagattggaactataagtgcccatctggttgccgcatgaaaggactaatagatgaagtgaatcaagattttacaaaccggattaacaagcttaagaatagtctcttcgaataccaaaagaataacaaggatagtcatagtctcactacaaatattatggaaattttgagaggggatttcagttcggccaataatcgcgataacacgtataatagagtctcagaggaccttagatctcggatcgaagttctgaaacggaaggtaatagaaaaagtgcaacacattcaactcctacagaagaacgttcgcgcacaattggttgacatgaaacgacttgaagttgacatcgatattaagatccgatcatgcaggggatcttgtagtagggctttggctcgtgaagtggacctgaaggactatgaagatcagcagaaacagctggaacaagtaattgctaaggatttattgccttctagagataggcaacacctgccattgattaaaatgaaaccggtccctgatctcgtgccaggtaacttcaaatcgcaattgcagaaagttccaccagaatggaaggctcttaccgatatgccacaaatgcgaatggaactagagagaccgggcggtaacgagataacgcgaggaggttcaacgagctacggaacaggcagcgagactgaatcgccaaggaacccatcttcggccggctcttggaactccggttcatcagggccaggaagcacaggaaacagaaacccaggatcttctggcacaggaggaacagcaacatggaagccaggatcctcagggccagggtctacaggatcatggaattcaggatctagtggaacaggatcaacaggaaatcaaaatccggggtcgccccgtccaggatcaactggaacatggaatcctggatcgagtgagagaggttcggcaggacattggacatcggaatcgagcgtctcgggatcaacaggacagtggcattctgagtcaggttcctttcgacctgactctccgggttctggcaatgcccgcccaaataatcccgattggggtactttcgaagaagtctctggtaatgttagtccgggaacgcggcgtgaatatcatacagaaaagctagtcacttcaaagggagataaggagctccgtactgggaaggaaaaagtgacttctggctcaactaccacgacgcggagatcttgttcaaaaacagtgaccaaaacagtgattggaccggacggacacaaagaggtgacgaaggaagttgttacctcagaggatggaagtgattgcccagaagcaatggacctgggaacgttgtcaggaattgggacccttgatggtttcagacaccgtcatccggacgaagccgcgtttttcgatacggcgtctaccggtaagactttcccaggcttttttagtccgatgcttggggaattcgtttcggaaacagaaagtagaggaagcgagtccggaatttttacgaatactaaagagtcctcgtctcatcacccaggtatcgctgaatttccgagtcgcggcaaatcttcctcttactctaaacagtttacctcgtctacttcttataatagaggagattcgacttttgaaagcaagtcttacaagatggcagacgaagcgggatccgaggcagatcatgaaggaacgcattccactaaaagaggacatgctaaatcaagaccagtcagagactgcgacgatgttttacaaacccacccatcagggacacagtctggaatattcaatattaaattaccgggatcatcaaaaatcttttctgtttattgtgatcaggaaacatcattgggcggatggcttctcattcaacaacgaatggatggatccttgaacttcaatcgaacatggcaggactacaaaagaggcttcggatcacttaatgatgagggagaaggagaattctggttaggcaatgattaccttcatttactgacgcagaggggatcggttctaagagtggaattggaagactgggcaggtaatgaagcatatgctgagtaccattttagggttggtagcgaagcagaaggttacgctttacaggtatcatcgtatgaaggaactgcgggagacgcgttgattgagggttcagttgaagaaggagcagagtacacatcccataataatatgcaattttcaactttcgaccgagatgcggatcaatgggaggaaaattgcgcagaagtctacggaggagggtggtggtacaataattgtcaagccgcgaatcttaacggtatttattacccaggaggatcctacgatccacgaaataattctccatatgaaattgaaaatggagtggtttgggtctcttttagaggcgcggattattctttgcgggccgtacggatgaagatacgaccgctagtgacacaa

SEQ ID NO: 11105 - DNA, 2598 bp, synthetic construct
  misc_feature 1..2598: note = source = /note="Description of Artificial Sequence: Synthetic coding sequence"
  source 1..2598: mol_type = other DNA
atgttctccatgagaatagtgtgcctggttctgtctgtggtgggcaccgcctggacagctgacagcggagagggggacttcttagctgaaggcggcggggttcggggcccccgggtggtcgaaagacaccagagcgcctgcaaggattctgattggcccttctgctcagatgaagactggaactacaagtgtccatccggatgtcggatgaagggccttattgatgaagtcaatcaagattttaccaataggataaacaaattaaaaaattctctgtttgaataccaaaaaaacaacaaggatagccactccctgacaactaatattatggaaatcctacggggcgactttagcagtgctaacaacagggacaacacctacaacagggtgagcgaagacttaaggagccggatagaggttttaaaacgcaaggttatagaaaaggtgcaacatatacaattactgcagaagaacgttcgggcccaactcgtagacatgaaacgtctagaggtggatattgatatcaaaattcgtagctgtcggggtagttgcagcagggccctggcccgagaggtggatctcaaagattatgaagatcagcagaagcagctcgaacaggttatcgccaaagatctgctgccaagccgagaccgccagcatttacctctcatcaagatgaaacctgtgcccgacctggttccagggaactttaagtctcagctgcaaaaggtccctcctgagtggaaggccctgactgatatgccacagatgcggatggaactggaaagacccggcggcaacgagatcacccgaggggggtccacatcctacggaacaggatccgagaccgagagtcctagaaatccaagctctgccggctcttggaactccgggtcctctgggcctggcagcaccgggaaccggaatcctggatcctcaggaaccggcggaaccgccacctggaagcctggctcttctggccctgggtccactggtagttggaactccggatcctccggtaccggtagtacaggtaatcagaaccccgggagcccccgtcctgggtcaactgggacttggaaccccggcagcagtgaaagaggatccgctggacactggacatctgaaagcagcgtatctgggtccaccggccagtggcattcagagtcaggcagctttcggcccgactctccaggatcaggcaacgcaagacccaacaatccagactggggcacattcgaggaggtgtctggtaacgtgtccccaggcacacggagagaataccatactgagaaactggtgacctccaaaggcgataaggaactgcggacaggcaaggagaaagtgacctctggctctacaacaactactcgtcgttcctgcagcaaaaccgtgaccaagactgtgatcgggccagatggccacaaggaggtcacaaaggaggtggtaacttccgaggatggtagcgattgtcctgaggccatggacctgggaactctgtctggaatagggaccctcgacggcttcagacatagacatcctgatgaggcagctttctttgataccgctagcacaggcaaaaccttccccggcttcttttccccgatgctaggggagttcgtcagcgagactgagtctcggggctcagagagtgggatattcacaaacacaaaggagtccagtagccatcatccaggcattgctgagtttccctccagaggtaaatcttcatcctattctaaacaattcaccagctctacctcatataatcgtggtgactcaacattcgaaagtaagagttataaaatggccgacgaggccggaagcgaagcagatcatgagggcactcactcaacaaaacgtggtcatgccaaaagccgaccagtgcgcgactgtgacgatgtgcttcagactcatcctagtggcactcagagcgggatcttcaatataaaactgcccgggtcttccaaaatattcagtgtctactgcgaccaggagacttcactggggggttggttactcattcagcagagaatggatgggagcctgaacttcaacagaacctggcaggactacaaacgggggtttggcagcctgaacgacgagggagaaggcgaattttggctgggcaacgactacctgcatcttttaacccaaaggggatccgtactgcgggttgagctggaggattgggccgggaatgaggcttatgccgagtatcatttcagggtcggcagcgaggctgaagggtatgctcttcaggtttcttcctatgagggaaccgcaggagatgctctgattgaaggctcagtagaggagggggccgagtacacctctcacaacaacatgcaattttccacctttgaccgggacgctgaccagtgggaagaaaattgcgctgaagtatatggcgggggctggtggtacaacaattgtcaagcagccaatctgaatggcatctattacccagggggttcctacgacccccgaaacaatagtccatacgagatcgagaatggggttgtgtgggtgtcattcaggggggccgattacagcctaagagctgttcgtatgaagattagacccctagtgactcaa

SEQ ID NO: 11106 - DNA, 2598 bp, synthetic construct
  misc_feature 1..2598: note = source = /note="Description of Artificial Sequence: Synthetic coding sequence"
  source 1..2598: mol_type = other DNA
atgttctctatgcgcatagtatgccttgttctgtccgtggtgggtaccgcctggactgctgactctggtgaaggtgatttcttggcagagggtggaggagtcagaggcccccgcgttgttgagcgtcaccagtctgcctgtaaggacagcgattggcccttttgctccgatgaggactggaattacaagtgccccagtggatgcagaatgaagggcctgatcgatgaggtcaatcaagattttactaacaggatcaacaaactgaaaaactccttgttcgaatatcagaagaacaataaggacagtcattctcttaccacaaacattatggagatcctgcgcggagatttcagtagtgccaacaaccgcgacaatacatacaacagggtcagtgaagatctcaggagtaggattgaagttctcaaaagaaaagtaatcgagaaagtccaacatatccagctgctgcagaaaaacgtaagagcccaattggtcgatatgaaaagattggaagtggacatcgatattaaaatcagatcatgccgtggctcatgttctagagcattggcaagagaagtggacctgaaggactatgaggatcaacaaaagcagctggagcaggtgatagctaaggatctgctcccatctcgtgatagacaacatctgccacttatcaaaatgaagcccgtgcccgatcttgtgcctggcaactttaagagtcaattgcagaaggtacctcctgagtggaaggctctgaccgatatgcctcagatgaggatggaattggaacgccctggcggaaacgaaatcactagaggtggatcaacttcctacggtactggtagcgaaactgaatcccctaggaatccaagcagtgccggaagctggaattcaggctcatctggcccaggttccaccggaaacagaaacccaggctcctctggtacaggcggaactgcaacttggaaacctggatcttctggtcctggctctactggatcttggaatagtggtagctctggcactggttcaaccggaaaccaaaatcctggtagccctcgtcctggatccaccggcacatggaatcccggatcaagcgagaggggttccgccggccactggacaagtgagtcttcagttagcggctctaccggacagtggcatagcgagtctggctctttccgtcccgactcccctggttccggaaacgcaaggcccaataaccctgactggggtactttcgaggaagttagtggcaatgtatcccctggaactaggcgcgaataccacacagaaaagttggtgactagtaagggagataaggagctcaggacaggaaaggagaaggtgacatcaggttctactacaactacacgtagaagctgctctaaaaccgtgaccaaaactgtcatcggtccagatggtcataaggaagtcacaaaggaggtggtgacctccgaagacggctcagactgccctgaggcaatggaccttggaactctgtctggcatcggtactcttgatggattccgtcacagacatccagatgaggcagccttttttgacaccgcatcaacaggtaaaacctttcctggctttttctccccaatgttgggagaattcgtttctgaaaccgaatctagaggttctgagtccggcatttttacaaatactaaggagtccagctcccaccatcccggcatagcagaatttccatccaggggtaagagtagcagttattccaagcagttcaccagttccactagctataacaggggagattccactttcgagtctaagtcttataagatggccgatgaagctggatctgaagcagaccatgagggtacacactcaactaaacgtggtcatgccaagtccaggcctgtgcgtgactgtgacgacgttctccagacccacccttccggtactcaatccggaatcttcaacatcaagctgcctggcagtagtaagatcttttccgtctactgcgaccaagagaccagccttggaggctggctgctgatccagcagcgcatggacggaagcctcaacttcaaccgtacttggcaggactataagcgtggtttcggatcactcaacgacgagggagaaggagagttctggttgggtaacgattacctgcaccttttgacacaaaggggatccgtgctcagagtggagttggaagattgggcaggaaatgaggcttacgccgagtaccacttcagagtgggctccgaagctgagggatacgctttgcaggtttcatcctacgagggtacagccggcgatgctctcattgagggatccgtcgaggagggagctgaatacactagtcataacaacatgcagttctcaacctttgaccgtgatgctgatcagtgggaggaaaattgtgcagaggtgtacggtggcggatggtggtataataactgtcaagccgcaaatttgaatggcatttactatcccggcggctcctacgatcctagaaataactctccatatgagatcgagaatggagtcgtgtgggtatccttccgtggcgccgactattccctgcgcgcagttaggatgaagatccgcccactggtgacccag

SEQ ID NO: 11107 - DNA, 2598 bp, synthetic construct
  misc_feature 1..2598: note = source = /note="Description of Artificial Sequence: Synthetic coding sequence"
  source 1..2598: mol_type = other DNA
atgttcagcatgcgaattgtctgcctcgtgctgtcagtagttggaacggcttggacagcagattccggcgaaggggattttctagccgaaggggggggggtgcgcggtcccagagttgttgaacgccaccagtcagcctgtaaagattccgattggcctttctgcagtgacgaagattggaactacaaatgcccaagcggctgccgtatgaaaggactcattgatgaggtgaaccaagatttcacgaatcgaatcaataaactgaagaatagtttgtttgagtaccaaaagaataacaaggatagccactccctcacaaccaacatcatggaaattctgagaggggacttctcttccgcaaacaatagagacaatacttataatagagtttccgaagatttacgtagccgaattgaggtgctgaagcggaaagtcattgaaaaagtgcagcatatccagttgctgcaaaaaaatgttcgcgcacagttagtggatatgaagcgacttgaggtagatatagacatcaaaatcagatcatgccgagggagctgttccagggccctggctagggaagtcgacctaaaggactatgaggatcaacagaaacagttagaacaagtgattgccaaggacctcctaccatcacgagaccgtcagcatttgcctttgatcaaaatgaagccagtgccagacttggtgccaggtaattttaagagccagctgcaaaaggtgcccccagagtggaaggccctgactgatatgccgcagatgcgaatggagttagagagacccggcgggaacgagatcacgagaggaggctccacgtcttatgggactggatctgaaaccgagtccccacgaaatccaagctctgctggcagctggaatagtggctcttcggggcccggctcgacgggaaatagaaatccagggtcatcgggcaccggcggaacagctacctggaaacccggctcgtcaggccccggatctactgggtcctggaattctgggtctagtgggaccgggtcgacagggaatcaaaacccgggatcaccgcgacccggaagcacaggaacatggaaccccggctcttctgaaaggggtagcgcaggacattggaccagcgaaagttcggtgtccggatcaacagggcagtggcattccgagagtgggtcttttagacccgactcccccggatcgggtaatgccagaccgaataatcccgattggggtacctttgaggaggtatcgggcaatgtctcgccgggaacccgcagggagtatcacactgaaaagttggttacaagcaagggcgataaggaactgcgaaccggaaaggaaaaggttacctctgggagcaccacaacaaccaggaggtcctgttctaagactgtcacaaaaaccgtaatcgggccggatggccacaaggaggtgactaaagaggtcgttacgagcgaggacggttccgattgcccagaagccatggacctgggcacactgtccggaattggcaccctggatggattcagacacaggcacccggacgaagccgctttcttcgacactgcctctaccggtaaaaccttccctgggttcttctctccaatgctgggcgagtttgtgtccgaaactgagtcaagggggtctgaaagcggcattttcaccaacaccaaagagtcctccagtcatcaccccggaatagccgaattcccttcacgaggcaaaagctcctcctactccaagcagtttacaagctcaactagctacaacaggggtgatagtacattcgaaagcaagtcttacaagatggctgacgaagctggtagcgaagcagaccacgagggaactcattcaacaaaacgaggccacgctaaaagtcggcccgtgcgagattgcgatgatgtgctgcagacccaccccagtgggacacagagcggtatctttaatatcaagcttccggggagctccaagattttctcagtgtactgtgaccaggaaacctctttgggtgggtggttactgatccaacagagaatggatggctcactgaattttaataggacttggcaggattacaagaggggtttcggatccctgaatgacgagggagaaggagaattttggctgggcaacgactatctccaccttttaacccagagagggtcagtactcagagtggaacttgaggattgggcgggtaacgaagcttacgcagaatatcacttccgagtaggtagtgaagcggagggatacgcgctgcaggtctcgtcatatgaggggaccgctggagatgccctgatagaagggtctgttgaagaaggagccgagtacacgagtcacaataacatgcaattctccacgttcgatcgtgatgccgaccagtgggaggaaaactgtgctgaagtttacggaggcggctggtggtacaacaactgtcaagcagctaacctgaatgggatatattatccaggaggttcctatgatccacgaaacaattctccctacgaaatcgaaaatggagtcgtctgggtttccttcagaggggctgattactccctgagagctgtaagaatgaagatccggccactagtcactcaa

SEQ ID NO: 11108 - DNA, 2598 bp, synthetic construct
  misc_feature 1..2598: note = source = /note="Description of Artificial Sequence: Synthetic coding sequence"
  source 1..2598: mol_type = other DNA
atgttctccatgcgtatcgtgtgtctggtccttagcgtggtgggaaccgcatggactgcagactcaggggagggtgacttccttgccgaaggtgggggcgtgagaggacctcgggtcgtcgagcgtcaccagtccgcctgtaaggactcggactggcccttttgttccgacgaggattggaactacaagtgtccttcgggttgtaggatgaaagggctcattgatgaggtcaaccaggacttcactaacagaattaacaaacttaagaattccctgttcgaatatcagaagaacaataaggattcgcactcacttaccaccaacattatggaaatcctgcgaggggacttctcctccgctaacaacagggataacacctacaatcgggtttcagaagatcttagatcaagaatcgaagtgctgaagcgcaaggtcatcgagaaggtgcaacatatccagcttctccaaaagaatgtccgcgcacagttggtggatatgaagcgcctggaagtcgatattgacattaagatccggtcatgtcgagggtcctgttcgcgggcgctggcgagggaagtggatctgaaagattacgaagatcaacaaaagcagttggaacaggtgatagcgaaagaccttctgccttcgcgggacagacagcatctgcccctgattaagatgaagcccgttccggacttggtgcctggtaatttcaagtcgcaacttcagaaggtgcctccagaatggaaggcactgaccgacatgccgcagatgagaatggaattggaacgtcctggtggaaacgagattactagaggaggttccacctcgtacggaaccggttctgaaactgaatcgcctcggaacccttcctccgcaggatcgtggaacagcggctcgtcaggacctggtagcactgggaaccgcaacccagggtcctccggaactggaggaaccgcaacgtggaagccaggttcgtcgggccccggatctacgggatcctggaattccgggagcagcggaaccggctcgaccggaaaccaaaatcccggatcacctcggcccggatcaactgggacgtggaacccgggctcgtcggaacgaggctcggccggtcattggacttccgaatcctcggtatcaggttcgaccgggcaatggcattccgaaagcggcagcttcagaccagacagccccggatcaggaaacgcacgaccaaacaatccagattggggaaccttcgaagaagtgtcaggtaacgtgtcacctggcacccgcagggaataccatacggagaaactggtgacctcaaagggagataaagaactgagaactggcaaggaaaaagtgacttcgggaagcacgactaccaccaggagatcatgttccaagactgtgaccaagaccgtcataggacctgatggccacaaggaggtgactaaggaagtcgtgacctcagaagatgggtccgactgtcctgaggcaatggatctgggtaccctgtccggaattggtacgcttgatggattcagacacagacacccagacgaggccgcgttttttgataccgccagcactggtaagacctttcctggctttttcagtccaatgctgggagaattcgtgtccgaaaccgagtcgcgcggaagcgaaagtggaatctttaccaacacgaaggagtcgtcgtcgcaccaccctggaattgcagaatttccatcccgaggaaagtcctcatcctactcgaagcagttcacgtcgtcgacctcctacaaccgaggggactccacctttgagagcaagtcctacaagatggcagacgaggcgggttcagaggctgaccatgaaggaactcattccaccaagagaggacatgcaaagagcagaccagtgagggattgcgatgatgtccttcaaacccatccttccggaactcaaagtgggatctttaacattaagttgcctggatccagcaagatcttcagcgtgtactgcgatcaagaaacttcactcggaggctggctcctgatacaacagcgcatggatggaagcctcaatttcaacaggacttggcaagactacaaacgcgggtttggaagcctgaacgacgaaggcgagggcgagttctggcttgggaatgattacctgcatctcctgacccagagaggttcggttctccgtgtggaacttgaggattgggcaggcaacgaggcgtacgctgaataccattttagggtgggtagcgaagcagagggttacgccctccaggtgtcatcctacgagggaactgcaggtgatgcgcttatcgaaggttcagtggaagaaggagccgagtacacctcgcataacaacatgcaattttcgacgtttgatagagatgcagatcaatgggaagaaaactgtgcagaagtgtacggcggaggatggtggtacaataactgccaagccgcaaatcttaatgggatttactacccaggtggatcctacgatcctcggaacaattcgccttacgaaatagaaaacggagtggtgtgggtgtcgttccgtggcgcagattactcactgagagcagtgcggatgaagattcgacctctggtgactcaa

SEQ ID NO: 11109 - DNA, 2598 bp, synthetic construct
  misc_feature 1..2598: note = source = /note="Description of Artificial Sequence: Synthetic coding sequence"
  source 1..2598: mol_type = other DNA
atgttctctatgcggattgtgtgccttgtgctttctgtggtcggcaccgcatggacggccgacagcggcgagggggactttctcgccgagggagggggcgtgcgcgggcctcgtgtggtcgaacgacaccagtctgcgtgtaaggactccgattggcctttctgctctgacgaagactggaactataagtgtccgagtggctgcaggatgaagggcctgattgatgaggtgaatcaggacttcacgaatcgcatcaataagcttaagaatagcttatttgaataccagaaaaacaacaaggattcccactcactgacaacgaatatcatggagatattgcggggcgacttttctagcgccaataaccgcgacaacacctacaaccgagtttccgaggatctgcggtctaggattgaggtcctcaaacggaaggtgattgagaaggtgcagcatatccagctgctccagaaaaatgtcagagcccagctggtagacatgaagagactagaagttgacattgatataaaaattaggagttgtcgaggatcttgctctcgagctctagcacgcgaagtggacctgaaggattatgaggaccagcagaagcagcttgaacaggtcatagctaaagacctccttccttcacgcgatagacaacatctgccccttattaagatgaaacctgttcccgatctcgtccctgggaattttaaaagccagcttcagaaggtaccgcctgagtggaaagcgttaacggacatgccacagatgcgcatggagctggagaggcctggcggcaacgagatcactaggggcggaagcaccagctacggcacaggatccgagactgagagtcctcgtaatccctcgtccgctggtagctggaactccggctcctccgggcccgggtctaccgggaacagaaatccaggctcatcaggaaccggcgggaccgccacatggaaacccggaagctctggccccggaagcaccggtagctggaatagcggtagttcaggtacagggagcactggaaatcagaacccgggaagcccacggccaggttctactggtacctggaatcccggctctagtgagcgggggtctgccgggcattggacttccgagtcctcagtgtctggctccaccggacagtggcatagcgagtccgggtcgttcagaccggactctccaggttcagggaatgctcgcccgaacaaccccgattgggggacgtttgaagaggtaagtggaaacgtatcccccgggacacgccgcgaatatcatacggagaagctggtgacttccaagggcgacaaggaattgaggactgggaaggagaaggtgaccagtggctcaaccacaaccaccagaaggagctgttcaaaaactgtgaccaagaccgtcatcgggcctgacgggcacaaggaagtgactaaagaagttgtgacttcagaagacggatccgattgtcctgaagcaatggacttgggcacactttccggaataggaacgctggacggatttaggcatcggcaccctgatgaggctgcatttttcgacacagcatccacaggaaaaacctttccagggtttttctcccccatgttgggagagtttgtttcagaaactgagagtcggggttcagagagtggaatttttaccaatactaaagaaagcagtagccaccacccgggaatagccgaatttccgtcaagaggaaaatctagctcgtactctaagcaattcacatcgagcacgtcatataatcggggagactccacattcgaaagcaagtcttataagatggcagatgaggccggcagcgaagcagaccatgagggaacgcacagcacgaaacgcggacacgctaaaagtagacccgtccgtgattgtgatgatgttctgcaaacacatccctccgggacccagtccggcatttttaacattaaactgcctgggagcagcaagattttctccgtttactgtgaccaggagacttccttaggaggctggctgcttattcagcaaagaatggacggaagcctgaactttaacagaacatggcaggactacaagcggggatttggaagcctgaacgacgagggcgagggggagttctggctgggcaacgattaccttcatctcctgacacagcgggggtctgtcctcagagttgagttggaagattgggccgggaacgaggcatatgcagaataccatttcagagtgggcagcgaagccgaaggctatgcactccaggtatcgtcctacgaaggaacagccggggacgccttgattgaggggagtgtggaggaaggggccgaatacaccagccacaataatatgcagttttcaactttcgatcgagatgcagatcagtgggaagagaattgcgcggaagtttatggaggcggctggtggtacaacaattgccaagccgccaatctgaatggcatttactatcctgggggttcctatgaccctagaaacaacagcccctacgagatcgagaatggggttgtttgggtatcctttcgcggagctgactattctctgcgtgcagtgcggatgaagattcgcccactggtcacacag

SEQ ID NO: 11110 - DNA, 2598 bp, synthetic construct
  misc_feature 1..2598: note = source = /note="Description of Artificial Sequence: Synthetic coding sequence"
  source 1..2598: mol_type = other DNA
atgttcagcatgagaatagtctgtctggtgctctcggtggtcggcactgcgtggacggccgattcgggtgagggagattttctggccgaaggcggaggagtgagaggtccacgcgtggtggagaggcatcaaagcgcatgtaaggactccgattggccattctgctcggatgaggattggaactacaagtgcccgtcggggtgtcgtatgaaggggctgattgatgaggtcaatcaagattttaccaaccgcataaacaagctgaagaattcactcttcgagtaccagaagaacaataaggacagccattcccttactaccaacattatggaaatcctgcgaggagatttttcctcggccaataatcgggacaatacctacaacagagtgtcagaagatctgcgatcaaggatagaagtcctgaagcgcaaggtgattgagaaggtgcagcatatccagctgcttcagaagaatgtgagagcccagctggtggacatgaagcggcttgaagtggatattgacattaagatcagaagctgtcgcggctcctgctcgagggcacttgcaagagaagtggaccttaaagattacgaggaccagcagaagcaattggagcaagtgatagcaaaggacctcctgccatcgcgcgatcgccaacatttgccactcatcaaaatgaagcctgtgccggatctggtgcctggtaacttcaaatcacaacttcaaaaggtgccccctgaatggaaggcgctgactgatatgccacaaatgaggatggagctggaacgcccagggggtaacgaaattaccagaggaggaagcacctcgtacgggactggaagtgagactgaatcccctcgcaacccttcatcagctggaagctggaactccggttcgtccggacctggatctactggcaacaggaacccaggctcgtctggtaccggtggaactgccacttggaaacctggatcgtcgggaccaggctcgaccggatcatggaattcagggtcgtccggaaccgggtctaccggtaaccagaaccctggctcgccccgccctggatcgaccggcacctggaacccaggttcaagcgaaagagggtccgcaggtcattggacctcggagagctcggtgagcggatcaacgggccagtggcacagcgaatccggctcgtttcggccggactcaccaggttcgggaaacgctagacctaacaaccctgattggggaacctttgaggaagtctccggtaatgtctcccccgggacccgtcgtgaataccatactgaaaaacttgtgacttccaaaggcgacaaagagctgcggaccggtaaggaaaaggtcacctccggaagcaccaccacgacccgtagatcctgttccaaaaccgtgaccaagaccgtcataggtccggacggtcacaaggaagtgactaaggaggtggtgacttcagaagatggatccgactgtcctgaagcaatggacttgggaactctttccggaattgggacccttgacggatttaggcatagacaccctgatgaagccgcctttttcgataccgcatccactggaaagaccttccccggtttcttctcacctatgctcggtgagtttgtgagcgaaaccgagagcagaggaagcgagtcgggaatcttcaccaatactaaggaaagctcctcccatcatcctggaattgctgagttcccatctcgcggtaagtcatcatcttacagcaagcagttcacctcgtctactagctacaacagaggagattcgacctttgagtctaagtcgtacaagatggccgatgaggcaggctccgaagcagatcatgaaggtactcattccactaaacgggggcacgcgaaatcgcgacctgtgagggattgtgatgatgtccttcaaactcaccctagcggaacccagtccggaattttcaacatcaaactgccgggtagctcgaagattttctcggtgtactgtgatcaagaaactagccttggagggtggcttcttatccagcaacgcatggacggatcactcaatttcaatcggacttggcaggactacaagaggggctttggatcgctgaacgatgaaggggagggggaattctggctgggtaacgattacctccatctgctgactcagagaggctcagtgcttagagtagaactcgaagattgggcaggaaatgaagcatacgctgagtaccattttcgggtcggatcagaagcagaaggatacgcccttcaagtctcctcgtacgaaggcacggcaggggatgcacttattgaaggatctgtcgaggagggagcagaatacacctcccacaacaacatgcaattctccacctttgaccgggacgccgatcaatgggaagaaaactgtgcagaagtgtacggaggcggatggtggtacaacaactgccaagccgcaaaccttaatggcatctactatcctggtggtagctacgaccctagaaacaactcaccctacgagattgaaaatggtgtcgtgtgggtgtcgtttcggggagcagattactctcttcgagcagtgagaatgaagattaggcctctcgtgactcaa

SEQ ID NO: 11111 - DNA, 2598 bp, synthetic construct
  misc_feature 1..2598: note = source = /note="Description of Artificial Sequence: Synthetic coding sequence"
  source 1..2598: mol_type = other DNA
atgtttagtatgcgtatcgtttgccttgttctgagcgtggtaggcacggcctggacagccgattccggcgaaggagattttctcgcagaggggggaggggttcgcggtccacgggtagtggaaagacaccagagcgcctgtaaggattccgattggccgttttgcagcgatgaggactggaattataagtgtccatcagggtgtaggatgaaggggttgatcgacgaggtcaaccaggactttaccaacagaatcaacaagctgaagaactctttgttcgaataccagaagaacaataaggattcccacagtctaaccaccaacatcatggagattttacggggcgacttttctagtgctaataatcgggataacacttataatcgcgtgtccgaggacctccgcagccggattgaagtcctcaagcggaaagtaatcgaaaaagtccagcatattcagctgctccaaaagaacgtgcgagctcagctcgtggatatgaagagactggaggtagatattgatataaagatccgtagctgtcggggatcatgttccagggcgctcgcgagagaggtagacctgaaagattacgaagatcagcagaagcagcttgagcaggtgatagcaaaagacctgctgccgagccgcgaccggcagcacctcccactgatcaaaatgaagccggtgcccgatcttgtccctgggaattttaagagccagttgcagaaggtgcccccggaatggaaggctctgactgacatgcctcagatgaggatggaattagagaggccgggaggaaatgagattacacgcggtggctccacctcttatgggaccggctctgagaccgagtccccccgcaacccatccagtgccggctcctggaattctggctcttcggggcctggaagtaccgggaatcgaaaccctggcagcagtgggaccggaggcactgcaacctggaagcccggaagctcaggccccgggtctactggatcgtggaacagcggctccagtgggaccggctcaaccggaaatcagaaccctgggagtcctaggccagggagcacaggcacatggaatcctgggtcatctgaacgggggtctgccggacattggacatcagagagttccgtgtcggggagtacagggcagtggcacagcgagagcgggagcttccggccagactcgcctggctccgggaacgcccgacctaacaaccctgactggggaactttcgaggaagtgtcaggaaacgtgtcacccggcacgcggcgggagtaccacactgagaaactggtaacttccaaaggcgacaaggagctcagaactggcaaggagaaagtcacaagcggtagcaccactacaactaggcgcagctgctccaagacagtgaccaagacagtgataggcccagatggccataaagaggtgaccaaagaggtggtgaccagcgaggatgggtctgactgtcccgaggcaatggacctgggcaccctgagtgggattggcaccttggacggattccgacatcggcaccccgatgaggcggccttctttgataccgctagcaccgggaagacattccctgggttttttagccccatgcttggcgaatttgtcagcgaaactgagtcccgcgggagcgaatccggcatctttaccaataccaaggaaagctcctctcaccaccccggaatagctgagttcccttcacggggcaagagctcaagttactcaaaacagtttacaagtagcaccagctacaacagaggtgacagcacatttgaaagcaagtcatacaagatggcagatgaagctggatccgaggcggaccacgaagggacccacagtacaaaaagagggcacgccaaatctcggcctgtacgcgactgtgatgatgtcctccaaacgcacccttccgggactcagagcggaatcttcaacatcaaattgcctgggtccagcaagattttctctgtgtactgcgaccaggagaccagcttagggggatggctgctcatccagcaaaggatggacggatcgctgaactttaataggacttggcaggattacaaacgaggatttggcagcctaaatgatgagggagagggcgaattctggttaggcaatgactacttgcatctgttgacccagagaggatctgtgctccgagtggaattagaagactgggccggaaacgaggcatatgcagagtaccatttccgggtgggaagtgaggcagaaggttatgcactacaggtcagctcttatgaagggacggccggggacgcgctgattgagggctcggtagaggaaggggccgagtatacctcccataataacatgcaattttccacattcgacagagatgcagatcagtgggaggagaattgcgcagaggtgtacggggggggctggtggtataataattgtcaggctgcgaacctgaatggcatctattaccctggcgggtcctacgaccctagaaataattctccgtatgaaatcgagaatggggtcgtttgggtgagttttcgaggtgccgattattctcttagagcagtccgcatgaaaatcagaccactagttactcag

SEQ ID NO: 11112 - DNA, 2598 bp, synthetic construct
  misc_feature 1..2598: note = source = /note="Description of Artificial Sequence: Synthetic coding sequence"
  source 1..2598: mol_type = other DNA
atgttctcaatgcgcatcgtgtgcctcgtgctcagcgtggtgggcaccgcgtggaccgctgactccggagaaggggacttcctggccgaaggtggcggggtccggggccctcgagtcgtggagagacatcagtccgcctgtaaggattccgattggccgttctgctcggacgaggactggaactacaagtgcccctcggggtgtaggatgaagggactgattgacgaggtgaaccaggacttcaccaacagaatcaacaaattgaaaaacagcctgtttgagtatcagaagaacaataaggatagccattcgctgactaccaacattatggagattcttcggggggacttctcaagcgccaataatcgcgataacacctacaatcgcgtgtccgaagatctgagaagccggatcgaagtgttgaagaggaaagtgatcgaaaaagttcagcatattcaactgctccagaagaatgtgagagcacagctggtggacatgaagcgactggaggtggatatcgacatcaagataagaagctgccgtggttcctgttctcgcgcactggcccgggaggtggatctgaaggactacgaagatcaacagaagcagcttgaacaggtgatcgctaaggatctgctgccgagccgcgaccggcagcacctccctttgatcaagatgaaaccggtgcctgatctggtcccaggaaactttaagtctcagttgcagaaggtgccgccggagtggaaggctctgacggatatgccccaaatgcggatggaactggaacggccgggcggcaacgagatcacccgcggaggatcaacttcctacggcactggcagcgagactgaatcaccgcggaatccgtcatccgccggttcctggaactcggggtcgtccggaccgggttccaccggaaataggaatccaggatcgagcggtaccggaggaacggcgacgtggaagcctggatcctcaggccctggctcgaccgggagttggaactcgggaagctcaggaacgggatccactggaaatcagaaccccggcagcccgcggcccgggtcgactggtacctggaaccccgggtcctcggaacggggaagcgccggacactggacctcggaaagcagcgtgagcggaagcactggtcaatggcactcggagagcggttcctttaggccggactctccgggcagcggcaacgcccgccctaacaaccccgactggggcactttcgaagaggtcagcggcaatgtgtccccgggaactcgacgggaataccacacggaaaaactggtcacctccaagggtgataaagagttgcggacgggaaaggagaaggttacttcggggtcaacgaccactactcggcgctcatgctccaagaccgtgaccaagactgtcattggtcctgatggacacaaggaggtgaccaaggaagtggtgaccagcgaggacggcagcgactgccctgaagccatggacctgggaacccttagcggcatcggtacgttggatggattccgccatagacacccggatgaggctgcgttcttcgatactgcctctacgggaaaaaccttcccaggttttttctctccaatgcttggggaatttgtgagcgaaaccgaaagcaggggatccgaatcaggtattttcactaacactaaggaatcttcctcccaccacccggggattgccgagttcccatcccgaggaaagtcatcgtcatactcgaagcagttcacgtcgtccacctcctataacagaggggattcgaccttcgaatccaagtcctacaaaatggcggacgaagcggggtcggaagcagaccatgaaggtacccacagcactaaacggggacacgccaagagcaggccagtccgcgattgcgacgacgtgctccagactcacccgtccgggactcaatccggaatctttaacatcaagttgccgggctcctccaaaatcttctccgtctactgcgaccaagaaacttccctgggagggtggctccttatccaacagaggatggacggttccctgaatttcaatcggacttggcaggactataaacggggattcggatcgctcaacgacgagggggagggagaattctggctgggaaacgactacctgcatctgctcacccaacggggatcggttctgagagtcgaactggaggattgggctggaaacgaggcctacgccgagtaccactttcgcgtaggatccgaagcagagggatacgcactgcaagtctcatcgtacgagggtactgctggagacgcgttgatcgaaggttccgtggaagagggagcggaatacacctcccataacaacatgcaattctcgacttttgacagggacgctgaccagtgggaagagaactgtgcagaagtgtacggtggaggctggtggtacaacaattgtcaagctgcaaacctgaacgggatctactatcctggaggaagctacgacccgcggaacaacagcccttacgaaatcgagaacggagtcgtctgggtcagcttccggggtgctgactacagcttgagagctgtcaggatgaagatcagaccactggtgacccag

SEQ ID NO: 11113 - DNA, 2598 bp, synthetic construct
  misc_feature 1..2598: note = source = /note="Description of Artificial Sequence: Synthetic coding sequence"
  source 1..2598: mol_type = other DNA
atgtttagcatgcggatagtgtgccttgtgcttagcgtggtgggaaccgcgtggaccgctgattcgggagaaggagatttcctcgcagaaggaggaggtgtgaggggtcctcgcgtggtcgaacgacatcagtctgcctgcaaagatagcgattggcccttttgcagcgacgaggactggaattacaagtgccctagcggatgtagaatgaagggtctgattgatgaggtaaaccaggactttactaacaggatcaataagctcaagaactcgctttttgaataccagaagaacaataaagattcccacagcttgaccaccaacattatggagattctgagaggcgatttttcatcagcaaacaacagagacaatacttacaaccgggtgtcggaagatctgcgcagccgtattgaggtcctcaagcgcaaggtcattgagaaggtgcaacatatccaactcctgcagaagaacgtgcgcgcacagctcgtggatatgaaacgtttggaggtggatattgatatcaagatccgctcgtgtcgagggtcatgttcacgcgcacttgcaagggaagtggatttgaaggactacgaggaccagcaaaagcaactcgagcaggttatcgcaaaggatttgctgccgagcagggacagacagcacctgcccttgataaagatgaaacctgtacctgatcttgtgcccggaaatttcaagagtcagttgcagaaggtgcctccagaatggaaggcactgactgatatgcctcaaatgaggatggaactcgaaagacctgggggaaacgaaattactcgaggcggaagcacgtcctatggtactgggagcgagactgaatctcctcgcaatccatcgtcagctggatcttggaatagcggttcatccggcccaggatcgactggaaaccgcaaccctggttcctctgggactggggggactgcaacctggaagcctggttcgtcaggccctggatcgacgggatcgtggaacagcgggtcgagcggcacgggatccaccggaaaccaaaatccaggatcccctagaccaggatcaactggcacgtggaatcccgggtcctcggagcgtggctcagcagggcattggaccagcgaatcctccgtgtcgggatcaaccggacaatggcatagcgaatcggggtccttccgcccagactcccccgggtcgggtaatgcccgcccgaataatcctgattggggtacttttgaagaggtcagcggaaacgtgtcccctggcacgaggcgggagtaccatactgagaagctcgtcacttctaagggggataaagagctccggactggaaaggaaaaggtcacctcaggttccactaccactactcggcgctcgtgttcaaaaacggtgactaaaactgtgatcggacctgatggtcataaagaagtgaccaaggaagtggtcacctccgaggatggctccgattgtcccgaagccatggatctggggaccctcagcgggattggaaccctggacggtttcagacacagacaccccgatgaggccgctttcttcgacaccgcatcaaccggaaagaccttcccaggttttttctccccaatgctgggtgaattcgtgtccgagactgagtcaaggggtagcgagtcaggtattttcaccaacacgaaggaatcttcctctcaccatccaggaatcgcagagtttccatcgagggggaaatcgtcatcgtacagcaagcaattcacttcaagcacctcgtacaaccgcggggattccacttttgaatcaaaatcctacaagatggccgatgaagcaggatcggaagcagaccatgaaggaacccattcaacgaaacgcggacacgccaaaagtagacctgtccgggactgtgatgatgtgctgcaaacccacccatcaggaacccagtcgggcattttcaacatcaaacttccgggatcctccaaaatcttctccgtgtactgtgaccaggaaacttcgcttgggggatggttgctgatccagcagagaatggatggaagcctgaactttaatcggacctggcaggattacaagagagggtttggaagcctcaacgacgaaggtgaaggagagttttggctcggcaacgactaccttcatctgttgacccagcgaggtagcgtcctgagggtggaactcgaggattgggcaggaaatgaagcctatgccgaataccattttcgggtcggctcagaggcggaaggttacgcattgcaagtttcctcgtacgaaggaactgctggggacgcgcttatcgagggttcagtggaagagggagcagaatacaccagccacaataacatgcaattcagtaccttcgacagagacgcggatcaatgggaagaaaactgcgccgaagtgtacggaggaggttggtggtacaacaattgtcaagcagcaaacctgaatggaatttactatcccgggggctcgtacgatccgcggaacaattccccatacgaaatcgaaaatggagtcgtctgggtgtcatttcgcggcgcagactacagcctcagagcggtccgcatgaagattagacctctggtgacccag

SEQ ID NO: 11114 - DNA, 2598 bp, synthetic construct
  misc_feature 1..2598: note = source = /note="Description of Artificial Sequence: Synthetic coding sequence"
  source 1..2598: mol_type = other DNA
atgttttctatgcggatcgtgtgcctggtcctgtcagtggttggaaccgcttggacagccgacagtggcgagggggattttctagccgaggggggcggcgtcagagggccacgggtggttgagaggcaccaatccgcctgcaaggatagcgattggccgttttgctctgacgaggattggaattacaagtgtccctccggatgtaggatgaaaggccttatcgatgaggtgaaccaagattttacaaacaggattaataaactcaagaatagcctcttcgagtaccaaaaaaataataaagactcacactctctaacaacaaatataatggagatcctccggggggatttttcaagcgccaacaaccgcgacaatacctataaccgtgtgtccgaagacctgagaagccggatcgaagtgctgaagaggaaggtcatagagaaggtgcaacacattcagctgctacagaagaatgtcagagcccagctggtcgatatgaaaaggctggaagtggatatagacatcaagattaggagttgtagggggtcttgtagtcgggcccttgcccgggaagtggatctaaaagactacgaggaccagcagaagcaacttgaacaggtgattgctaaggatctcttgccctcacgcgacagacaacacctgccgctgatcaaaatgaaacctgtgcctgatttggtgcccgggaactttaagtcacagctacagaaggttccccctgagtggaaggcccttaccgatatgccccagatgaggatggagctagaaagacctggagggaacgagattacccggggggggagtacctcttatggtacaggctcagagaccgaatctcctagaaatccttcgtctgctggctcctggaactccggttcttctggccccggtagcaccggcaatagaaatccaggcagctctgggacaggaggaaccgcaacgtggaagcccggatcctctggccccggcagtaccggatcctggaacagtggaagtagtggcacaggatccacaggaaaccagaacccaggctctccccgccccggctcaactggaacatggaatcccggtagtagcgagcgagggtccgctggtcactggacctccgaatcaagcgtctccggaagcacgggccaatggcactccgaatctgggtccttcaggccagactcccctggaagtggcaatgcccgcccaaacaacccggactgggggacgtttgaagaggtaagtggaaacgtgagtccaggaacacgacgagagtaccataccgaaaagctggtgaccagcaaaggtgataaagaactgcggaccggcaaagagaaggtgaccagcggcagcacgacaacaacccgaaggtcctgtagcaagaccgttactaagaccgtcatcggccccgatgggcataaggaggttaccaaggaggtggttacttccgaggacggatccgactgtccggaagccatggatctcggtaccctgtcgggaatcggcacactagacggttttagacatagacaccccgacgaggccgcattcttcgataccgcatccactggcaagacctttcctggatttttctctccaatgttgggagaattcgtgtcagaaacagagtccaggggtagcgagagcggcatctttaccaacactaaggagagctcatcacaccatcctggcatagccgagttcccatcacggggcaagagcagcagctatagtaagcagtttacctcgtcgactagttacaaccggggggatagcaccttcgagagcaagtcatataaaatggcagatgaggcgggcagcgaggcggatcacgaagggacccactcaaccaagagggggcacgccaaatctcggcctgtgagagactgcgacgacgtactgcagactcacccctcaggcactcagtcagggatttttaatattaagctgccagggtcttccaaaattttctcagtttactgtgaccaggagacatccttaggtgggtggctgctgatccagcagcggatggacggtagcctgaattttaatcggacatggcaggactacaaacgcggctttggcagccttaacgatgaaggagagggcgaattctggttaggaaacgactacctgcacctgctcacgcagcgcggaagtgtcctgagggtggagcttgaggattgggcggggaatgaggcatacgctgaataccatttccgtgtagggagtgaggcggagggatacgcacttcaggtgtctagctacgaaggtaccgcaggagacgccctcattgaaggatcagtggaagaaggcgcagaatacacttcccataataatatgcagtttagtactttcgacagagatgcggaccagtgggaggaaaactgtgcagaggtgtacgggggcggttggtggtataacaattgccaggcggcaaacctgaacggtatctactatcctggagggtcttacgacccccgtaacaacagtccgtacgagattgagaatggtgtagtgtgggtgtcgttcaggggcgctgactatagcctgagagccgtgcgaatgaaaattcggccactggtgacgcag

SEQ ID NO: 11115 - DNA, 2598 bp, synthetic construct
  misc_feature 1..2598: note = source = /note="Description of Artificial Sequence: Synthetic coding sequence"
  source 1..2598: mol_type = other DNA
atgttctcgatgcggatcgtgtgccttgtgctctcagtggtgggcactgcctggaccgcggactccggcgaaggagactttctggccgaaggaggtggcgtgagaggcccgcgcgtcgtcgaacgccaccagtcagcatgcaaggattccgactggccgttctgctccgacgaggattggaattacaagtgcccgagcgggtgcaggatgaaagggctgattgatgaagtgaatcaagattttaccaatcggattaacaaattgaagaactcgctgttcgagtaccagaagaacaacaaggacagccactcactcaccactaacattatggagatcctgcggggagatttctcatccgcgaataacagggacaacacttacaacagagtcagcgaggacctgcggtcaagaatcgaagtgctgaagcgcaaggtgatcgagaaggtgcagcatatccagctgcttcaaaagaacgttagggctcagctcgtggacatgaaaagacttgaagtggacatcgatatcaagatcaggtcgtgccgggggtcgtgcagcagggctctggcccgggaagtcgacctcaaggattatgaggaccagcaaaagcaacttgaacaagtgatcgcgaaagatttgctcccgtccagagatcggcagcacctgcctctgatcaagatgaagcctgtgccagacctggtgcccggcaatttcaagtcgcaactgcagaaagtgccgccagagtggaaggctctgaccgacatgccacagatgaggatggagctggaacggcctggagggaatgaaatcactcgcggaggctcgacttcgtacggcactggctccgaaaccgaatcaccacgtaaccctagcagcgccggttcctggaacagtggctcatcgggcccgggatcaactggcaatagaaacccagggtcgtcaggaaccggaggaactgccacctggaaacccggctcgtcaggacccggatctacggggtcatggaactcgggaagctccgggaccggatcgacgggtaaccagaaccctggatcaccgcgtccgggaagcactgggacttggaatccgggatcgtccgaacggggatcagccggacactggacgtcggaaagctcggtttctggatccaccggtcagtggcattcggaatcgggctccttccgcccggattcccccggaagcggaaatgctcggccaaacaacccggattgggggaccttcgaagaagtgtcgggtaacgtgtcccccggaacccgcagagagtaccacaccgaaaagctggtcacgagcaagggagataaggaactccggaccgggaaggaaaaggtcacttccggctcaactaccactactcgccgctcgtgttcgaaaaccgttaccaagactgtgatcggaccggacggacacaaggaagtcaccaaggaagtagtgaccagcgaggacggttccgattgtccggaagccatggatttgggaacgctctcaggaatcggaacgcttgacggattccggcacaggcaccctgatgaggccgccttctttgataccgcctcaactggaaaaaccttcccaggattcttctcgccgatgctgggagaattcgtctccgagactgaatcccggggctcggagagcggaatctttactaacactaaggagtcgtcgtcacaccatccaggcatcgcagagttcccgtcccggggaaaatcctcctcatactcgaagcagtttacctcgagcacctcatacaatcgcggagactcgactttcgaaagcaaaagctacaagatggctgacgaagccggctcggaagccgaccatgaggggacccatagcacgaaacgcggacacgctaagtcgaggccggtccgggactgcgatgacgtcttgcagacccacccctcaggaactcagtcgggtattttcaacatcaagctgccgggatcgtcgaagattttcagcgtctactgcgatcaagaaacctccctgggaggatggcttcttatccagcagcggatggacggctcgttgaatttcaaccgcacctggcaggactacaagcggggtttcgggtcgttgaacgatgaaggcgagggtgagttctggcttggcaacgactacttgcacttgcttacccagcggggttcggtgttgagagtggagctggaggactgggctggaaacgaggcatacgccgaataccactttagggtgggatcggaggccgaaggttacgccttgcaagtctcctcctacgagggaacggctggagacgcgctgatcgaagggtcggttgaggaaggagcagagtacacctcccacaacaacatgcagttctcaaccttcgatagggatgcagaccaatgggaagaaaattgcgctgaggtgtacggaggcggctggtggtacaacaactgccaagcggcaaatctgaacggtatctactatccaggtggatcctacgacccgagaaacaattccccgtacgagatcgagaatggagtcgtgtgggtcagtttccggggcgcagactactcactgcgcgccgtgcggatgaagatcagaccactggtgactcag

SEQ ID NO: 11116 - DNA, 2598 bp, synthetic construct
  misc_feature 1..2598: note = source = /note="Description of Artificial Sequence: Synthetic coding sequence"
  source 1..2598: mol_type = other DNA
atgttctctatgcgcatcgtatgtctggtgctgtcagtggttggaactgcctggacagctgactcaggcgaaggtgacttcctggcagagggaggtggagttaggggacctagggtggtcgagcgccatcagagtgcctgtaaagactccgactggcctttttgctctgacgaggactggaactacaaatgcccctccggttgccgcatgaagggcctgatcgatgaagtgaaccaagactttaccaacaggattaataagctcaagaatagcttgtttgaataccagaagaacaacaaagattcacattctctgactacgaacatcatggaaatcctgcgcggcgacttctcatccgccaataatagagacaacacttataacagggtgtccgaggacctgcgcagtagaatcgaggtgttgaagaggaaggtcatagagaaggtacagcatatccagctccttcagaagaatgtcagagctcaactggtcgacatgaagagactggaagttgacattgacatcaaaattcgctcatgtagaggaagttgctcaagagcgctggcaagagaggtagaccttaaggattatgaagaccagcagaagcaactggagcaggtgattgctaaggacttgctccccagccgcgatagacagcacttgcctctgataaagatgaagcctgtcccggatctcgtgcctggcaactttaagtcccaactccagaaggttccacctgagtggaaagccctgaccgacatgccccagatgagaatggaactggaaagaccaggaggaaacgagataacacgcggaggtagcacatcatacggaaccggctccgaaaccgagtctcctagaaacccttctagtgcaggcagctggaacagcggtagtagcggaccaggctccaccggaaatagaaaccccggctcctctggtaccggaggtacggccacgtggaagccaggttcttctggacccggatccactggttcctggaactccggttcttccggtaccggatctacgggcaaccagaacccaggttcaccaaggcctggttcaaccggaacatggaaccctggctcttctgaacgcggttccgcgggtcattggacttcagagtcttccgtatccggatctaccggccaatggcacagcgagagcggttccttccgcccagactcaccaggatccggaaacgctagacccaacaatcctgattggggcactttcgaggaggtatcaggcaacgtgtccccaggcacacgcagggaataccataccgagaagctggttacatcaaagggagacaaggaactgagaacgggaaaggaaaaagtgacatcaggttcaactacgacaactaggcgcagctgctccaagaccgtgactaagacagtcatcggccccgatggtcacaaggaagtgaccaaagaggtggttacctctgaggacggcagcgattgccctgaggccatggatctgggaaccttgtctggcataggcaccctcgacggctttaggcacaggcaccccgacgaggccgccttttttgataccgcgagcactggcaagaccttcccaggctttttttctcctatgctcggtgagttcgtcagtgagacagagtcccgcggtagcgaaagcggaatctttactaacactaaggaatcatcttcccatcaccccggtatcgcggagtttccttcccgcggtaagagctccagctacagcaagcagttcacatcatctacttcttacaacagaggtgatagtactttcgagtcaaagtcctacaagatggccgacgaagcgggttcagaggccgatcacgagggaacacattccacaaagaggggtcacgctaaaagcagaccagtgcgcgattgcgatgacgtgttgcagacccacccaagtggaacgcaatccggcatcttcaacatcaaacttcctggctcttctaagatattttctgtgtactgtgatcaggaaacttctcttggtggctggctgctgatacagcagaggatggatggttcactgaacttcaaccgcacctggcaagactataaaagaggctttggttccttgaacgatgaaggcgagggtgaattttggttgggtaacgactacttgcacctgctgacacagaggggctccgtcctgagggtggagctggaagactgggccggtaacgaggcttatgccgaataccacttcagggtcggatccgaagctgaaggttacgcactccaggtttcatcctacgagggaacggctggcgacgcattgattgagggatcagtcgaagagggagccgaatacacgtctcataacaacatgcagttctccacctttgatagagacgcggaccagtgggaggaaaattgcgcagaagtgtatggcggcggatggtggtataacaactgccaagctgctaacctgaatggcatttactaccccggaggtagttacgacccaagaaataactccccctacgaaatcgaaaacggtgttgtctgggtgagcttccgcggagctgactatagtctgcgcgctgttaggatgaagattcgccccctggtcactcag

SEQ ID NO: 11117 - DNA, 2598 bp, synthetic construct
  misc_feature 1..2598: note = source = /note="Description of Artificial Sequence: Synthetic coding sequence"
  source 1..2598: mol_type = other DNA
atgttcagcatgaggatcgtgtgcctagtattgtctgtagtgggcactgcatggacagcggactctggagagggcgacttcctcgcggaaggaggcggggttagaggaccccgggtggtagaaaggcatcagtccgcctgtaaggacagcgattggccgttttgcagtgacgaagactggaactacaagtgtccatccggttgtaggatgaaaggcctgattgatgaagtcaatcaggactttaccaaccggattaacaagctcaaaaactccctatttgagtaccagaagaataacaaagactctcacagcctgaccactaatattatggagattttacgcggcgacttcagtagcgccaataatcgtgacaatacttacaatagagtgagtgaggaccttaggtcccggatcgaagtgttaaagcgcaaagtgatcgaaaaggtccagcacattcagcttcttcagaagaatgtgagggcccagcttgtagatatgaaacggctcgaagtggacatcgacataaaaatccgatcctgtcgcggctcatgtagtcgggccctcgccagagaggtggatctgaaagattacgaggaccagcaaaaacagctggagcaggtgatcgctaaggacctcctgccttcgcgcgacaggcaacatctgcctttgatcaagatgaaacccgtgcccgatctcgtgccaggcaactttaaaagccagttgcagaaggtaccacctgaatggaaagccctgaccgatatgccacaaatgcgcatggaactggaaaggccagggggaaatgagatcacaagaggtggatcaacctcgtatgggaccggctcagagaccgaaagtcctcgcaatccgagtagcgccgggtcatggaattcaggatcatctggccctggcagcacagggaatcgaaacccggggtcatcaggcactggtggcaccgccacttggaaaccgggcagttcaggccctggctctaccggttcatggaatagcgggtcttcaggaactgggtctaccgggaaccagaacccaggttccccccgaccagggagcactggcacctggaaccccggcagtagtgagcgcggctctgcaggacactggacctctgagtcgtccgtctccggctctaccgggcaatggcactctgagtcggggtccttcaggcccgacagccccggcagcggcaatgctcgtcccaataacccagactgggggacgttcgaagaagtctccggtaatgtgtccccagggacccggcgcgagtaccatacagagaagcttgtgacctctaaaggtgataaggaattgagaaccgggaaggagaaggtgacatctggctccacaacaacaacgcgccgctcatgtagtaaaaccgtcacaaaaacagtgatagggcccgacggccataaggaagtgaccaaggaagtggtaacctctgaagatggatccgactgtccagaggccatggacttggggacactgtctggcatcggcactctggatggcttcagacatcggcaccctgacgaggccgctttcttcgacaccgcgtcaaccgggaagactttcccaggtttcttttctccaatgctcggtgagttcgtcagtgagacagaatctcgggggagtgagtccgggattttcacaaacaccaaggagtcttcttctcaccaccccggtattgcagagtttccctctcgcggaaagagctctagctactccaagcagttcacttcgtccacctcatataacagaggagattccaccttcgagagcaaaagctataagatggcagacgaggctggctcggaggccgatcatgaagggacacattccaccaagcgcggacacgccaagtccagaccagtccgtgattgcgatgacgtgctgcagactcacccttccggtacccagtcaggcatttttaacatcaagctgccggggtctagtaaaatcttcagtgtgtactgcgatcaggagaccagtcttggaggatggcttctgatccagcagagaatggatggcagtctgaatttcaaccgcacatggcaggactataaacgagggtttggatcactgaatgacgagggcgagggagaattttggctgggtaacgattacctccatctgctcacacagcgtggttctgtcctccgcgtggagctggaggactgggccggcaacgaggcatacgcggagtaccatttcagggtcggttccgaggccgagggctacgccctgcaggtgagtagttacgagggaactgcaggagatgctctgatcgaaggttccgtagaggagggggctgaatacacctcccataacaatatgcagttcagcaccttcgatcgggacgccgaccagtgggaggaaaattgcgccgaggtgtatgggggcggctggtggtacaacaactgccaggcagcaaacctcaatggaatttattatcccggaggcagctacgatccccgcaacaactctccatatgaaatcgagaatggagtggtgtgggtttccttccgcggcgctgattacagcctgcgggccgtgcgaatgaaaatcagaccactggtcacacag

SEQ ID NO: 11118 - DNA, 2598 bp, synthetic construct
  misc_feature 1..2598: note = source = /note="Description of Artificial Sequence: Synthetic coding sequence"
  source 1..2598: mol_type = other DNA
atgttcagcatgagaatcgtatgcttggttctctcagtagttgggacagcatggaccgccgattccggtgaaggcgactttcttgcggaagggggcggggtgaggggccctcgcgtggtggagagacatcagagtgcctgcaaagatagcgactggcctttctgctctgatgaggattggaactataagtgcccaagtggctgcagaatgaagggtctgatcgacgaggttaatcaggatttcacaaatagaattaataaactgaagaatagcctgttcgagtaccagaaaaacaataaagactcccacagtttgactactaacattatggagatcctgcgcggcgacttttcctcggccaacaacagagacaatacctacaatagggtttcagaagacctgcgctcgcggatcgaagtgttaaagcgcaaagtaattgaaaaggttcagcacatccagctgctgcagaaaaacgtcagggcccagttggtggatatgaaaaggctggaagtggatatcgacattaagattcgctcttgccgggggtcttgttctcgcgcattggcgagggaagtggatctaaaggattacgaagatcagcaaaaacaactagagcaggtaatcgcgaaagacctcttgccttcacgggaccgacagcacctccccttgattaagatgaagccagtgcctgacctcgttcccggcaacttcaaatcacagttgcagaaggttccacctgaatggaaggctctcactgacatgccccaaatgcgaatggaactcgagcgccccggaggcaatgaaattactaggggagggtcgaccagttacggaactggtagtgaaaccgaatctccacgcaacccatcaagtgccgggagctggaacagcgggtcttctggccctggatccacaggtaaccgcaatcctggtagtagcggcaccgggggcaccgctacctggaagcccgggagctcaggacccggctcaactggatcgtggaatagcggatcctcaggaaccggctcaaccggtaaccaaaatcctggaagcccacgtccagggagtacagggacatggaatccgggatccagtgaacgggggagcgctggtcactggacaagcgagtcaagcgtgtcaggctctaccggccaatggcatagtgagtcagggagcttcaggcccgattctcctggcagcggcaacgcccgccctaataacccagattggggtaccttcgaagaagttagcggaaatgtcagccctggcacccgacgagagtatcatactgagaaactggtcacgagcaagggcgataaggagcttagaactgggaaggagaaagtaactagcggttcgacgactacaacccgccgcagttgtagcaaaactgtcacgaaaacggtgattggtccagatggacacaaagaggtcaccaaggaagtggtcacaagcgaggatggttcggattgccccgaggcaatggaccttggaactttgtccggaataggaaccctcgatggatttcggcacagacatcccgatgaggccgctttttttgataccgcttcgaccgggaagacatttcctggattcttctctccgatgttaggcgagttcgtcagcgagaccgaatcacgcggttcagagagcggcatttttaccaacacgaaggagtctagcagtcaccaccccggaatagcagagtttccctctcgcggcaagagctcgtcctattccaagcagtttacttcctcaacgtcctataaccgcggcgacagcaccttcgaaagcaagtcctataagatggctgacgaagccggatccgaggcagaccatgaggggactcattccaccaaaagagggcatgccaagtcccggcccgtccgagattgcgatgatgtgctgcagacccatcctagcgggacccagtcaggaatattcaatattaaactacccggatcctctaagatcttcagcgtttattgcgatcaggagaccagtctcggcggttggctcttgatccagcagcgaatggatggctcactgaattttaacaggacgtggcaggattacaaaaggggattcgggagcttgaacgacgaaggtgagggcgaattttggctcggaaacgactatctgcatctacttacccagagaggaagcgtgttgcgggtcgagctcgaagactgggccggtaatgaggcttatgcggagtaccacttccgcgtgggttcagaggcagagggctatgcgctgcaggtaagctcatacgaaggcacagccggggacgccctgatcgaaggctccgtcgaggaaggcgccgagtacaccagccataacaatatgcagttcagcacattcgaccgagatgccgatcaatgggaggagaactgtgctgaagtatatggaggcggctggtggtataacaattgtcaggccgctaatctcaacggcatctactacccaggcggctcgtatgatcctcgcaataattcaccatacgagatagaaaatggggtagtttgggtcagctttcggggcgctgattactcgctacgggcagtgcgaatgaagatacgtcctttggtaacccaa

SEQ ID NO: 11119 - DNA, 2598 bp, synthetic construct
  misc_feature 1..2598: note = source = /note="Description of Artificial Sequence: Synthetic coding sequence"
  source 1..2598: mol_type = other DNA
atgttttcgatgcgcattgtgtgtcttgtcttgtccgtggtgggcaccgcctggactgctgactccggagaaggcgactttcttgccgaaggtgggggcgtcagaggtccacgagtggtcgagagacaccagagcgcgtgtaaagattccgactggccattttgttccgacgaagattggaactacaagtgtccatccggatgtcgtatgaaaggactgattgacgaagtgaaccaagactttactaaccgcattaacaaacttaagaactcactttttgaataccaaaagaacaacaaagattcccattcgcttactaccaacataatggaaatcctgagaggcgatttctcctccgcaaataaccgtgacaatacgtacaatcgagtgtccgaagatctgaggtcgcgcatagaagtgctcaagcggaaagtcattgagaaagtccaacatatccaactgctccaaaagaacgtcagggcccaattggtggatatgaagcgccttgaggtggatattgatatcaagatccgttcatgtcgaggctcatgttcgagagcactcgcgagagaagtggatctgaaagattacgaggaccagcaaaagcagctcgaacaagtgatagcaaaggacctgctcccatcccgtgaccggcaacatcttcctctgattaagatgaagccagtgcccgatctggttccaggtaatttcaagtcccagcttcagaaggtgcccccagaatggaaagcactgaccgatatgccgcagatgcgcatggaacttgagaggcctgggggaaacgagattacgcgaggaggaagcacctcatacggaaccgggtccgaaactgaaagccctcgaaacccaagctccgcaggttcgtggaattcagggtcgtctggaccaggaagcacgggcaaccggaatccaggctcgtcgggcaccggtggcaccgccacttggaagccgggttcgtcaggtcctggaagcactgggagctggaattcgggttcttccggcactggtagcaccggaaaccaaaaccccggatcaccacgacctggatccaccggaacctggaacccagggtcatctgagcggggttcagcgggtcattggaccagcgaatcatccgtgtcggggtccaccggtcagtggcacagcgagtccgggtcgtttcgtcccgattcccctgggtcaggaaatgctcggcctaataaccctgattggggaacctttgaagaagtatccggaaacgtgtcacctggaactcggagagagtaccataccgagaaacttgtcacctcgaaaggggataaagaattgcgtaccggaaaagaaaaggtgacctcgggctcgactaccactactcgacggagctgttccaagacggtgaccaagacggtcatcgggcctgacggacataaggaagtcaccaaggaagtggtgacttcagaggacgggtccgattgtcctgaagccatggacctgggcactttgtccggtataggcaccttggatggttttagacacaggcaccctgatgaagccgcattctttgataccgcctcgaccggaaagaccttccccggttttttctcaccaatgctcggagaatttgtgtcggaaaccgagtcaagaggaagcgaatcaggaattttcactaacacgaaggagtcgtcctcccatcaccctggcatcgccgaatttccgtcgaggggtaaatcgtcgtcatactccaagcagttcacttcatctacttcgtacaaccggggtgactcgacgtttgagagcaagtcctacaaaatggcagatgaggcggggtccgaggcggatcatgaaggcacccatagcaccaagaggggacacgccaaatcaaggccggtgcgcgattgtgacgacgtgcttcagactcatccttcaggcactcagtcggggatctttaacatcaagctccccgggtcctccaaaatcttctctgtgtactgtgatcaggagacttctctgggtgggtggctgcttattcaacaacgtatggatgggtcactgaatttcaacaggacctggcaagactacaagagggggtttggatcgctcaatgatgagggagaaggcgaattttggttgggaaatgattacctccatttgcttactcagagagggtcggtgctgcgcgtcgaactggaagattgggctggtaacgaggcctacgcagaataccatttccgagtcgggtcggaagcagagggctacgctctgcaagtctcgtcatatgagggaactgccggcgacgccttgattgagggatcggttgaagagggagctgagtacacttcgcacaataacatgcagttctcgaccttcgacagggatgcagatcaatgggaggaaaactgtgcagaggtgtatggaggaggttggtggtataacaattgtcaagcagcaaacctgaacggtatttactatccgggcggatcatacgaccctagaaacaattcgccatacgaaatcgaaaacggggttgtgtgggtgagcttccgcggagccgattactcacttagggcagtgcggatgaagattcggccccttgtgacccaa

SEQ ID NO: 11120 - DNA, 2598 bp, synthetic construct
  misc_feature 1..2598: note = source = /note="Description of Artificial Sequence: Synthetic coding sequence"
  source 1..2598: mol_type = other DNA
atgtttagcatgagaattgtttgcctggtgctcagcgtggtcggcactgcttggaccgccgatagcggcgaaggagatttcttggccgagggaggtggcgtgaggggcccgagagtcgtggaacgccaccagtcagcctgcaaagattcagattggcctttttgcagtgatgaagactggaattacaaatgcccaagcggatgtaggatgaagggcttaatcgatgaggttaatcaggactttacaaacagaattaacaagctgaaaaacagcctgttcgagtaccaaaaaaacaacaaagattcccacagtttgactactaacattatggagatcctgcgcggagacttcagctctgcgaacaatagagacaacacatacaacagggtgagcgaggacttgaggtctagaatcgaagtgctcaaaagaaaggtaatcgaaaaagtgcaacacatccagcttctacaaaaaaacgtccgtgcacaactagttgatatgaagcggctagaagttgatattgacatcaagatcaggtcttgcagggggtcctgctcccgggcactggcacgcgaagtcgatctgaaagactacgaagaccagcaaaagcagctggaacaagtaattgcaaaagatcttttaccgtccagggacagacagcatctgcccctgatcaaaatgaagcctgtaccggacctggtgcccggaaactttaagtcgcagcttcagaaagtgccacctgaatggaaggctttaactgatatgcctcaaatgagaatggagcttgaacgaccagggggtaatgagatcacacggggaggaagtacctcctatggcaccggtagtgaaaccgagagccccaggaacccctcctccgccgggagctggaacagcggatcaagcgggccagggtctacaggaaacaggaaccctgggtcaagtgggaccggaggcacagctacctggaaacctggatcaagcggccctggtagcaccggaagttggaacagtggctccagcgggaccgggtccaccggaaaccagaacccgggatccccaagacccggaagcacagggacctggaaccctggatccagcgagagagggagcgctggccactggacaagcgagtccagtgttagcgggagcaccggccagtggcactccgagtcagggtcattcagacctgattcgcctggaagtggcaacgctcgcccaaacaacccagactggggcacctttgaggaggtctcaggcaatgttagccctggcaccaggcgagaataccatacagagaaactggtcacctctaagggagataaagaactcagaaccggtaaggaaaaagtgacctcagggtcaactactaccacgaggcgcagttgctccaaaactgtgactaagaccgtcattgggcccgatggccacaaagaggtcacaaaggaggtggttactagcgaagacggatcagattgccccgaagcaatggaccttggtacactcagcggcatcggaaccctcgatggtttccggcacagacatcccgatgaagcagccttcttcgataccgcctctacaggcaagacctttcccggtttcttcagtcccatgcttggggaatttgtttccgaaactgaatccaggggcagtgaaagcggcatatttaccaatacaaaggagtctagctcacaccaccccggaatcgctgaatttccaagccgaggaaaaagtagcagctacagtaaacaatttacgagttcgacaagctacaatcgcggagacagcacatttgaaagcaagtcttacaagatggcagatgaggcgggaagcgaggctgatcacgagggaactcacagcactaagagaggacacgctaagagccgccccgtgagagattgcgatgatgtcctgcagactcatccctccggcacacaaagcggcatcttcaacattaagcttcccggcagctccaagatattttcagtctactgtgaccaggagacgtcactcggtgggtggctcctgattcagcagagaatggacggctccctgaactttaacaggacttggcaggattacaagagaggattcggatcactgaatgatgagggcgaaggcgagttttggcttggcaacgactacttgcatcttctgacgcaaaggggcagtgtgctgcgcgtcgaactggaggactgggcaggcaatgaagcctatgccgagtaccactttcgagttggcagtgaagctgagggatacgccctccaggttagttcatacgaaggaactgctggagacgcgttgattgaagggtcagtagaagaaggagcagagtataccagccacaacaacatgcaatttagcaccttcgacagggatgccgaccagtgggaggaaaactgtgcggaagtgtacggtggaggatggtggtacaacaattgtcaagcagcaaatctcaacggcatttactatcccggtggcagctacgacccccgaaacaacagcccttatgaaatagaaaacggtgtggtgtgggttagctttagaggcgcagactactcgctccgggctgttagaatgaagatcaggccccttgtaacacag

SEQ ID NO: 11121 - DNA, 2598 bp, synthetic construct
  misc_feature 1..2598: note = source = /note="Description of Artificial Sequence: Synthetic coding sequence"
  source 1..2598: mol_type = other DNA
atgttttcaatgagaattgtctgtctggttctgtccgttgtgggaactgcttggactgcagattcaggtgagggcgatttccttgcggaaggtggaggagtgagaggaccccgcgtcgtggaacgccaccaatcagcatgtaaggattcagattggcccttctgctcggatgaagattggaattacaagtgcccttcaggctgtagaatgaagggtttgattgacgaagtgaatcaagactttacgaaccgaattaacaagttgaaaaacagcctctttgaataccagaaaaacaacaaggattcccactcccttactaccaacattatggagattcttaggggagatttttcctccgcgaataaccgagacaatacctacaaccgggtcagcgaggatctgcggagccgaattgaggtgctgaagagaaaggtgatagagaaggtgcagcatattcaattgctgcaaaagaacgtgagggcccaactggtcgacatgaagagactcgaagtggatattgacataaagatccgttcctgtagaggatcctgcagccgggcgctggcacgcgaggtagatcttaaggattacgaggatcaacagaagcagctggaacaagtgatcgcaaaagacctccttccttctagggatcggcagcatcttccccttatcaaaatgaagcccgtcccagaccttgtgccaggaaactttaagtcccaactccagaaagtgccacccgaatggaaggcactgacggatatgcctcaaatgcggatggaattggaacgcccaggcgggaacgaaattactagaggtggaagcacttcgtacgggactggctcggaaaccgagtcaccgagaaatccaagctcggcaggaagctggaattctggaagctcggggcccggatcgactggaaatcggaacccgggatcgtccggtactggcggtacggcaacctggaagccaggctcgtcaggtcctgggagcaccggttcatggaactcgggctcctccggcaccggttccactggaaaccaaaacccaggttccccgaggcctgggtccacgggaacttggaatcctggatcttccgaacgtgggtcagcgggacactggacctctgaaagctcagtgtcgggttcaacgggccaatggcatagcgaatcaggatcctttcggcccgatagcccaggaagcggcaatgcgcggccaaacaatcccgactggggaaccttcgaagaagtgtccggcaacgtgtcacctgggacccgcagggaataccacactgaaaagctggtgacttctaagggtgacaaagaattgaggaccggtaaagagaaagtgacttcgggatcgaccaccactactagaaggtcatgttcaaagaccgtgactaagaccgtgatcggacctgatgggcacaaggaagtgacgaaggaagtggtcacttccgaagatggcagcgattgtcctgaagccatggatctgggaactctctcaggtattggcactctggatggcttcaggcatcggcaccctgacgaagccgcgttttttgataccgcatccaccggtaaaacttttcctgggtttttctcaccaatgctgggagaatttgtgtccgaaaccgaatcccgtgggtccgaatcgggcatctttactaacaccaaagagagctcttcgcatcatccgggtattgctgagttcccatccagaggaaagtctagtagctattccaagcagtttacgagcagcactagctacaatcgcggagattcaacttttgaatcgaagagctataagatggcagacgaagcaggttctgaggcagatcatgagggaacccattcaaccaagcggggtcatgcaaagtcgcgacctgtgcgcgactgtgatgacgttcttcagacccatccgagcggtactcagagcggaatctttaacattaagctgcccggatcctccaagattttctccgtgtactgtgatcaagagacttctcttgggggttggcttctgattcagcagcggatggacggttccttgaactttaaccgcacctggcaagattacaaacgtggatttggaagccttaacgatgaaggagaaggagaattttggctgggtaatgactacctgcatctcctcactcaacgcggttcggtgctgagagtggaactggaggactgggcaggaaacgaggcatacgcggagtatcacttcagagtgggttccgaggcggaaggatacgcactgcaagtgagctcatacgaaggcactgccggagatgcacttatcgagggttcagtggaagaaggtgcggaatacacgtcacacaataacatgcagttctcaaccttcgatagagacgcagatcagtgggaagaaaactgcgcagaagtctacggtgggggatggtggtacaacaactgtcaagcagcaaatctgaatggcatctactaccctggtggctcgtacgaccccagaaacaactccccttacgaaatcgaaaatggggtcgtctgggtgagcttcagaggagcggattattcacttcgggcggtgaggatgaaaattcggcctctggtgactcag

SEQ ID NO: 11122 - DNA, 2598 bp, synthetic construct
  misc_feature 1..2598: note = source = /note="Description of Artificial Sequence: Synthetic coding sequence"
  source 1..2598: mol_type = other DNA
atgtttagcatgcgaatcgtgtgcctcgtactgtccgtagtgggtacggcctggactgccgacagtggagaaggagactttctggcggaagggggcggcgttcgcgggccccgagtcgtcgagaggcaccagtctgcttgtaaggacagcgactggccattttgttccgacgaagattggaattacaagtgcccgtcgggatgccgcatgaaaggcctcatagatgaggttaaccaggactttaccaatagaataaataagctgaagaattccctctttgagtatcagaagaataacaaggactcgcacagtctcaccacaaatatcatggagatactgcggggtgatttttcatccgccaataatcgcgacaacacctacaatagagtcagcgaagatctgcgttcccggattgaagtacttaagcgaaaagtcatcgagaaggtacaacatatccagctcctccagaagaatgtacgggcgcaactggtagatatgaaacgcttggaggtagatattgatatcaagattcgaagttgcaggggcagctgttctagggctctggctagggaggtggacctgaaggattacgaggatcagcagaagcaactggagcaggtaattgccaaggatttgctccccagcagagataggcaacacctccccctcataaagatgaaacctgtgccagaccttgtgcccgggaattttaagagtcagctacagaaagtcccaccagagtggaaagccctaacagacatgccccagatgcggatggagctggagagacccggtgggaacgaaatcacacgcggcggttctaccagttatgggactggctccgagactgaatctcctcggaatccttcgtccgcagggtcctggaacagcggctcaagtggcccaggcagcacaggaaacagaaatcctggcagctccggcactggtggtacagctacatggaagccaggaagctctggccctggtagcactggatcttggaatagtggctccagcggtacgggctccacgggtaatcagaacccagggtctcctcgccctgggtccacagggacgtggaaccctggtagcagcgagagagggagtgcagggcactggacatctgagtctagtgtttccggttctactggccaatggcatagtgagtcaggtagcttccggccagactctcccggaagtggaaatgctcggccgaacaaccccgattggggaactttcgaagaggtgtctgggaacgtatcacccggtactcggcgggagtatcataccgagaagctcgtcacgagtaagggggacaaagaacttcgtactgggaaggagaaggtgacttctggcagtacaacaactacccgcaggagctgctcaaagacagtcaccaagaccgtaatcggtcctgacggacacaaagaagtcactaaggaagtggtcacctctgaagacggaagtgactgccctgaggcaatggatttgggtacgttatctggaatcggaaccctggacggctttcgccatcgccaccccgacgaggcggctttcttcgatactgcaagtacaggaaagacttttccaggcttcttcagtcccatgctgggagaattcgtgagtgaaaccgaatcacgcggaagcgagagcggcatctttaccaacacgaaggaatcctcctcccatcacccaggaattgcagaatttccatccaggggcaagtcaagcagctactcaaagcagttcacctcatcaacgtcgtacaatcgcggtgattctacattcgagtctaaaagttacaaaatggcggatgaggccggtagtgaagccgaccacgaggggacccactctacgaaacggggacacgcgaagtctcgcccggtaagggactgcgatgacgtgctacagacgcatccttctggcacacagagcgggatattcaacatcaaactgcctgggagtagcaaaattttcagtgtttattgcgatcaggagacctccctgggtgggtggctgttgattcaacaacgcatggacggttccctaaacttcaaccggacctggcaagactataagaggggcttcggcagcctcaacgacgaaggcgagggcgagttctggctaggcaatgattacttgcacctgctgacacagaggggcagtgtgttgcgagtagaactggaggactgggccggcaacgaggcctacgcggagtaccatttcagagtggggagcgaggctgaggggtacgccctgcaggtatctagctatgagggcactgcgggcgacgctcttattgagggtagcgttgaggagggcgccgaatatacttctcacaacaatatgcagttctccacattcgaccgagatgctgaccagtgggaagagaattgcgcggaggtctatggtggggggtggtggtacaacaactgccaggcagctaatcttaacggaatatattacccagggggatcatacgaccctcgcaacaattctccatatgaaattgaaaacggcgttgtctgggtgagctttaggggtgcagactactcgctgagagcagtccgaatgaagataagacccttggtaacccag

SEQ ID NO: 11123 - DNA, 2598 bp, synthetic construct
  misc_feature 1..2598: note = source = /note="Description of Artificial Sequence: Synthetic coding sequence"
  source 1..2598: mol_type = other DNA
atgttcagcatgagaattgtgtgccttgtgctttccgtggtcggtaccgcgtggaccgcagattcgggagaaggcgactttctcgcagagggagggggagtgaggggaccccgtgtggtggaaagacatcagagcgcatgtaaggattctgattggcctttttgttcagacgaagattggaactacaaatgtccatccgggtgtagaatgaagggactgatagacgaggtgaaccaggacttcacgaacagaattaacaaacttaagaactcgctctttgaataccagaagaacaacaaagattcccattcgctcacgaccaatatcatggaaatcctgcgtggtgacttttcgtccgcaaacaatagggataacacttacaaccgagtctcggaggaccttagatcccggatagaagtgctcaaaaggaaagtgattgagaaggtgcagcacattcaattgcttcaaaagaacgttcgcgcacagttggtggacatgaaaagattggaggtcgacatcgatatcaagattagatcatgtagaggatcctgttctcgggctctcgccagggaagtcgatctgaaagattacgaagatcaacagaagcagcttgagcaagtgattgcgaaggaccttctgccgtcacgggatcgccagcacctgccgctgattaagatgaagccagtgcctgatctggtcccgggtaatttcaagtcccaattgcaaaaggtcccccctgagtggaaggcacttaccgatatgcctcagatgcggatggagctggaacgtcctggggggaacgaaatcaccagaggcggttcgaccagctacgggactggatcggagacggagagcccaagaaaccctagctcggcaggttcttggaattccggcagctcaggacccggatctaccggaaatagaaacccaggctcctccggaactggtggcacggcaacctggaaacctggttcaagcgggcccggctcaactgggtcgtggaactccggatcatcagggactggtagcaccggaaaccaaaatccaggatctcctaggcctgggtcaacgggtacctggaaccccggttcatccgaaagaggttcggccggccattggacgtccgagtcatcggtgtccggttcgactggtcaatggcactccgagtcaggatcctttcgccctgattcgcctggtagtggtaatgcgcggcctaataaccctgattggggtacctttgaagaagtgagcgggaatgttagccctggtaccagaagagaataccatactgaaaagctggtgacctcgaagggagataaggagctgagaaccgggaaagaaaaggtgacctcgggatcgaccacgacgactcgaaggtcctgtagcaagactgtgactaagactgttattggtccagatggtcataaagaagtgacgaaggaagtggtgacttccgaggacggttcggactgtccagaagccatggacctgggcaccctttccggaattggaactcttgatggttttagacatcggcaccctgacgaagcagcgtttttcgatactgcgtccaccggtaagacgtttcctggcttcttttctccaatgctcggagaatttgtgtccgagactgaatctaggggatccgagtccggcatattcactaacaccaaagaatcaagctcacatcatccagggattgccgaatttccatcccgcggtaagtcatcatcatactccaagcaatttacgtcctcaaccagctacaacaggggggactcaacgtttgaatctaagtcgtacaagatggcagatgaggctgggtcagaagctgaccacgaaggcactcattcaactaagagaggccatgcaaagtcacgaccggtgagagactgtgacgatgttctgcaaactcacccttccggaacccaatccggtatcttcaacattaaactgcctggatcgtcaaagatattctcggtgtactgcgatcaggaaacctcgctgggcggatggctgctgatccagcaaaggatggacggaagcctcaactttaaccgcacctggcaagattacaagcgtggatttggctcactcaacgatgaaggtgagggtgagttctggctgggcaatgattacctgcacctgcttactcaacggggatcggtccttcgggtcgaactggaggattgggcaggaaatgaagcatacgcggagtaccatttcagagtgggaagcgaagcagaaggatacgccctgcaagtctcgtcctacgagggaactgcgggggacgcactcattgaaggatcagtcgaagaaggggcagagtatacctcccataacaacatgcaattcagcacttttgaccgggatgcggaccaatgggaagaaaattgtgcagaggtgtacggtggcggctggtggtacaataactgtcaggccgcaaatcttaacggtatctactatcctggaggttcctacgaccctcggaacaattctccctacgagattgagaatggcgtggtctgggtgtccttccgcggtgcagactactcgcttcgggctgtcagaatgaaaattcggcctctggtgacccag

SEQ ID NO: 11124 - DNA, 2598 bp, synthetic construct
  misc_feature 1..2598: note = source = /note="Description of Artificial Sequence: Synthetic coding sequence"
  source 1..2598: mol_type = other DNA
atgttctccatgaggattgtctgtttggtgcttagcgtagtgggcactgcgtggaccgccgattccggtgagggcgactttttagctgaaggggggggggtgagaggccctcgagtggttgagcgacaccaaagtgcctgcaaagacagcgactggcctttctgctcagacgaagactggaattataaatgcccttcaggatgcaggatgaagggattaattgacgaagtcaatcaggacttcactaatcgtatcaacaaacttaagaattcattatttgagtatcaaaaaaataataaggactctcatagcctcacgacgaatatcatggaaatacttagaggggatttctcttctgcaaataaccgtgataatacttataatcgggtttctgaagatctccgctcacggatcgaggtcctcaagcgtaaagttattgaaaaggttcaacatatccagttattgcaaaagaatgtgcgggcccagctcgttgatatgaaacgtctagaagtggatattgatattaaaataaggagttgtaggggttcttgctcccgagccttggcccgagaggtggatttaaaagattacgaagaccaacagaagcaattagaacaagttattgctaaagatctgcttccctctagggatagacaacatctcccacttatcaaaatgaagccagtccctgatctggtgccaggaaattttaagtcccaattgcaaaaagtgccacctgaatggaaggctttaactgatatgccgcagatgcggatggagttggaacgtccagggggcaatgagataactagaggaggatcgacatcgtatggaactggcagtgagacggagtccccccgtaatccttcatcagctggctcatggaattcaggcagctctggtccaggatccaccggtaataggaacccaggatcttccggaacaggtggtaccgctacttggaaaccaggttcttccggacctggttctacaggtagttggaactccggatccagtggaacaggaagtaccggcaatcagaaccctggaagcccgcgtccaggtagcactggaacttggaacccgggttcatcagagaggggaagtgctgggcattggactagtgaatcatctgtctctggttctacgggacagtggcactcagaaagcggtagtttccgaccagatagtccgggtagcggaaacgcacgtcccaacaatccagattggggtacgttcgaggaagttagcgggaatgtgagtccaggcaccagaagagaatatcataccgagaaacttgttacaagcaagggagataaagagttgaggaccggcaaggaaaaggtcaccagcggatctacgactactactaggagatcttgttcaaagactgttacaaaaactgttatcggtccagacggacataaagaggtaacgaaggaagtagttacctctgaagatggttcagattgccctgaagctatggatttgggtactctttcaggtattggaacattggacggctttaggcatagacacccagatgaggcagctttctttgataccgcttcaaccggcaagactttccctggatttttttcacctatgctgggagaatttgtttccgagactgagtcaagaggttctgagagcggcattttcaccaatactaaagagtcttcctctcatcacccaggcattgctgagttcccttctaggggcaagtctagttcgtactctaagcaattcacatcaagcacgtcgtacaatcgaggagactccacattcgagtcaaagagttacaagatggcggatgaggccgggtccgaggccgatcatgagggaacacattccacaaagagaggtcatgcaaagtctcgtcctgttagagactgtgatgacgtgttacaaacacacccttcaggaacccaatcaggcattttcaatattaagttgccgggtagttctaagatcttttctgtttattgtgaccaagagacttctttgggggggtggctcctcattcaacagcgtatggacggctctcttaactttaatcggacttggcaggattataaaagaggatttggatcgctgaacgatgaaggagagggtgagttctggttaggtaatgattatttgcatctgttgactcagaggggcagcgttctgagggtggagcttgaagattgggcaggaaatgaggcgtatgccgagtatcatttcagggtgggaagcgaggctgaaggctacgcattgcaagtgtcgtcctacgaaggtacggctggcgatgccctcattgagggatctgttgaggaaggagcggaatacactagccacaataatatgcaattcagtacttttgacagagatgcagaccagtgggaagaaaactgtgccgaagtgtacggagggggatggtggtataacaactgtcaagctgccaacttgaacggcatatattaccctggaggttcatacgatccccgtaacaacagtccttacgagatagaaaatggtgttgtatgggtgagctttagaggcgctgattatagtttgagggctgtcaggatgaaaattagaccactcgttacccag

SEQ ID NO: 11125 - DNA, 2598 bp, synthetic construct
  misc_feature 1..2598: note = source = /note="Description of Artificial Sequence: Synthetic coding sequence"
  source 1..2598: mol_type = other DNA
atgttcagcatgcgcattgtctgtctggtgttgtccgtggtgggaaccgcctggactgccgactcgggcgaaggagacttcctcgctgagggcggaggggtccggggaccacgtgtcgtggaaagacaccagtcggcatgcaaggactcagactggccattctgcagcgacgaagattggaactacaagtgcccatctgggtgccgcatgaagggcctcatcgacgaagtcaaccaggacttcactaatcggatcaataaactgaagaactcgctgttcgagtatcagaagaataacaaggactcgcactccctcaccactaacatcatggagatcctcaggggcgattttagctcagccaacaaccgtgataacacctacaatcgagtctccgaagatttgcgctcgcggatcgaggtgctgaagagaaaggtcatcgagaaggtccaacacatccagctcctgcaaaagaacgtgcgggctcagctggtggatatgaagaggctggaggtggacattgatatcaagatcaggtcgtgccgcgggtcgtgtagcagagctttggcgcgggaagtcgacctcaaggactacgaggaccagcagaagcagctcgagcaggtgatcgcaaaggatctcttgccctcgagagataggcagcacctgccgttgattaagatgaaaccagtcccagaccttgtaccagggaacttcaagtcacaactccagaaagtgcccccagagtggaaggcactgactgacatgccacaaatgcgcatggagcttgagcgtccaggcgggaatgagatcacccgcggcggctcgacttcctacggaaccggcagcgaaaccgagtccccgcgcaacccgtcgtcggcggggtcatggaactcgggatcatcgggtccgggatcgaccggcaaccggaacccgggctcgagtggaaccggcgggaccgccacctggaagccaggctcatcaggacctggaagcaccgggtcgtggaacagcgggtcatccgggaccggatcgactggaaaccagaatccgggatcccctagacctggatccactggaacctggaacccggggagcagcgaaagaggctctgcgggacactggacttccgaatcctcagtctcgggctcgactggacaatggcactccgagtccgggtcattcagaccagactcgccgggatccggcaacgcacggccgaataatccggactggggaactttcgaagaggtgtcgggaaacgtgagccccggcaccagacgcgagtaccacaccgagaagctggtgacctccaagggagataaggagctccgcactggaaaggagaaagtcacctcaggatccaccactaccacccggcggtcatgctcgaaaaccgtgactaagacggtgattgggccagacgggcacaaggaagtgaccaaggaggtggtgacctccgaggacggaagcgattgcccggaggctatggaccttggaactttgtccggcatcggcaccctggacggttttaggcacagacacccggacgaagcggcgtttttcgacaccgcgagcaccggtaagactttcccgggatttttcagcccgatgctcggtgaattcgtttcggaaaccgagtcgcgaggatcggagtccggaatcttcaccaacaccaaagaaagcagctcgcatcatccaggaatcgctgaattcccgtcccgcggcaagtcgtcctcctacagcaagcagtttacctcgtcgacgtcctacaacagaggtgactcaacctttgaatccaagagctacaaaatggccgacgaagctgggtcggaggcggaccatgaaggaacccactcgactaagcgcggacatgcaaagtcacgcccagtcagagattgcgacgacgtgctccagacccatcctagcggcacgcaatcgggtatcttcaatatcaaactcccgggatctagcaaaatcttttcggtttactgcgatcaagaaacctccctcggtggttggcttctgatccagcaacgtatggacggatcgctgaacttcaataggacttggcaggattacaagcgcggcttcgggagcctgaatgacgaaggagaaggagaattctggctgggcaatgactacctgcacctcttgacccagcgcggctcggtgctgcgggtggaactggaagattgggccggaaacgaagcatacgccgaataccacttcagagtcggtagcgaagccgaaggatacgctcttcaagtctcatcgtacgaaggcacggccggagatgcgctgatcgaaggctcggttgaggagggcgccgaatacacctcccacaacaatatgcaattctcaaccttcgatcgggatgccgatcagtgggaagaaaattgtgccgaagtgtatggcggagggtggtggtacaacaactgtcaagcggccaaccttaatggaatctactatccaggaggatcatacgacccgcgcaacaactccccgtacgaaatcgagaatggagtggtgtgggtgtctttccggggagcggactactcgctccgcgcagtccggatgaagattcgcccccttgttactcag

SEQ ID NO: 11126 - DNA, 2598 bp, synthetic construct
  misc_feature 1..2598: note = source = /note="Description of Artificial Sequence: Synthetic coding sequence"
  source 1..2598: mol_type = other DNA
atgttttccatgaggatcgtgtgtctagtgctgtctgttgtaggcacagcttggacggctgatagcggagagggagatttccttgccgagggagggggagttcgggggccgcgggtagtggaacgtcaccagtcagcatgtaaagactcagactggccattttgcagtgacgaggactggaactataagtgcccatctggatgtcgaatgaaaggcctgatagatgaggtgaaccaggacttcacaaatcggatcaataaattgaagaacagcctgttcgaatatcagaaaaacaacaaagattcacacagtctgactacgaatatcatggagattctccgcggcgacttctccagcgccaataaccgggacaatacctacaacagggtctcagaggacctgaggtctcggattgaggttcttaaacgaaaggtgatcgaaaaggtgcagcatatacaattgttacaaaagaacgtgcgggcacagctcgtggacatgaaaaggctggaggtggatatcgacattaagatccggagctgtcgcggaagttgctctagggccctagcccgcgaagtggatctgaaagactacgaagatcagcagaagcagctggaacaggtgattgcaaaagacttgcttccatcccgagataggcaacacctgcccctgatcaaaatgaaacccgtgcctgacctcgtgcccggcaacttcaagagtcagctccagaaagtgccccccgagtggaaagccttaaccgacatgcctcaaatgcggatggaactcgagaggcctgggggcaatgagatcacacggggcggttcgacttcgtatggaacaggctcggaaaccgagagccctaggaaccctagctcagccgggtcttggaattccggcagcagcggcccaggatctacaggcaaccgaaaccccggctcttccggaacgggcggaactgccacatggaaaccaggaagctcagggccgggctcaaccggttcctggaacagcggctccagcggtaccggaagcactggcaaccagaatcccggcagtcccagacctgggagtaccgggacctggaatccgggatctagcgagaggggatcagcagggcattggacatccgagtcctccgtgtccgggtccaccggccaatggcattcagagtccggatcatttaggcccgatagtcccggatcaggaaacgctagacctaataaccccgactggggaaccttcgaggaagtgtctggcaacgtgagtcccgggacgagaagagagtaccataccgagaagctggttacttctaaaggggacaaggagctccggaccggtaaggaaaaggttacatctggaagcacaactaccacaagaagatcatgcagtaagactgttaccaaaactgttattggtcccgacgggcacaaagaagtcacaaaagaggtggtcacaagcgaggacggttctgactgtccagaagcgatggacctgggtacactgagcgggattggaaccctggacgggtttcgtcatcgtcatccagatgaggctgccttcttcgacactgcatccactggaaagacctttcctggcttcttttccccgatgctcggtgaattcgtctccgagaccgaaagcagagggtctgagtcggggatcttcaccaacaccaaagaaagcagctcacatcatcccggaattgccgaatttccctctagggggaaatccagtagttactctaaacagtttactagctcgaccagctacaaccgaggggacagcacgtttgaaagtaagtcttataagatggccgacgaggcgggaagcgaggcagatcacgagggcactcattcgacgaagcgtggacatgcgaaatctcggccagtccgggactgcgacgatgtgctgcagacgcaccctagtggcactcagagcgggatttttaacatcaaattgcctggctcctccaagatattttcagtatattgcgatcaggagacttccctggggggttggctgctcattcaacaaagaatggacgggtctttgaactttaatcgaacatggcaggactacaagagaggcttcggatctctcaatgacgagggagaaggcgaattctggctgggcaacgactacctgcacctcctaacacaaagaggaagcgtgctgcgagtggaactggaagactgggccggaaacgaagcatacgccgaataccacttcagggtggggtctgaagccgaagggtatgctttacaggtctctagctacgagggcaccgctggagatgcattgattgagggtagcgtggaagagggcgcagagtatacatcccacaacaacatgcagttttccacatttgatcgcgacgctgaccagtgggaggagaactgcgccgaggtctacgggggagggtggtggtacaataactgtcaggccgccaatctcaatggcatctattacccgggggggagctacgaccctagaaacaattccccttacgaaatcgagaacggagttgtatgggtgtcattcaggggggctgactatagcctccgagccgtccgtatgaagatcaggcccctcgtcacccaa

SEQ ID NO: 11127 - DNA, 2598 bp, synthetic construct
  misc_feature 1..2598: note = source = /note="Description of Artificial Sequence: Synthetic coding sequence"
  source 1..2598: mol_type = other DNA
atgttcagcatgcgcatcgtgtgccttgtgctgtctgttgtcggaactgcatggaccgcagattcgggtgaaggtgacttcctggcggagggtggtggtgtgaggggaccaagggtggttgaacggcatcaatcggcttgtaaggattcagactggcctttctgctcggacgaggactggaactacaagtgccctagcggatgtcggatgaaggggctgatcgatgaggtgaaccaagacttcaccaaccgcattaacaaactgaagaattccctgttcgaataccagaagaacaacaaggattcacattccctgaccaccaacatcatggaaatcttgcggggcgacttctcatccgcgaacaaccgggataatacctataatcgggttagcgaggatctccgctcgcgcattgaagtcctgaagaggaaggtcatcgaaaaagtacagcatatccaactgctccagaagaatgtccgggctcaacttgtggacatgaagcgccttgaagtggacatcgacatcaagatcaggtcctgccgcggatcgtgctccagagctttggcaagagaagtggacttgaaggactacgaggaccagcagaaacagcttgaacaagtaattgccaaagatctgctgccatcccgcgaccggcagcaccttccgttgattaagatgaagccggtgccggacctcgtgcctggaaatttcaagtctcaactgcagaaagtccccccagagtggaaagcgctgaccgatatgccgcaaatgcgcatggaactggagcgtcctggaggaaacgagatcacgcgaggaggctcaacctcatacggaacgggttctgagactgagtcaccgcgcaacccgtcgtccgccggatcctggaatagcgggtcctccggacctgggtcaacggggaaccgcaatcctggctcgtcgggaaccggaggaactgcgacctggaaaccggggtcctcgggcccgggctcgaccggctcatggaattctggaagcagcggtaccggaagcaccggaaaccagaacccaggcagcccaagaccgggaagcactggaacgtggaaccctggatcgtccgaacggggctcggctggacactggacttcggagtctagcgtatcggggtcgactggacagtggcactcggaatcgggtagctttcgccccgattccccaggaagtggcaatgcacgcccgaacaatccagactggggcacgttcgaagaggtgtcagggaacgtgtcaccgggaacgcgccgagaataccacactgagaagctggtcacgagtaagggtgataaggaactgcggaccggcaaagagaaggtgacctcgggcagcactacgaccactcgaagaagctgctcaaaaactgtgaccaagactgtgatcgggcccgacgggcacaaagaggtgactaaagaggtggtcacttccgaggacggaagcgactgcccggaagcaatggacctggggaccctgtcaggcatcggaactctcgatggcttccgccatcggcacccggacgaggccgccttttttgatactgcctctactggcaagactttcccgggcttcttctcgccgatgctcggcgaattcgtttccgaaaccgaatcgagaggaagtgaatcgggcatctttaccaacaccaaggagtcatcgtcacatcacccgggaattgctgagttcccaagccggggtaagtcatccagctacagcaaacagtttacttccagcacttcgtacaataggggcgactccaccttcgaatccaagtcctacaaaatggccgacgaagccggctcggaagccgaccacgaaggtacgcatagcactaagcggggacacgcgaaatcaagaccagtgcgggactgtgatgatgtcctccagacccatccgtcgggcactcagtccggaatcttcaacattaagctgcccggttcctctaagatcttttccgtgtactgcgatcaagaaacctctctcggaggttggctgctcatacaacagagaatggacggaagcctcaactttaatcggacctggcaggattacaagcgcggcttcggatcgctgaacgacgaaggcgagggagaattttggctgggtaacgattatctgcatcttctcacccaaaggggatcggtgctcagagtcgaactggaggactgggcgggaaacgaagcctacgcagagtaccacttccgagtaggcagcgaagccgagggttacgccctccaagtgtcctcatacgaggggaccgcgggagatgccctcatcgaggggtcggttgaagaaggcgctgaatatacttcgcacaacaatatgcaattctccactttcgacagggatgcggatcagtgggaggaaaactgcgcagaggtgtacgggggaggatggtggtacaacaattgtcaggccgccaacctcaatggaatctactaccctggaggaagctacgacccacggaataactcaccctacgaaatcgagaacggagtcgtctgggtgagcttcaggggagctgactactccctgagagcagtgagaatgaagatccgcccattggtgacccag

SEQ ID NO: 11128 - DNA, 2598 bp, synthetic construct
  misc_feature 1..2598: note = source = /note="Description of Artificial Sequence: Synthetic coding sequence"
  source 1..2598: mol_type = other DNA
atgttttcaatgcggatagtgtgcctggtcctttcagtggtgggtactgcctggaccgctgacagcggagaaggggacttcctcgctgaaggcggtggcgtacgaggcccccgtgtggttgagcggcaccagtctgcctgcaaggactctgattggccattttgttctgacgaagactggaactacaagtgcccatcaggctgtcggatgaagggcttgatcgacgaggttaaccaggacttcactaaccggataaacaagttgaaaaactcgctttttgaataccagaaaaacaacaaagatagtcactcactgacaaccaatattatggagatactgaggggagacttctcaagtgccaacaaccgcgataatacttataatcgggtgtccgaggatctgcgcagtagaattgaagtgctcaagcgaaaggtgatcgagaaagttcagcacatacagctgctgcagaagaacgttcgtgcacagctcgtggacatgaaaagactggaggttgatattgacattaagatccggtcctgccgggggtcatgtagtagagccctcgcgcgcgaggtggatctgaaggattacgaagaccagcagaaacagctcgagcaggtgatcgccaaagacttgttgccatctcgggaccgccaacatcttccgttgatcaagatgaagccagtcccagacctcgtgcctgggaacttcaaaagccagctgcaaaaggtcccccccgaatggaaagctctaacagatatgccccagatgcggatggagcttgagcggccaggtggaaatgaaatcacacggggcggtagcacatcatacgggacaggtagcgaaacggagtccccgcgtaatccttccagtgcaggctcctggaatagcggttcatcaggaccaggatcaacagggaatcgcaatcccggaagttctggaacaggcgggactgcaacctggaaacccggtagctctggacctggctcaacaggatcctggaacagcggatcttcaggcacagggtcaaccggaaatcagaaccctggcagtccaaggccggggagtacagggacatggaaccccggctcatctgagagggggtccgccggtcattggaccagtgagtcttccgtttctggcagcacaggccagtggcactccgagagcggcagctttcggccggattccccgggatctggtaacgcgcggcctaacaaccctgattggggaacattcgaggaagtgagtggcaacgtatcccccggcacacgcagggagtatcacacagagaaactagttaccagtaaaggcgataaagaattgcggaccggcaaggagaaggtgacctctgggagtactaccaccactaggagatcgtgtagcaaaactgtaactaagacggtcatcggtcccgatggccacaaagaggttacaaaagaggtggttacttcagaagatggcagtgattgtcccgaggctatggacttggggacgctgagtggcattggtacgctggacggcttccggcatcgccaccccgatgaagccgcattcttcgacacggcatccacaggcaagacgtttccaggcttcttctccccgatgctgggtgaattcgtaagcgaaactgagtcccgcggttccgagtcgggaattttcacaaacaccaaggaaagcagctctcaccaccctgggatcgccgaattcccctcccgcggcaagtcttcaagctactcaaagcagtttacctctagcacttcttataaccgtggggattcaacctttgagtcaaagagctacaaaatggctgacgaagccggctctgaggccgaccacgaaggcacccatagtaccaagcgtggtcacgccaaatccagacctgtacgcgactgtgacgatgtgctacagacacatcccagcgggactcagagcggcattttcaatatcaagctgcccggtagctcaaagatcttctcagtttattgcgaccaggaaacctcacttggagggtggctgcttatacagcagagaatggacgggtccttgaattttaaccgaacctggcaggactacaagcgcggatttggttcactcaatgatgagggggagggagaattttggttggggaatgattacctgcatctgctcacccagcgcgggagtgtcctgcgggtggagctggaagactgggctggaaacgaggcttatgcggagtaccattttcgagtgggctctgaggcggagggttacgccctgcaggtgagctcctacgaaggcaccgcaggcgacgccttgatcgagggcagcgtagaggaaggcgccgagtatacctctcacaataatatgcaattctccacttttgatagagacgccgaccagtgggaagagaactgtgcagaggtgtatgggggtggctggtggtacaacaattgtcaggccgcgaatttgaacgggatatactatccggggggctcctatgacccacggaacaactctccgtacgaaatcgagaatggtgtggtttgggtaagttttagaggcgccgattattccctaagggcagtaaggatgaagattcgccccctcgtaacccaa

SEQ ID NO: 11129 - DNA, 2598 bp, synthetic construct
  misc_feature 1..2598: note = source = /note="Description of Artificial Sequence: Synthetic coding sequence"
  source 1..2598: mol_type = other DNA
atgttttccatgcgtatagtgtgtctggtgctcagtgttgttggcaccgcctggacagctgactcaggggagggggactttttagccgaggggggcggagtgcgaggccctagggtggttgagcggcaccagagtgcctgtaaggactctgattggcccttctgctccgatgaggattggaactacaagtgtccgagcggatgtagaatgaagggcctgatcgatgaagtcaaccaggacttcactaaccgtatcaataagctgaagaattcattgtttgagtaccaaaagaataacaaggactcacactcgctgaccacaaacatcatggaaatcctccgtggtgacttttctagtgccaacaaccgggataacacttacaatcgcgtctcagaagatctgcgcagccggattgaggtcttgaaacgtaaagtgatcgagaaagtccaacacatccaactcctgcaaaagaatgtccgcgctcagctggtagacatgaaaagactggaggtggacattgatatcaaaattagaagttgtcgagggtcctgttccagagccctcgccagagaggtcgacttgaaggactatgaggaccagcagaagcaacttgagcaggttatcgctaaggatttactcccttctagggatagacagcatctgccactgatcaagatgaaacctgtcccagatctggtgccgggcaactttaaatcacagttacagaaagtgcctcccgagtggaaggctctgaccgacatgccccagatgagaatggagcttgaacggcctgggggcaacgaaataaccaggggcgggagtacgtcctatggaacgggctctgagactgagtctccccggaacccatccagtgcgggatcttggaactccggcagttccggccccggctctacaggcaacagaaaccctggatcatcagggacgggaggcaccgccacttggaagcctggatcttctggtcctggcagcactgggtcttggaacagcgggtcttccggcactgggagtactgggaaccagaatcccggatcacccaggcccggtagtaccgggacctggaacccaggctcaagcgagcggggcagtgccgggcactggacgtccgagtcttcagtgtcaggtagcactggtcaatggcatagtgagagcggctctttcagacctgacagccccggtagcgggaatgccaggccaaataaccccgactggggcacttttgaggaagtgtccgggaatgtgtctcccgggaccaggcgtgagtaccacacagaaaagctggtgacatcgaagggggataaggaactccgaactggcaaagagaaggtgacaagcgggagcacgaccaccacacggcggtcgtgctcaaagacagttacaaagactgtaatagggccagatggtcataaagaggtaactaaggaagtagtgacttccgaagacgggtcggattgtcctgaggccatggacctggggaccctcagcggcataggaacgctggatggtttccgccatagacatccagatgaggctgcttttttcgacaccgccagcaccggtaaaacctttccaggctttttcagtccgatgctgggagagtttgtgagcgagacagaaagccgcggaagcgagtcgggtatatttacaaataccaaagagtcttcaagccaccatccagggatagccgagtttcccagccgtggaaaaagttcctcatactcaaagcagtttacttcatctacctcctacaatcggggcgacagcaccttcgaaagtaaatcttataaaatggctgacgaggcaggaagcgaggctgaccacgaaggtacccactccactaaaagggggcatgccaaatcgagaccagtaagggattgtgacgacgttctgcagacccatccctcgggcacccagagcgggatctttaacatcaagctgccgggatcatctaaaatattcagtgtgtactgcgatcaggaaacaagtttggggggatggctgttaatccaacaaagaatggacggcagcctgaattttaatcgtacctggcaagactacaagcgggggtttgggtctctcaatgatgagggagaaggtgagttttggttagggaacgactatctgcatttgcttacgcagcgggggtccgtgctccgtgtggagttggaggactgggccgggaatgaggcttacgcggaataccacttcagggtggggtccgaggcagaggggtacgctttgcaggtttctagttacgaaggaaccgcgggcgacgctctcattgagggctccgtcgaagagggtgccgaatatacctcccacaacaatatgcagttctccacattcgacagagacgccgaccagtgggaagagaattgcgcggaggtttatggcggcggttggtggtacaataactgtcaggcggcaaacctgaatggaatatattatcctggaggcagttatgaccccaggaataacagcccctatgaaatagaaaacggagtggtttgggtttcttttaggggagctgactactcactgcgcgcagtgcgtatgaaaatcaggcctctggttacacag

SEQ ID NO: 11130 - DNA, 2598 bp, synthetic construct
  misc_feature 1..2598: note = source = /note="Description of Artificial Sequence: Synthetic coding sequence"
  source 1..2598: mol_type = other DNA
atgttctctatgaggatcgtgtgcctggtgctttctgtcgtcggaaccgcatggaccgcagactctggagagggagacttcctggctgagggagggggggtccggggtccccgggttgttgaaagacatcagtctgcttgcaaagacagcgactggcccttctgttctgacgaggattggaattacaaatgcccaagtggatgccgcatgaaggggctgattgatgaagttaaccaggacttcacgaacaggatcaataaattgaagaactccctgtttgagtatcagaaaaacaacaaagatagccacagcctgaccaccaatataatggagattctgcgaggtgacttcagctccgccaacaacagggacaatacctacaaccgcgtaagcgaggatctcaggtccaggatcgaggtgctgaagcggaaggtgatagaaaaggtgcaacatatccaactcctgcagaagaacgtccgagcgcagttggtggacatgaaacgacttgaggtagacattgacatcaaaatccgctcttgtcgcggtagctgttccagagcccttgccagggaagttgatctcaaggactacgaagaccagcagaagcaacttgaacaggtcattgccaaggacctcctgccgagtcgggacagacagcacttgcctctcatcaagatgaagccagttcccgacctcgttccaggaaactttaaatctcagctccagaaggtgcctcccgagtggaaggcgctgactgacatgccgcagatgaggatggaactggagagaccgggaggaaatgaaatcacccggggaggttcaacctcttacggcaccggctccgagaccgagtcccctagaaatccctcttcagcaggatcatggaactcagggagttctgggccaggatcaaccggcaatcggaatcccggaagcagtggcactggtgggactgccacttggaagccaggaagttcaggacccggctccactgggtcatggaactcaggatccagtggcaccggtagtactggcaatcagaacccgggaagcccaagacctggatctactgggacttggaacccaggatcaagcgagcgaggttcagccggtcattggacaagtgaatcctctgtttccggctccacaggacagtggcattctgagtccggttcattccgccccgactccccaggctccggcaacgcaagacctaacaatcctgactgggggaccttcgaggaagtatcagggaacgtgagccccggcactaggagagaataccatactgagaaactggtaacctcaaagggggacaaggagttgcgaaccggaaaggaaaaggtgacgagcggtagcactacaacgacccgaaggtcatgttcaaagactgtgaccaaaacagtcatcgggccagacggccacaaagaagtgaccaaagaggtggtgacttccgaagacggctctgactgcccagaagcgatggatttgggcacattgagcggaatcggcacactcgatgggttccgccatagacatcccgacgaagccgccttcttcgacaccgcttccaccggaaaaacttttcctggctttttctcacccatgctgggcgagttcgtgagtgagaccgaaagccggggcagcgagagcggaattttcactaacaccaaagaatcttcaagtcatcaccccgggattgctgaatttccgtctagaggaaaaagttctagttacagtaagcaatttacaagcagtacgagctataaccgaggcgattcaacattcgagtccaagtcttacaaaatggctgacgaagctgggtctgaagccgaccacgaggggacacactctacgaaaagaggtcacgccaaatcccgccccgtcagggactgtgacgacgtgctgcagacccacccctccggaactcagtccggcatttttaatatcaagctgccgggaagctctaaaatattctccgtgtactgtgatcaagagacgtcactcggtggctggctgttgattcagcagagaatggatggaagcttgaatttcaatcgcacctggcaagattacaagcgggggtttggaagtctgaatgacgaaggtgaaggagagttctggcttggcaatgattacctgcatctgctgacacaaagagggagcgtcctccgcgtcgagctggaggactgggcaggaaacgaggcctatgccgagtaccactttcgggtcggcagtgaagcggagggatacgccctccaggtcagcagttatgaaggcactgccggcgacgcactgatcgagggcagtgttgaggagggggccgagtatacaagtcacaacaacatgcagttctccactttcgaccgagatgctgaccagtgggaagagaactgcgctgaggtctacggagggggatggtggtacaacaattgtcaagctgcgaatctgaatggaatctattatcccgggggttcttatgatccccgcaacaactctccctacgagatcgaaaacggggttgtctgggtaagttttaggggtgcagactactctctgcgcgccgtgcggatgaaaataagaccccttgttacccag

SEQ ID NO: 11131 - DNA, 2598 bp, synthetic construct; identical to SEQ ID NO: 11082
  misc_feature 1..2598: note = source = /note="Description of Artificial Sequence: Synthetic coding sequence"
  source 1..2598: mol_type = other DNA

SEQ ID NO: 11132 - DNA, 2598 bp, synthetic construct
  misc_feature 1..2598: note = source = /note="Description of Artificial Sequence: Synthetic coding sequence"
  source 1..2598: mol_type = other DNA
atgttctctatgcggatcgtgtgtctagtgctgagcgtcgtcggtactgcgtggaccgctgacagcggagagggcgactttctcgctgagggagggggtgtccgcggccccagagtcgttgagaggcaccagtctgcttgtaaagattccgactggccattttgctcagacgaggattggaactacaaatgccctagcggctgcaggatgaaaggtcttatcgacgaggtgaaccaggatttcaccaacaggatcaacaagcttaaaaacagtctgtttgagtatcagaagaacaataaagattcccactccttgactacaaatatcatggagatccttaggggagatttctcaagtgccaacaaccgcgacaatacatataacagggtgagcgaagacctgagatcacgcattgaggtcctcaagcgtaaagttatagagaaagtgcagcatatccagctgctgcaaaaaaacgttcgggctcaactggttgacatgaagaggttggaagtggacatcgacatcaaaatacggtcctgcagaggcagctgcagccgtgctcttgcgcgcgaagtggatttaaaagattacgaagaccagcagaaacaactagagcaggtcatcgcaaaagacctgctgccgtccagggacaggcaacatcttcctctcatcaagatgaagcccgtgccagatcttgtacctgggaacttcaaaagtcagctgcaaaaagtccctcctgagtggaaagctttgacagacatgccacagatgagaatggagctcgagaggcccggtgggaacgagattacccgcggagggagcacatcctatgggaccggaagcgaaaccgaatcaccaaggaacccgagtagcgctgggtcttggaactcaggaagcagcggaccaggctctaccggcaacaggaatcctggcagcagtggcaccggaggtaccgctacttggaagcccggatcatccggaccaggcagcactggtagttggaatagcggaagcagtgggactggatcaactgggaaccagaatccagggagccctagaccaggcagcacaggaacctggaatccagggtctagcgagcgaggctcagcaggccactggaccagtgagagttccgtctctggatctaccgggcagtggcacagcgaaagcgggtcattcaggccggattccccagggtcagggaacgctaggcccaataaccctgattggggcacattcgaagaagtaagtggcaacgtgtcccccgggactcgtcgcgagtaccacaccgagaaactggtgacttctaaaggggacaaagaacttagaactggaaaggaaaaagttaccagcggaagcaccaccaccactcgcaggagctgcagcaaaacggtgaccaagactgtgatagggcccgatggtcacaaagaggtgaccaaggaggtcgtgacaagcgaggatggtagcgactgcccagaagctatggatctgggaacacttagcggaatcggcaccctggatggctttcgtcatagacatccagacgaggctgcattctttgataccgccagcacaggcaaaacctttccgggattcttttcaccaatgctgggggagtttgtgagcgagactgagagcagaggctccgaatccggtatctttactaacaccaaggagagctcatcccaccaccctggcatcgccgaattcccctctagaggaaagagttcctcctattctaaacagttcacaagtagtacctcttataaccgcggggacagcaccttcgaaagtaagagctacaagatggcggatgaggctggatccgaggctgatcacgaaggcacacatagtaccaaaagaggccacgcgaagtccaggcccgtcagagactgcgatgacgtgctccaaacacatccgagcggcacccaatccggaatctttaacatcaagttacccggcagtagcaagatctttagtgtttactgtgatcaggaaacttcgttgggcgggtggctgttgatacagcaacgcatggatggctcattgaactttaacagaacatggcaagattacaaacggggctttggcagcctgaacgacgagggggaaggtgaattttggcttggaaacgattatcttcaccttctaacacagcgtggatcagttctccgagttgaattggaggactgggcaggcaacgaggcttacgccgagtatcactttcgtgttggctccgaagccgagggttacgctttgcaagtgtccagctacgagggaaccgctggcgatgcgttgatcgagggaagcgtcgaggaaggagctgagtacaccagtcataacaacatgcagttttccaccttcgatagagacgcagatcaatgggaggagaactgcgccgaggtatacggcggaggctggtggtacaataactgccaggcagcgaacctaaatggaatctactacccaggtggcagctacgaccccagaaacaacagcccctatgaaatcgaaaacggcgttgtgtgggtctctttcaggggagctgactattcattgagggccgtgcgtatgaaaattcgcccgcttgttacacag

SEQ ID NO: 11133 - DNA, 2598 bp, synthetic construct
  misc_feature 1..2598: note = source = /note="Description of Artificial Sequence: Synthetic coding sequence"
  source 1..2598: mol_type = other DNA
atgttcagcatgagaattgtctgtttggtgctgtcagtcgtggggacggcgtggaccgcggattccggtgaaggcgactttcttgcagagggaggaggagtcagagggcctcgggtggtggaaagacaccagtccgcatgcaaagatagcgattggcccttctgctcggatgaagattggaactacaaatgcccttctgggtgtcgtatgaaaggtctgattgacgaagttaaccaagactttaccaaccgcataaacaagctcaagaactcacttttcgaatatcaaaagaacaacaaagactcacactcactcaccacgaacattatggagattttgcggggagacttcagctccgctaacaatcgcgacaacacttacaatcgtgtgtcagaagatctgcgctcccggatcgaggtgctgaagcgcaaggtgattgaaaaagtccaacatatccagcttcttcagaagaatgtgcgggcccaactggtcgatatgaaacgccttgaagtcgatattgatatcaagatacgtagctgtagaggaagttgcagcagggccctggcgcgtgaggtcgatcttaaggattacgaggatcagcagaagcaacttgagcaagtgatcgcaaaagatctcctgccttctagggacagacagcatcttccacttatcaaaatgaagccggtgcccgatctcgtgcccggcaactttaagtcgcaactgcagaaggttccaccggagtggaaagcacttaccgatatgccacaaatgcggatggaacttgagaggccaggagggaacgaaatcacgaggggcggatcgacgtcatacggcaccgggtcagaaactgagtcgccccggaatccatcttcggcaggaagttggaattccggttcgagcggtcccggaagcactgggaaccgtaacccaggaagttcggggactggcggaactgcaacttggaagcctggcagttcgggccctggttccaccgggagctggaattccggatcttccggtacgggttccactggcaaccagaacccggggtcgccacgccctggatccacgggtacctggaatcctggtagcagcgaacgcggatcggcagggcattggacttcggaatcctccgtgtcagggtctaccgggcagtggcattccgaatccggatcctttagacctgattctcccggctccggcaacgcacgacccaataaccctgattgggggactttcgaggaagtgtcaggcaatgtttcccccggcactagacgggagtaccacaccgagaaactggtgacctccaagggtgacaaggagttgcggactggtaaggaaaaggtgacctcaggcagcaccactaccaccagacgatcgtgtagcaagactgtcactaagacggtgataggaccggatggacacaaggaggtcacgaaggaagtggtaacttcggaagatgggtcggattgtccagaagcgatggatctgggtacgctcagcggaattggaacccttgatgggtttcggcatagacaccctgatgaggctgccttttttgatactgcctctactggaaagacttttcctggatttttctcacccatgctcggagaatttgtgagcgaaaccgaatcccgcggatcggaatcgggtattttcactaatactaaggaaagctcatcccaccatcccgggattgcagaatttccgtcaaggggtaagagcagttcctactcgaaacaatttacctcttcgacctcttacaacagaggggactcgaccttcgagtcaaagtcatataagatggcagacgaggcaggcagcgaagcagatcatgaaggtacccatagcaccaagagagggcatgcgaagagcagaccagtgagggattgtgatgacgtgttgcagacccatccgtcggggacccagtcaggcattttcaatatcaaacttccaggatcgtccaagatcttttccgtctactgtgaccaagaaacctcattggggggttggttgctgattcagcaacgtatggatggatccctgaatttcaacaggacttggcaagactacaagcgcggctttggatcacttaacgacgaaggtgagggtgagttttggctggggaatgactaccttcatctgctgacgcagagaggttccgtcctgagggtggaactggaggactgggcaggtaacgaggcatacgcggagtatcatttccgtgtcggtagcgaggctgaggggtacgcacttcaagtgtcgtcgtacgaaggcactgctggagacgccctcatagaaggctccgtcgaggaaggtgccgaatacacctcccacaacaatatgcagttctcgacctttgacagagacgcagaccaatgggaagaaaactgtgccgaagtctacggcggtggttggtggtacaacaattgccaagccgcaaaccttaatggaatttactatccaggaggtagttacgacccaaggaacaactccccttacgagatcgaaaatggtgtggtgtgggtgtcctttcgcggagccgattactcgcttcgagcagtgcggatgaaaatcagaccacttgtgacccaa

SEQ ID NO: 11134 - DNA, 2598 bp, synthetic construct
  misc_feature 1..2598: note = source = /note="Description of Artificial Sequence: Synthetic coding sequence"
  source 1..2598: mol_type = other DNA
atgttttcaatgagaatcgtgtgcctcgtgctgtcagtggtgggaaccgcctggactgctgattcaggagagggagatttcctggcagaaggaggtggagtgcggggaccacgggtcgtggagaggcaccagtcagcctgcaaggactccgattggccgttttgctcggacgaggactggaactacaagtgtcctagcggatgccgcatgaagggtctgatcgacgaggtcaaccaggacttcacgaatagaattaacaagctgaaaaactctctcttcgaataccaaaagaataacaaggactcgcattcactgactactaacatcatggaaatcctcaggggagatttctccagcgccaataacagagacaacacttacaatagagtttcagaagatctccgctcccgcattgaagttctgaagcggaaggtcatcgagaaggtgcagcacatccagctgctgcagaagaacgttcgggcacaactggtggacatgaagcggctggaagtggacattgatatcaagattagatcctgccggggctcctgctcaagggctctggcccgggaagtggacttgaaggattacgaggatcagcaaaagcaactggagcaagtgattgccaaggacctcttgccaagccgggatcgccagcacctgccgctcatcaaaatgaaaccggtgccggacctggtgcctgggaacttcaagtcgcaactgcagaaggtgcccccagaatggaaggccctgaccgacatgccgcagatgcggatggaactggaacgccccggtggaaacgagatcactagagggggttcgacttcctacgggaccggatccgaaactgagagcccgcgcaacccctcaagcgctggaagctggaactccggatcctccggacctggatcgaccggaaacaggaaccctggatcttccggcaccgggggaaccgccacttggaagccgggtagctcaggcccgggaagcactggctcctggaacagcgggtccagcggtaccggatcgactggaaaccagaacccagggtcgccgcgcccggggagcactggaacctggaacccaggctcctcagagagggggtccgctggacattggacgtcagaaagctctgtctccgggtcgactgggcagtggcattcggaaagcggatctttccgcccggatagcccgggatcgggaaacgctcgccccaataatcccgattggggaacctttgaagaagtgtccgggaatgtcagcccaggaacgcgcagggaataccacacggaaaagttggtgaccagtaagggagacaaggaactccgcactgggaaggaaaaggtgaccagcggatccaccactactactcgccgctcatgttcaaagaccgtgacgaaaacggtgattggcccggacggacacaaggaggttaccaaggaagtcgtcacgtcagaggatgggtccgattgtccggaagctatggacctcggaaccctgagcgggatcggcactctggatggattccgccaccggcatcctgatgaagcagcgtttttcgacactgcttcgactggaaaaacctttccgggcttcttctcgccaatgctcggagaattcgtgtcagaaactgagtcgaggggatcggaatcgggaatctttacgaacacgaaggaatcatcctcgcaccacccgggaattgcagagtttccatcccggggtaaatcaagctcctactcgaaacagttcacttcgtctacgagctacaataggggagactccaccttcgagtccaaatcctacaagatggcagacgaggcgggatcggaggccgaccacgaaggaacccactcaacgaaaagagggcacgccaagagcagaccagtgcgagactgcgatgacgtcctccaaactcacccttccggcacccaatcagggatcttcaatatcaagctgccaggttcctcgaagattttctcggtgtactgcgaccaagaaaccagcctcggaggatggttgctgatccagcaacggatggatggctctctgaactttaatcggacttggcaggactacaaaagaggattcggctccctgaatgacgaaggcgagggcgaattttggctcggcaatgactacctccatttgctcacgcaacggggctcagtgttgagagtggaacttgaggactgggctggtaacgaagcatacgccgagtaccattttcgcgtgggaagcgaggccgagggatatgcactgcaagtgtcgtcgtacgaaggcactgcaggcgacgccctgatcgaaggatcagtcgaagagggagccgagtacaccagccacaacaacatgcagttcagcaccttcgacagggatgccgaccaatgggaagaaaattgcgcggaggtttacggcggcggatggtggtacaataactgccaggcagcgaatctcaacgggatctactaccctggcggtagctacgaccctcgcaacaactcgccctacgaaatcgaaaatggagtggtctgggtttcatttaggggagccgattactctttgcgcgccgtgcgcatgaagatcagacccctggtgacccag

SEQ ID NO: 11135 - DNA, 2598 bp, synthetic construct
  misc_feature 1..2598: note = source = /note="Description of Artificial Sequence: Synthetic coding sequence"
  source 1..2598: mol_type = other DNA
atgttctccatgcgaatagtatgtcttgttttgagcgtggttggcactgcatggaccgcggatagcggagaaggagatttcctggcagaagggggaggggtccgtggtcccagagtggtagaacgtcatcagagtgcgtgtaaagacagcgattggcccttttgttcggatgaagactggaattacaagtgcccatctggctgcaggatgaagggcctcatcgacgaggtcaatcaagacttcaccaaccgcataaacaagttgaaaaattccctgttcgaataccagaagaacaacaaggattcgcactccctgacaacgaacataatggagatactgagaggagacttctcttctgcaaacaaccgcgataacacatataaccgggtgagtgaagacctaaggagtaggatcgaagtcttgaagcggaaagtcatcgagaaggttcagcacatccagctactacagaagaatgtccgcgcccaactggtggatatgaaaaggctcgaggtggacatcgacatcaaaatccggtcgtgcaggggaagctgctcacgcgccttggccagggaggttgacctcaaagattatgaggaccaacaaaaacagttggaacaggtcatcgctaaggaccttctcccttcccgagacagacagcacctcccactaataaaaatgaagcccgtcccagacttggtgccaggcaactttaagtctcagttgcagaaggtgccacccgagtggaaggctttgacagatatgccgcagatgaggatggagttagaaagacccggtgggaacgagatcacaaggggggggagcacttcttatggaaccgggtccgagacagagtcgcctcgaaacccatcatctgccggatcttggaatagcgggagtagcggccctgggtccactggcaataggaatccagggtcttcaggcaccggaggaactgccacctggaagcccggcagcagtggtcccggatcaaccgggtcatggaactccggcagtagcggcacgggttctacaggtaaccagaatccagggagcccacgacccggttccactggcacatggaacccgggatcaagcgagagggggagcgccggccattggaccagtgagagcagcgtgtctgggtctactggccagtggcacagcgagtccggatcattcagaccagatagccccggttccggaaatgcacgacccaacaaccctgattgggggactttcgaggaagtgtccgggaacgtgtctcctgggacccggcgggaatatcacaccgagaagctcgtgacaagcaaaggagacaaggagttacgaaccggcaaagagaaggtgacatcgggatccacgactacaactcgtagaagttgctccaaaactgtgaccaaaaccgtcattggtcctgacggacacaaggaggtgacaaaagaggtggtcacttccgaggacgggtcagactgccccgaggcaatggatttaggaaccctgtcaggcatcgggactctggacggctttcgtcatagacatccagatgaggcagcgtttttcgacactgccagcacaggcaagaccttccccggttttttctcacctatgttgggggagtttgtcagtgaaaccgagagcaggggaagcgaatctggaattttcaccaatactaaggaatcctctagccatcaccctgggattgcggaatttccctctcgggggaagagttcctcttactcaaagcagttcacgtcgtcaacctcttacaaccgcggagattcgacgtttgaaagtaagtcatacaagatggctgacgaggccggtagtgaggctgatcacgaggggactcactcgaccaaacgggggcatgccaaaagtcggcccgtgcgggattgcgacgacgtgttacagactcatccatctgggacccaatccgggatcttcaatatcaaacttcctggatcttctaaaattttttctgtttactgtgaccaggagacaagcctgggggggtggctcctcatccagcagcggatggacggtagcttgaacttcaatcgcacatggcaggattacaagcggggctttggatccctgaatgatgaaggcgagggtgaattttggctgggcaacgattatctgcatctgctgacgcagagaggtagtgtgttacgggtggagctcgaggattgggcagggaacgaagcatacgctgagtaccactttcgggtaggcagcgaggccgaaggctatgccctgcaagtgagctcgtatgaagggactgctggggatgctcttatcgaaggaagcgtggaggaaggagctgagtatacttcccataacaatatgcagttttcaaccttcgacagagatgcagaccaatgggaggagaactgtgccgaagtgtacggcggaggttggtggtacaacaactgtcaggctgccaacctgaacgggatttactacccaggaggaagctatgacccaaggaacaattccccgtacgaaatcgaaaacggtgtagtttgggtaagcttcagaggcgctgactattcacttcgagcagtcaggatgaagattcgccctttggtcactcag

SEQ ID NO: 11136 - DNA, 2598 bp, synthetic construct
  misc_feature 1..2598: note = source = /note="Description of Artificial Sequence: Synthetic coding sequence"
  source 1..2598: mol_type = other DNA
atgtttagcatgcgcattgtttgtttggtgctgtctgtggttggtaccgcttggactgccgatagcggggagggtgattttcttgctgaaggtggtggggttcgaggaccgcgggtggttgagcgccatcaatcagcctgtaaggacagcgactggccattctgttccgacgaggattggaactataagtgcccgtctgggtgtcgtatgaaagggctgatcgacgaggttaatcaggattttaccaatcggattaataagctcaaaaatagcctgttcgagtatcagaaaaacaacaaggactcgcacagcctgaccactaatattatggaaatcctgcgcggggatttcagcagcgccaacaatcgggataatacttacaatcgggttagcgaagaccttagatcacgtatcgaagttttgaaacgcaaagtaatcgaaaaggtacaacacatacagttgctgcaaaaaaatgtccgcgcccaattggtcgatatgaaacgccttgaggtggatatcgatatcaaaatacgcagttgcagaggtagttgctcccgcgcactggcccgcgaagtggacctgaaagactatgaggatcagcaaaagcaactggagcaggtgattgccaaagatctgctgccgtcacgcgaccgccaacatctgccgctaatcaagatgaagccggttcctgatctggtaccgggtaatttcaagtctcagctgcagaaagtgcctccagagtggaaggcactgacggatatgccccagatgcgcatggagctggaaaggcctggaggtaatgagatcactcgcggcggctcgaccagctacggtacaggatccgaaaccgagtcccctcgcaatccaagttctgcggggtcctggaatagcggctcctctggtcctggttctaccggaaacagaaatcctggtagcagcggcacgggcgggaccgcgacctggaaacctggctcatctggtccgggatccacaggcagctggaactccggatctagcggcaccgggagcaccggtaaccagaaccccggcagccctcgccccggtagcaccggtacttggaacccgggcagctctgaacgaggcagcgcgggccattggacctccgagagttcagttagcggtagcactggtcagtggcacagcgagtccggctcctttcgtccagattctccgggctcaggtaacgcccgccctaataatccagattggggcaccttcgaggaggtgtcgggtaacgtttctccgggaactcgccgagaataccacacagagaaactggttactagcaagggtgacaaggagctgcgcaccggaaaggaaaaagtcaccagtggtagcaccacaacaactcgccgcagctgtagtaagacggtcaccaagacggtcatcggtccggacggccataaggaggtaaccaaggaggttgttaccagcgaagacggcagcgattgtccagaagcaatggacctgggcactttgtccggcataggcaccttggatggtttcagacatcgccacccggacgaagccgcgttctttgacaccgcaagtaccggtaaaacgttcccaggcttcttttctccaatgctgggtgagtttgtgtccgagacagagtcccgaggatccgaatcgggtatctttacgaacactaaggagagttcatctcatcaccctggcattgcagagttcccaagccgcggtaagtcctctagctattccaagcagttcacgagcagtacatcttacaacaggggtgactctacgttcgagtctaagtcctacaaaatggcggacgaggctggtagcgaggccgaccatgagggaacccactcaacgaagagaggtcatgccaaaagccgtccagtccgcgactgcgatgacgttctgcagactcatccatcaggaactcagagcgggatattcaatatcaaacttcctggcagcagcaagattttttcggtctattgtgatcaggagacgtcactgggtggttggcttcttatccagcagcgtatggatggctctctgaacttcaaccggacctggcaagattataagcgcggcttcggcagcctgaacgacgagggggagggtgagttctggctcggcaacgactacttgcatctgctcactcaaaggggctccgttctgcgtgtggaactggaggattgggcaggtaatgaagcctatgcggaataccactttcgtgtcggtagcgaggccgagggctatgcgctgcaggtctcgagctacgagggtactgcaggcgatgcactgatcgagggttctgtagaagagggggcagagtataccagccacaataatatgcagttttctaccttcgaccgagatgccgaccaatgggaggaaaattgcgcggaagtgtacggtggaggctggtggtacaataactgtcaagctgcaaatctgaatggtatctattatccaggaggctcatatgatccacgcaacaactctccgtacgagatcgagaacggtgtggtgtgggtctccttccgcggcgccgattattctctgcgcgcggtgcgcatgaagattcgaccactggttacgcag

SEQ ID NO: 11137 - DNA, 2598 bp, synthetic construct
  misc_feature 1..2598: note = source = /note="Description of Artificial Sequence: Synthetic coding sequence"
  source 1..2598: mol_type = other DNA
atgtttagcatgcgaattgtctgcctcgtgctctcggtggtgggcactgcctggactgctgattcgggtgaaggagatttcctggccgaaggcggcggcgtgcgcggtccgcgcgtggtggaacgccaccagtcggcctgcaaagacagcgactggccgttttgctccgacgaagattggaattacaagtgcccatccggatgcagaatgaagggcctgatcgatgaggtcaaccaggacttcacgaatcgcatcaacaaactcaaaaactcacttttcgaataccaaaagaataacaaagacagccattcgctgaccaccaacatcatggaaatcctgcgcggcgacttctcctccgcaaacaatcgggataatacttacaaccgggtgtcggaagatctgcggtcccggatcgaggtcctcaagcgcaaggtcattgaaaaggtgcagcacatccagctcctccagaagaatgttcgcgcgcagctggtggatatgaagagactggaggtggatattgatatcaagattagatcctgccgcgggagctgctcccgcgcgctggcacgagaagtggatctgaaggactacgaagatcagcagaagcaactcgagcaggtcatcgctaaggacctgctgccgtcccgcgatcggcagcacctcccactgatcaagatgaagcccgtgccggatctggtgccgggaaatttcaagtcccaactccagaaggttcctcctgagtggaaggccctcaccgatatgccgcagatgcggatggagctggaacgcccgggaggaaatgaaatcacgcgcggaggctcaaccagctacggaactggaagcgagacggagtcgccgcgaaatccctcctcggcagggtcgtggaactcgggaagctcaggacctggaagtaccgggaacaggaatccgggctcctccggaactggcgggaccgcgacttggaagcctggatcgtcggggccaggttcaaccggttcatggaactcaggttcgtcgggcactggcagcactggtaaccaaaatccaggatcgcccagacctggatcgactggaacctggaatccggggagctcggaaaggggatccgccggtcattggacttcggagtcgtccgtgtcgggcagcaccggacagtggcattccgaatcgggatcgttcagaccggattcacccggatctggcaacgcgcggcccaacaacccggactggggcacttttgaagaggtgtcggggaacgtgtcgccgggtaccaggagagagtaccacaccgaaaagctggtgacctcaaagggagacaaagaactgcgcaccggaaaggagaaggtgacctccggttcgactactaccacccgcagaagctgctcaaagacggttactaagactgtgataggtccggacggacacaaggaagtcactaaagaggtcgtgacgagcgaggacgggtcggactgcccggaagcgatggacctcggcaccctctcgggaattggcactcttgacgggttcaggcatcgccacccagacgaagcggcctttttcgatactgcatcgactggcaagactttcccgggattcttttccccaatgctcggagaatttgtgtcggaaactgaatctcgcgggtcggaatcgggaatcttcacgaatactaaggagagctcatctcaccaccctgggatcgctgagttcccatccaggggaaaatcctcgtcttactccaagcaattcacttcatctacctcctacaacagaggcgactccaccttcgaatcgaagagctacaagatggccgacgaagccggttcagaagccgatcatgaaggcacccacagcaccaaaagagggcatgcaaaatcccggccagtgcgggattgcgacgatgtgctccagactcacccatcagggacccagtcgggtatctttaacatcaagctgcctggaagctcaaagatcttctccgtgtactgtgaccaggaaacctcactgggaggttggctgctcatccagcaaagaatggacggatcactgaatttcaaccggacctggcaggactacaagcgcggattcggtagcttgaatgacgagggcgaaggggagttctggctgggcaatgattacctgcacctccttacgcagaggggttccgtgctgcgcgtggaactcgaagattgggcaggaaacgaggcttacgccgagtaccacttccgggtgggatcggaagctgagggatacgcgctccaggtgagcagctacgaaggaacggcgggggatgcactcatcgaggggtcagtcgaggagggagccgaatatacctcacacaacaatatgcaattctcaaccttcgaccgcgatgccgaccagtgggaggaaaactgtgcagaagtgtacgggggaggctggtggtacaataactgccaagcggccaatctcaatggaatctactacccaggcggatcctacgatccgaggaataactcaccctatgaaatcgaaaacggcgtggtgtgggtcagcttccgcggagcagactactcgctccgcgcggtgcgcatgaagatccggccgctggtgacccag

SEQ ID NO: 11138 - DNA, 2598 bp, synthetic construct
  misc_feature 1..2598: note = source = /note="Description of Artificial Sequence: Synthetic coding sequence"
  source 1..2598: mol_type = other DNA
atgttctcaatgagaatagtttgtcttgttcttagtgttgtcggaaccgcatggacagcagattctggagaaggagattttttagctgaaggtggaggagttagaggtccaagagttgttgaacgtcatcaatctgcttgtaaggatagtgattggccattttgttctgatgaagattggaattataaatgtccatctggttgtagaatgaaaggtttaattgatgaagttaatcaagatttcactaatagaataaataaattaaaaaattcattgttcgaatatcaaaagaataataaagattcccattccttaacgactaatataatggaaattttaagaggagatttttcatcagctaataatagagacaatacttataatcgagtttcagaagatttaagatctaggattgaagttcttaagagaaaagttattgaaaaagttcaacatattcaattattacaaaaaaacgttagagcacaacttgttgatatgaaaagacttgaagtagatattgacattaaaattaggtcatgtcgaggttcttgtagtagagcattagcaagagaagttgatttaaaagattatgaagatcaacaaaaacaacttgaacaagttatcgccaaagatttattaccatcaagagatagacaacatttaccattaataaagatgaaaccagtacctgatttagtaccaggaaattttaagagtcaactacaaaaagtacctccagaatggaaagcattaactgatatgccacaaatgagaatggaacttgaaagaccaggaggaaatgaaattacaagagggggatcaacttcatatggaacaggatctgaaacagaatcaccaagaaatccatcatcagcaggaagttggaactcaggaagtagtggtccaggaagtactggaaatagaaacccaggaagttcaggtactggtggaactgctacctggaaaccaggttcttcaggaccaggatctacaggttcttggaatagtggaagttcaggaacaggttctactgggaatcagaatccaggttcaccaagacctggaagtacaggaacatggaatccaggatcttcagaaaggggatcagctggacattggacaagtgaatctagtgtatctggttctacaggtcaatggcatagtgaatctggtagttttcgtcctgattcaccaggatcaggaaatgctagacctaataatccagattggggaacatttgaagaagttagtggtaatgttagtccaggaacaagaagggaatatcatacagaaaaacttgtaacttcaaagggagacaaagaacttcgaacaggaaaagaaaaagtaaccagtggatctacaactacaacaagaagaagttgttcaaaaacggtaactaaaacagttattggtccagatggacataaggaagttacaaaagaagttgttacttcagaagatggatctgattgtccagaagctatggatttaggtacactaagtggaattggtacattagatggatttagacatagacatccagatgaagcagcatttttcgatacagccagtactggtaagacttttccaggttttttttcgccaatgttaggagaatttgtttcagaaacagaaagtagaggatcagaatcaggaattttcactaatactaaggaatcttcatcccatcacccaggaattgccgaatttccatcaagagggaaatcatcttcatattcaaagcaatttactagttcaacttcatataataggggggattcaacatttgaatcaaagtcatataagatggcagatgaagcaggttctgaagctgatcatgaaggaacacattctactaaaagaggacatgcaaagtcaagaccagttagagattgtgatgatgttttacaaacacatccatctggaactcaatctggtattttcaatattaaacttcctggttcaagtaaaatattttcagtatattgcgatcaagaaacttctttaggaggttggcttttgattcaacagcgaatggatggttcacttaattttaatagaacttggcaagattataaaagaggttttggatcattaaatgacgaaggagaaggtgaattctggcttggaaatgattatttacatcttcttacacaacgaggatctgtgcttagagtagaattagaggattgggctgggaatgaagcatatgcagaatatcatttcagagtaggatctgaagctgaaggatatgctttacaagtaagttcttatgaaggaaccgctggagatgcattaatagaagggagtgttgaagaaggagctgaatatacatctcataacaatatgcaattttctacttttgatagagatgcagatcagtgggaagaaaattgtgctgaagtatatggaggtggatggtggtataataattgccaagcagctaatttaaatggaatttattatcctggtggaagttatgatccacgtaataattcaccttatgaaattgaaaacggtgttgtttgggtttcttttcgaggtgctgattattcattaagagctgtacgtatgaagattagacctctagttacacaa

SEQ ID NO: 11139 - DNA, 2598 bp, synthetic construct
  misc_feature 1..2598: note = source = /note="Description of Artificial Sequence: Synthetic coding sequence"
  source 1..2598: mol_type = other DNA
atgttctccatgaggatcgtgtgcttggtgttgagcgtcgtaggcaccgcctggaccgctgacagcggtgagggcgatttcctggctgaaggtggtggtgtgaggggtcccagggtggtggaaagacatcagagcgcttgcaaagattccgactggcctttttgttctgatgaggattggaattacaaatgccccagtggctgcagaatgaagggactgatcgacgaggtcaaccaggattttactaacagaatcaataaactgaagaactcactcttcgagtatcagaagaataataaggactctcactccttgaccactaacatcatggagattctccgcggtgatttctcctcagcaaataatcgtgacaacacatataatcgtgtttcagaggacctccgttctaggatcgaagtgctcaaacgcaaggtcatcgagaaggtgcaacacattcagttgctgcagaagaacgtgcgtgcacaattggtggacatgaagaggttggaagtcgatattgacattaagatacgtagttgccgcggttcatgctctcgtgcactcgctcgtgaggtcgacctcaaggattatgaggatcaacagaaacaactcgagcaggtgatcgctaaagaccttctccctagcagggaccgccagcacttgccactgataaagatgaagccagtgcctgatctggtacctggtaattttaaatctcaactgcagaaagtgccccctgagtggaaggccttgactgacatgccacaaatgaggatggaactcgagcgccctggcggcaatgagatcactaggggtggaagtacttcctacggtacaggatctgagaccgagtctcccaggaacccttcaagtgctggatcatggaattccggctccagcggcccaggcagtactggaaatagaaacccaggctccagtggcactggcggcaccgccacttggaagcccggttcttctggtcccggttcaaccggctcctggaactcaggaagttctggtaccggttccacaggaaatcagaaccctggctccccacgtccaggatcaaccggaacttggaaccccggttctagcgagcgcggttctgcaggtcactggacttccgagagcagtgtgagcggatccacaggtcaatggcactcagagagcggttctttccgccctgatagccctggtagtggaaacgcccgtccaaataaccccgactggggcacattcgaggaggtcagcggaaacgtctcccctggaactaggcgtgagtaccatacagaaaaactggtgacatctaagggtgacaaggagttgaggacaggtaaggagaaggttacttccggttctaccactacaaccagaaggtcttgttctaagacagtgactaaaaccgtgattggcccagatggacacaaggaggtcactaaggaggtagtcacatctgaggatggatcagattgtcccgaagccatggacctgggcaccctgagtggcatcggtaccctggacggatttagacaccgccatccagacgaagccgcattcttcgacactgcaagcacaggtaaaacttttcccggtttttttagcccaatgctgggagagtttgtgtctgaaaccgagagtaggggcagcgagtctggcatttttacaaacactaaagaaagttcctcccaccacccaggaatcgctgagtttccatcaagaggcaagagttcttcatattcaaagcagttcacatcctctacaagttacaataggggtgacagcacatttgaatcaaagtcttataaaatggctgatgaagctggtagtgaagctgaccacgaaggaacacacagcaccaagcgtggacatgccaagtctagacctgtcagagattgtgacgacgttcttcaaacccatccctccggaacccagagcggaatctttaatatcaagctgccaggaagctccaaaatattctctgtgtattgcgatcaagagacttctttgggcggatggctcctgattcagcagcgtatggacggaagtctcaatttcaacagaacctggcaagattataaaaggggatttggcagccttaacgacgagggcgagggcgagttctggcttggtaatgattatctgcatctgctcactcagcgcggcagcgttctcagagtggagttggaagattgggctggtaacgaggcttacgccgaatatcatttccgtgtgggctctgaggctgaaggctacgcattgcaagtcagttcttacgagggcaccgccggtgacgccctgatcgaaggttccgtagaggagggtgctgagtatacaagccacaataatatgcagtttagcacttttgaccgcgacgctgatcaatgggaagaaaactgcgctgaggtgtacggaggtggctggtggtataacaactgccaggctgccaatctgaacggtatctactatcctggtggctcttacgaccccaggaataacagcccctatgaaattgaaaatggcgtggtgtgggtcagctttaggggagcagactacagtctgagggccgtcagaatgaaaattcgcccactggtgactcag

SEQ ID NO: 11140 - DNA, 2598 bp, synthetic construct
  misc_feature 1..2598: note = source = /note="Description of Artificial Sequence: Synthetic coding sequence"
  source 1..2598: mol_type = other DNA
atgtttagtatgcgcatcgtgtgcctagtgttgtcagtcgtgggcaccgcctggacagctgactctggtgagggcgactttctggctgagggcgggggtgtgcgtgggccgcgggtggtggaacgtcatcaaagtgcctgtaaggacagcgattggccattctgctcagacgaggactggaactacaagtgtccaagcggatgccgcatgaagggactgatcgacgaagttaatcaggactttactaaccgtattaacaaacttaagaattctctgttcgaatatcagaagaataacaaggactcacattccctgaccacaaacatcatggagatccttcgaggtgacttcagctccgccaataaccgagacaacacctacaatagggtgtccgaagacctccgatctagaatcgaggtgctcaagcgcaaggtgatcgagaaagtacaacatatccagctcttgcagaagaatgtgagggcccagttagtagatatgaaaagattggaggtagatattgacatcaagatacgatcttgccggggatcttgtagtagggcgctggcccgtgaggtggatttgaaagattatgaagatcagcagaaacaactagaacaggtcattgccaaagatttattgccatcgagagataggcagcacctgcccctcataaagatgaagcccgtgcccgacctcgtaccaggcaatttcaaatcccagctacaaaaggtgcctcccgaatggaaggcgctcacagacatgccacagatgcgcatggagctggagcgtcccggaggaaacgaaatcacccgaggagggtcaacatcttacggtactggctcagaaaccgaaagtcccagaaatccgagctctgccggtagctggaactcaggctcctcagggcctggttctacaggtaacaggaatcctgggtcgagcggcactggggggaccgccacctggaaacccgggtcttctggcccaggaagtacaggttcatggaacagtggatcgtctgggacagggagcaccggcaatcagaatccggggagtcccagacctggaagcacagggacatggaacccaggctcatctgagaggggaagtgccgggcactggacatccgaatcctctgtctcagggagcactggccagtggcattcagagtctggctcttttcgccccgattcccctgggtccggtaatgctcgacctaacaatccggactgggggacgttcgaagaggtttctggaaatgtgagccccggcactaggcgcgaatatcatactgagaagctcgtgacgagcaagggggacaaagagcttcggacagggaaagagaaagtcacgtcaggcagcactacaacgactaggcgatcgtgttctaagactgtcacaaagactgttatcgggcctgatggacataaagaggtcacaaaggaggtggtgacatccgaggacggctcggattgtcccgaagccatggatttgggcacactgtcagggatagggaccctggacggatttagacataggcatccagacgaggcggcctttttcgatactgcctcaactggcaaaacgtttccgggcttcttctctcccatgctgggagaattcgtttccgagactgaaagcagaggtagtgagtcaggtattttcaccaatactaaagaatcttcctctcaccatccggggattgctgagtttccatcccgcgggaagtccagctcctacagcaagcagttcacatctagtacgtcgtacaaccgaggcgatagtacctttgagagtaagagttataagatggcggacgaagcagggagcgaagccgaccacgaaggtactcactcaaccaaaagagggcatgcaaagtcccggccagtgagagactgcgatgacgtgctccaaacacacccttccggaactcagtccgggatctttaacataaaactccccggatcgtctaaaattttcagcgtttattgtgatcaggagactagcctcgggggatggctcctgatacaacagagaatggacggctccctgaattttaaccggacctggcaggactacaagagaggttttggaagcctgaacgacgagggggagggtgaattttggttgggcaacgactatctacacctactcactcagcgcggcagcgtcctgcgggtcgagctcgaagactgggccggaaatgaggcctacgcagagtaccactttcgcgttggttccgaggccgaggggtacgcactgcaggtttctagttatgagggcaccgctggcgacgcacttattgagggaagcgtagaagagggagccgagtatacatctcacaacaatatgcagttttccacattcgaccgggacgcagatcagtgggaggagaactgtgcagaggtgtatgggggcgggtggtggtataacaactgtcaagccgcaaatctaaacggcatttactacccaggagggtcatacgacccgcgcaacaattccccctatgagattgagaacggcgtggtctgggtttctttccgcggagccgactattccctgagggccgtaaggatgaagataaggcctcttgttacacag

SEQ ID NO: 11141 - DNA, 2598 bp, synthetic construct
  misc_feature 1..2598: note = source = /note="Description of Artificial Sequence: Synthetic coding sequence"
  source 1..2598: mol_type = other DNA
atgttctcgatgcgcatcgtgtgcttggtcttatccgtggtcgggaccgcatggacagctgactccggtgagggcgatttcctcgctgagggtggcggcgtgaggggccctcgcgtcgttgaacgtcatcagtccgcatgtaaggattcggattggccattctgttcggatgaggactggaactataagtgcccctctggctgcagaatgaaagggttgatagacgaagtcaatcaggacttcacaaatcggattaacaaactgaagaactctttgttcgaatatcagaagaataataaggactctcatagtctcactaccaatatcatggagatcctaagaggggacttcagctccgctaacaatcgcgacaatacgtataaccgcgtcagtgaagacctgagaagtcgtatagaggtcctgaagcgaaaagtcatagagaaagtgcaacacattcaactgctccagaagaatgttagagcgcaactggttgatatgaaaagacttgaagttgatatagacatcaaaatcagatcttgtcgtggctcgtgcagtagagccttggctcgtgaagtcgatctcaaggactacgaagaccagcaaaagcaattggagcaggtcatagctaaagatctgttaccgagtcgagaccgacaacatctacctttgataaagatgaagccggttcctgatctcgtgccgggaaattttaagagccaacttcaaaaggtcccaccagagtggaaggccttgaccgatatgcctcagatgcgaatggaacttgagcggccaggaggtaatgaaattactcgtggtggctctacctcgtacggcaccggttcagagacggagtcacctcggaaccccagcagtgccggtagctggaactcgggttctagtggcccaggcagcacgggaaaccggaaccctggttccagtggtacgggaggcaccgcaacttggaagcctgggtcttccggacccggttctactgggtcctggaatagtggctcttcaggaaccgggtccacggggaatcagaatccggggtctccacgccctggatccacggggacatggaatccgggttcgtctgagagaggtagtgcgggtcattggacgtcagagagcagcgtatcggggtctactggccagtggcatagcgagtctggcagtttccgtcctgattctccgggaagcggcaatgcccggcccaacaatccagattggggaacttttgaggaagtctcgggcaacgtaagtccgggcacacgtcgtgaatatcatacagagaaacttgtgacatctaaaggtgataaagagcttcggaccggtaaggagaaggttacgtccggctcaacaacgacgactaggcgctcgtgttcgaagacagttacgaagaccgtcataggccccgatgggcataaggaggtaacaaaggaggtggttacgtccgaggatggcagcgactgcccagaggcgatggaccttggcacgctgtcaggaattgggaccctggatggctttcgtcaccgacacccggatgaagcagcatttttcgataccgcttcaacaggcaagaccttccccggtttctttagcccgatgctaggggagttcgtatcggagacagagtcgcgagggtcggagtccggaatcttcacgaacacgaaagagtcttcatcacatcaccccggcattgcagagtttccctctaggggaaagagcagtagttactctaagcaattcacgagctcaacttcttataacaggggagacagcacgttcgaaagcaagagttacaagatggccgatgaggcaggaagcgaggcagatcatgaaggcactcactctacgaagcgcggtcatgcgaagtcacgaccggttcgcgactgtgatgacgtattgcagacccacccaagcggcacacaaagtggaatctttaacattaagcttccggggtcttctaaaatcttttcagtctattgtgatcaggagacttccctcggcggatggcttttaatacagcaacgtatggatggctcccttaattttaatcggacatggcaggactataagcgtgggtttggctctttgaatgatgaaggtgaaggtgaattttggctggggaacgattatctacatctgcttacccaacgtggatcggttttgagagtggagcttgaggactgggctggtaatgaagcatacgctgagtaccactttcgtgtcggctctgaagcagagggctatgcgctgcaggtctcgtcttatgaaggaactgctggggacgcgcttatcgagggctctgtcgaggagggagcagagtacacttcccataacaacatgcaattttccacattcgatcgcgatgctgaccaatgggaggaaaactgcgcggaagtctacggcggcggatggtggtataacaattgccaagccgccaaccttaacggaatctactaccctggcggttcctatgatccaagaaataattcgccctacgagatagagaacggggtagtttgggtctctttccgtggagccgattactcactgcgtgcggtgcgaatgaaaatacgaccactcgttacccaa

SEQ ID NO: 11142 - DNA, 2598 bp, synthetic construct
  misc_feature 1..2598: note = source = /note="Description of Artificial Sequence: Synthetic coding sequence"
  source 1..2598: mol_type = other DNA
atgttttcgatgaggattgtctgcttggtcctttcggtcgtgggtactgcatggaccgccgactctggcgagggtgacttcctcgccgagggaggcggggtgcggggtcccagggtggtggaacgccatcagagtgcatgcaaggactctgattggccattctgttcggacgaagactggaattacaagtgcccgtccggctgtcgcatgaagggacttatcgatgaggtgaaccaagattttaccaaccgaattaacaagctaaagaactcacttttcgaatatcagaaaaataataaggatagtcactccttaaccaccaacattatggaaatcttaagaggcgattttagttccgccaataaccgcgataatacctataatagagtgagcgaagacctcaggtctcggatcgaagtgttgaagaggaaggtgatcgagaaggtccagcacatacagctgctgcaaaaaaacgtgcgagctcaactggtcgacatgaagcgcctggaagtagatattgatatcaagattaggtcttgccgcggctcgtgctccagagccctggctcgggaggtggacctgaaggattacgaagatcaacaaaagcagctcgaacaggttatcgccaaggatctgcttccatctagagatcgccagcatctgcctttaattaagatgaagccagtgccagacctggttccaggaaatttcaagtcccagttgcagaaagttcccccagaatggaaggccctcactgatatgccgcagatgcggatggaactcgaaagacctggaggcaacgagattacaaggggtggcagtaccagctatggcaccggatctgaaacagaatcccctcggaaccccagtagtgcaggaagctggaacagcgggagttccggaccgggttccacagggaacagaaatcccggctcttccggcaccgggggcacagccacatggaagcccggatcctctggtccgggttctactggtagttggaacagcggctcatcaggaaccgggtcaaccggtaatcagaatcccggcagcccacgacctggctccactggcacgtggaatccaggttcatctgagcggggaagtgcagggcactggactagcgagagttccgtaagcggctcaactggacagtggcacagcgagtcaggctcattcaggcctgacagtccgggctcaggtaacgctcgcccgaacaaccctgactggggcacatttgaggaggttagcgggaatgtttcaccggggacgcgcagagaataccatactgaaaaactggtgacttctaagggggataaggagctgcgcacaggcaaagaaaaggtaactagtggctcaactactaccacacgtcgatcttgttcaaagacagtgacgaaaaccgtgataggtcccgacggtcacaaggaggtcacaaaggaggtagttacaagcgaagatgggtcagattgccccgaggctatggaccttggaacactttcaggcatcggtacgctcgacgggtttaggcatagacatccagatgaggctgcttttttcgacactgcctctactggcaagaccttcccaggcttctttagtcccatgctgggggagtttgtgagtgagaccgaatcaaggggcagcgagagtggaatcttcactaacactaaggagtcctctagccaccaccctggcatcgccgaattcccctccaggggaaagagttcgtcatattccaagcagttcacgtcaagtacatcatacaaccgcggagattccactttcgaatcaaagtcctataaaatggccgatgaggccgggtctgaggccgatcacgaagggacacattcaaccaaaagaggtcacgccaaaagtcgtcctgtgagagactgcgatgacgtgctccagacacatcctagcgggacacagagtggcattttcaatattaagcttccagggtctagtaagatattttccgtctactgcgaccaggagacaagccttggtgggtggctcctaatccaacagaggatggacggaagtctaaacttcaataggacttggcaggactacaagcggggctttggcagcctcaatgacgaaggggaaggagagttctggctgggcaacgactatctccacctgctgactcagcgcgggtcagtgttgcgcgtggagttggaggactgggcgggaaatgaagcctacgcggagtatcatttccgtgtcggcagtgaggcagaggggtatgctttgcaggtaagtagttatgagggaaccgctggtgatgcgctcattgagggatccgtggaagagggcgcggaatacacaagccacaataatatgcagtttagcacgttcgacagagatgcagaccagtgggaagagaattgcgctgaagtgtatggaggcggatggtggtacaacaactgccaggctgccaacctgaacggaatctattaccccggaggctcatatgacccgaggaataactctccgtatgagatcgagaacggcgtggtgtgggtttccttcagaggagcagattactcccttcgcgctgtgcgaatgaagatccgcccactggtcacacag

SEQ ID NO: 11143 - DNA, 2598 bp, synthetic construct
  misc_feature 1..2598: note = source = /note="Description of Artificial Sequence: Synthetic coding sequence"
  source 1..2598: mol_type = other DNA
atgttctcaatgaggatagtttgcttggtcctcagcgtggtgggtactgcctggacagctgacagcggagaaggagattttctggctgaaggcggtggtgtgcggggcccgagagtcgtcgaacggcaccaatctgcctgcaaggattctgattggcctttttgttcagatgaagactggaattacaaatgcccaagtggatgcagaatgaagggcctgatcgacgaagtgaatcaggacttcactaatcgaatcaataagctgaagaatagtttatttgaataccagaaaaacaacaaagatagccactccctgaccaccaacataatggaaatccttaggggcgacttttccagtgccaacaatcgtgataacacctacaaccgcgtgagcgaagatctgagaagccggatagaagtgctgaagcggaaagtaatagagaaagtgcagcatatccagctcctacagaagaacgtgagagcgcagttagtcgatatgaagaggctcgaggtggacatcgacattaagattcggtcttgtcggggcagttgcagccgggctctcgcaagagaagttgatctgaaggattacgaagaccagcagaaacaactggagcaggtcatcgccaaggacctcctgccctcaagggataggcagcatcttcctctgatcaaaatgaagcctgtcccagatctggttccaggaaatttcaaatcacagttgcagaaggtaccacccgaatggaaagctctcactgatatgcctcagatgaggatggagctcgaacgccccggaggcaacgagatcacccgcggcggatccacctcatacgggacaggtagcgagactgagagccctcgcaacccttcatcagctggcagctggaacagcggatccagcggccctggctcaaccggcaaccgaaaccccggtagtagtggcacagggggaacagcaacttggaaacctgggagctcaggccctggctccacaggctcctggaacagcggatccagcggcaccgggagcaccggaaaccagaacccaggcagtcccaggccaggctccaccgggacctggaaccctggcagtagcgagaggggcagcgcaggccattggacatcggaatcgtccgtcagtggcagcactggacaatggcacagcgagagcggcagctttcgacctgactctccaggatctggtaacgcacgccctaacaaccctgattggggtacctttgaggaagtctccggcaatgtctctcccgggacaagaagagaataccacactgagaagttagtcactagcaaaggggacaaagagctccgcacaggaaaggaaaaagtcacctcaggttccacaaccaccacccggcggagctgttctaaaacagtgaccaaaaccgtcatcgggcctgatggccacaaagaagtgaccaaggaagtggtgacttctgaagatggttcggattgcccagaggctatggatctgggcacactcagcggcatcggaactctggatggcttccgtcacagacatccggatgaggccgccttcttcgacaccgcatctaccggaaagacatttccaggttttttttccccgatgttgggcgaatttgtcagtgagaccgagtcacggggatccgagtctggcatcttcactaacacaaaggaaagttccagccaccacccaggcatcgcggaatttccaagtcgaggaaagagcagcagttattcaaagcagtttacctcctcaactagctacaacaggggggacagcactttcgaaagcaagagctacaagatggccgacgaagccggcagtgaggccgaccacgaaggaacacattcaacaaagagaggtcatgctaaatctaggcctgtccgggattgtgacgatgtactacaaacccacccctctggcacccagagtggcatttttaacattaagctcccaggaagttccaaaatcttctccgtttattgcgatcaggaaaccagcttagggggctggctgttgatccagcagagaatggatggaagcctcaattttaacagaacatggcaggattataaaagaggctttggaagcctcaacgacgaaggggaaggcgagttttggttggggaacgattatttgcatctcctgacccagcgggggagcgtccttagggttgaattggaggactgggcgggtaacgaagcttatgccgaataccacttcagggtcggcagcgaagctgagggctatgcactccaggtatcaagctacgagggaacagcaggcgacgctctgatcgagggatccgtcgaagaaggtgccgaatacacctcccacaataatatgcagttcagtacctttgaccgggatgccgatcagtgggaggaaaactgtgctgaggtgtatggaggaggctggtggtataacaactgccaggcagctaacctcaacggaatttattatccaggaggaagttatgacccccgaaataactccccgtatgaaattgagaacggagtcgtctgggttagttttagaggagctgactattctcttcgagccgttagaatgaagatcaggcccctggtgactcaa

SEQ ID NO: 11144 - DNA, 2598 bp, synthetic construct
  misc_feature 1..2598: note = source = /note="Description of Artificial Sequence: Synthetic coding sequence"
  source 1..2598: mol_type = other DNA
atgttcagtatgcggattgtctgcctggtgttatctgtcgtcggaacagcgtggaccgctgattctggagagggagattttttagcggaaggcggtggagtgagagggcctcgagtggtcgagaggcaccagtcagcctgtaaggattcagactggcctttttgttctgacgaggattggaactacaagtgcccttccggctgccggatgaaggggcttattgatgaggtgaatcaagatttcacgaatcgaatcaataagctcaaaaacagtctgttcgaataccaaaagaacaataaggactctcatagccttactaccaatatcatggagatcttgaggggcgactttagctcagccaacaatcgagataatacgtataaccgcgtgagtgaggatctcaggtccagaatagaggtgcttaaaaggaaggtgattgagaaggtgcagcatatccagctgttgcagaagaatgtgagagctcaacttgtggatatgaagcgcctggaagtggatatagatattaagattcggagctgccgggggagctgttcacgggccttggccagagaagtggatctgaaagactatgaagaccagcagaagcaactcgaacaggtgatcgcaaaagatctgctgccgtcgagagatcgtcagcacctgcctttaatcaaaatgaagccagtgccggatcttgttccaggtaactttaagagccagctccagaaagtgcctcctgagtggaaagccctgactgacatgcctcagatgaggatggagctggaaagacccgggggtaatgagattactagggggggctccaccagttatggcactggttctgagacagaaagcccccgcaatccctccagtgccggttcttggaattccgggagctccggccctggttccacagggaatagaaacccaggatcctcaggaacgggaggaacagccacctggaaacctggatccagtggacctggcagtacgggatcatggaacagcggctcctccggaaccgggagcaccggaaaccagaatcccggctctcctagaccggggtccactggaacatggaaccctggatcttcggagagaggatctgctggccattggacaagcgagagctctgtatccggcagtaccggacagtggcactctgagtcagggagctttcggcccgattcccctggctcaggcaacgcacgtcccaataatcctgattggggaacttttgaggaggtatcgggaaacgtctctcctgggacccgcagagaatatcacacggaaaaactagtgactagcaaaggggataaggagttgcggacgggcaaggagaaagtgacgagtggatctaccactaccacgaggcgtagttgttcaaagacagtaaccaagactgtgatcggaccggacggccataaagaggtaacgaaggaagttgttaccagcgaggacggctccgattgccccgaggccatggacctcggaaccctcagtggcattggaaccctggatggattcaggcataggcacccagatgaggctgcattcttcgataccgcatctactggcaagaccttccctggcttcttcagccccatgctgggtgaatttgtgtcggagaccgaatccaggggttctgagtcaggaattttcacaaacacaaaggaaagctcgtcccatcaccctgggatcgccgagttcccaagccgtggtaagtcttcaagctattcaaagcagttcacctcctccactagctataaccgaggagattcaacttttgagtctaaaagctataagatggcagatgaagccgggtcagaggctgatcacgaaggcactcactccacaaaaagagggcacgcaaaaagtaggccagtgcgggattgtgatgacgttctgcagacgcatccctctggaacccagtctggaatattcaatatcaagctacctggctcgagcaagatctttagtgtgtactgtgaccaggagacctccctgggtgggtggttgctgatccagcagcgtatggatggctctctgaatttcaatcgaacctggcaggactacaagagaggtttcgggtctttaaatgacgagggcgagggagagttttggctcgggaacgactacctccatctgctcacccagcgcgggtctgtcctcagggtggagttggaagattgggccgggaacgaggcgtacgccgagtaccactttcgggttggttctgaggctgaaggttacgccctgcaggtaagctcatatgagggcaccgccggggacgccctgatcgaaggctcagtcgaggagggggccgagtatacgtcccacaataatatgcagtttagcaccttcgatagggacgccgatcagtgggaggaaaattgtgctgaggtctacggaggaggatggtggtataacaactgccaggccgccaacctcaacggaatttattacccgggcggatcctacgatccccggaacaacagcccatatgaaatcgagaacggagtggtgtgggtgtcctttcgcggcgccgattattccttgagagccgtgcgtatgaagatcaggcctctagtgacacag

SEQ ID NO: 11145 - DNA, 2598 bp, synthetic construct
  misc_feature 1..2598: note = source = /note="Description of Artificial Sequence: Synthetic coding sequence"
  source 1..2598: mol_type = other DNA
atgttctccatgaggatcgtgtgcctcgttctgtccgtggtcggaactgcgtggactgcggatagcggagagggggactttctcgccgagggtggcggcgtgaggggacctcgagtggtggagagacaccagagcgcctgcaaggactcagactggccgttttgtagcgacgaggactggaattacaagtgcccgagcggctgccggatgaaggggctgatcgacgaagtgaaccaggacttcaccaatcgcatcaacaagttgaagaactccctgttcgaataccagaagaacaataaggactcgcactcgctcaccaccaacatcatggaaatactgcggggagacttcagctcggcgaataaccgcgacaacacctacaatcgcgtgtcggaggatcttcgctcccggatcgaagtgctgaagagaaaggtgatcgagaaggtccagcatatccaactgctgcaaaagaacgttagagcgcaactcgtggatatgaagagactggaagtggatatcgacatcaaaatccgcagctgtagaggttcatgttcgcgggcgctggcccgcgaggtggacctgaaagattacgaggaccagcagaaacagctggaacaagtgatcgctaaggatttgctcccgagccgcgaccggcagcatctgccgttgatcaaaatgaaacctgtgccggacctcgtcccgggcaacttcaagtcccagctgcaaaaagtgccgccagaatggaaggcactgaccgatatgccacagatgagaatggagctggaacgccctggcggcaatgaaatcacccgcggcggatcaacttcttacggtactggctctgagactgaatcgccgcgaaatccatcgtccgctggctcgtggaactccggctccagcgggcccgggtctacgggaaaccgcaatccgggatcctcgggaacgggaggaaccgctacttggaaaccgggaagcagcggcccagggtcaaccggatcgtggaattcgggatcgtccggcactggatcaactggaaaccaaaacccgggatcacctagaccaggaagcactggaacctggaacccaggttcgtcggagcgtggatcggccggacattggacttcggaatcctccgtgtcgggctctacggggcagtggcatagcgagtcaggcagctttcgccccgattcgcctggatcgggtaatgcgcgcccgaacaatcccgactggggtacgttcgaggaagtctcgggaaacgtgtcccccggcacccggagagagtaccacactgaaaagctggtcaccagtaaaggtgacaaggagttgagaaccggaaaggagaaggtcactagcggttcaaccacgaccactcggcggtcgtgttcaaagactgtgaccaaaaccgtgattggaccggacggacataaggaagtgaccaaggaggtggtgacctccgaggatggaagcgactgcccagaggcaatggacctggggaccttgagcggaatcggcaccctggatggcttccggcaccgacaccccgatgaggcagcattctttgacaccgcttcgactggaaaaaccttcccaggatttttctcgcccatgcttggagaattcgtgagcgaaaccgaatcacgtggttccgaatccggaattttcactaacacgaaggaatcatcgtcccaccatccggggatcgcagaattcccgtcccggggcaagtccagctcatactcaaagcagttcacctcatccacctcatacaataggggggactccacctttgaaagcaagagctacaaaatggcggacgaggccgggtccgaggcagaccacgagggaactcactccactaagcggggacatgcgaaatcacggccggtgcgggattgcgatgacgtcctccagactcacccatcggggactcagtctggaatcttcaatatcaagctccctggcagctccaaaattttctccgtctattgcgaccaggaaacttcgctgggaggctggctgctcatccaacaacgcatggacggaagtctgaacttcaataggacttggcaggattataagcggggctttggctccctcaatgatgaaggtgaaggagaattctggctggggaacgactacctgcacctccttactcaacgcggatcggttcttagagttgaactcgaagattgggccgggaacgaggcttacgccgagtaccacttccgcgtcggatcggaagcagagggatacgcgctgcaagtgtcaagctacgaagggactgccggagacgccctcattgaaggatcagtcgaggaaggagcagaatacacctcccataataacatgcaattctccacgtttgaccgcgatgccgatcagtgggaagaaaactgcgccgaagtctatggcggaggttggtggtacaacaactgccaggctgccaaccttaacggaatctactaccctggtggtagctacgatccacggaacaacagtccgtacgagattgagaatggggtcgtctgggtgtcattcagaggcgccgattactcgctgagggccgtgcgcatgaagatcaggcctctcgtgacccag

SEQ ID NO: 11146 - DNA, 2598 bp, synthetic construct
  misc_feature 1..2598: note = source = /note="Description of Artificial Sequence: Synthetic coding sequence"
  source 1..2598: mol_type = other DNA
atgttttcaatgcgcatagtgtgcctcgtccttagcgttgtggggaccgcttggactgctgactctggagagggcgatttccttgccgagggcgggggcgttcgcggcccccgcgtagtcgagcgacaccaatccgcctgtaaggatagtgattggcctttttgctccgacgaggattggaactataagtgcccaagtggctgcagaatgaaggggttgatcgatgaggttaatcaggattttactaatagaatcaataagttgaaaaatagcctgttcgagtatcagaaaaataacaaagactcccactcactgaccaccaatattatggagattctacggggtgatttctcttccgcaaataaccgggataacacatataatcgcgtaagtgaagatctacggtctaggatcgaagtgcttaaaagaaaagttatcgagaaagttcagcacatccagctgctgcagaagaatgttcgtgcacagctggtggacatgaagcggctggaggtggatatagacattaagataaggagctgtcgcgggagttgttctcgcgcccttgcaagagaggtggacctgaaagactacgaagatcaacagaaacagcttgagcaggttatagctaaggacctgttaccaagccgagaccgccagcatctacccctgattaagatgaagcccgtgccagacctcgtgcccgggaacttcaaaagccagttacagaaggtgccaccagaatggaaagcccttaccgacatgccacagatgcggatggaactggagagaccaggaggtaatgaaattactagggggggatccacttcttacggtacagggtctgaaactgagtctccacggaacccatcctccgcaggctcatggaatagtggctccagtggtcccgggagtaccggcaaccgcaatcctggatcaagcggaacaggcggcaccgcaacttggaaacccgggtccagtggacccggctccactggctcttggaattctggatccagtggaactggctctaccggcaaccagaaccctgggtccccacgacccggctccacaggcacatggaaccccggatcatcagaaagggggtctgctggccattggacctccgagtcttccgtgtccgggtccaccgggcagtggcactctgaatccggctcttttcggccagactctcctggcagcggcaacgcccggccaaacaatccagactggggcaccttcgaagaagtgtccgggaacgtgtctcccgggacacgccgggagtaccacactgagaaactggtgaccagtaaaggcgacaaggaactgcgcactggcaaggagaaggttacctctggctctacaactactacccggcgatcctgttcaaagactgtcacaaaaacagtgataggtcctgacggacataaagaggtgactaaggaggttgtgacttccgaagacgggagcgactgtccagaagctatggatttaggcactctatccggtattggcaccctagacggtttccgccaccgccatccagatgaagctgcattcttcgacaccgcttctacaggaaagacatttcctggctttttctcacccatgttaggcgagttcgtcagcgaaaccgaaagcagaggctctgagagtggcatattcaccaacaccaaggaatctagttctcaccacccaggaattgctgaatttccttccagaggaaaatcctcttcttattcaaagcagttcaccagctccacctcatacaacagaggcgatagtaccttcgaatctaaatcctataaaatggctgacgaggccgggtccgaggcagatcatgaaggaacacattccactaagcgcgggcacgctaagtcacgcccagtgagggactgcgatgatgtgctgcaaacccacccttctggcactcagagcggaattttcaatataaaactacctggctcctctaagatatttagtgtgtattgtgatcaagagaccagcttgggaggatggctactgatccagcaacgtatggacggcagtctaaactttaataggacctggcaggactacaaacggggtttcggcagtctgaatgatgagggcgagggcgaattttggcttggcaacgattacctccatctactgacacagaggggaagcgtccttcgagtggaactggaggactgggccggcaacgaggcctacgccgagtatcatttcagggtaggcagtgaggctgaaggttacgccctgcaggtttcctcatatgaagggactgctggagacgccctaatagaggggtccgtggaagagggagctgaatatacctctcacaacaacatgcagttcagcaccttcgaccgcgacgccgatcagtgggaggagaactgtgcagaagtctatggcggcggttggtggtataataattgtcaggctgctaacctgaacggtatttattatccaggcgggagctacgatccaaggaataactctccttacgagatagaaaacggtgtggtttgggtgtcctttcgtggggccgactactctctacgggcagtacgcatgaaaatcagacctctggtgacccag

SEQ ID NO: 11147 - DNA, 2598 bp, synthetic construct
  misc_feature 1..2598: note = source = /note="Description of Artificial Sequence: Synthetic coding sequence"
  source 1..2598: mol_type = other DNA
atgttctctatgcggatcgtgtgtctggttttgtccgtagtcgggacagcatggaccgccgatagtggggagggagacttcttagccgagggtggaggcgttcggggtccccgcgtggtggaaaggcatcagtcagcttgcaaagattccgactggccattctgctccgacgaggattggaactacaagtgccctagcggctgtcgcatgaagggcctcatcgacgaagtgaaccaggatttcaccaaccggatcaataagctgaaaaattccctgtttgagtaccagaagaacaacaaagacagtcacagcctcaccactaatatcatggaaatattacgaggcgatttctctagcgcgaacaacagggacaatacatataatcgggtgtcggaggatctgcgatcacgaatcgaggtcctgaaaagaaaggtgatcgaaaaagtgcagcacatccaactgctccagaaaaatgtgcgagctcagttggttgacatgaaaagattagaggtggatatcgatattaaaattcgctcctgtagaggcagttgctcccgcgctctcgcaagggaggtcgaccttaaagattacgaagatcagcagaaacagctggagcaggttatcgccaaagacctgcttccatcgagagaccgccagcatctgccacttattaagatgaagcctgttcctgatctggtgcctggcaattttaagagccagctccagaaggtgcccccagagtggaaggcacttaccgacatgccccagatgagaatggaactcgaacgacctggaggaaacgaaattacgcggggaggcagcacgtcctacggcacaggaagcgagactgaaagcccgagaaaccctagctccgctgggagctggaatagcggaagcagcgggcctggttctacggggaacagaaacccggggtcatccggtacggggggcactgccacatggaagccaggctcttcgggtcccggatcaaccggctcatggaactccggttccagcgggaccggcagcacagggaaccagaaccccgggtctccacgccccggtagcacaggaacctggaatcccgggagctctgaacggggctcagcaggtcattggacaagcgagtcctctgtgtctgggagtacagggcagtggcacagcgaatccggaagcttcagacctgattctcctggttcgggaaatgctaggccaaacaatcccgattggggaactttcgaggaagtcagcggaaacgtgagtcccggtacacgtagagaatatcacaccgaaaaactggttacatcaaagggggataaagaacttcgcaccgggaaggagaaagttaccagtggaagcacaaccacaacccgcagaagctgcagtaaaaccgtaacaaagacagtgattggtcccgacggccacaaagaggtcacaaaagaggtggtcacatccgaagacggatcagactgtcctgaggccatggacctgggaaccctgtccggaatcggaacactcgacggattcaggcacagacatcctgacgaggcagcctttttcgatacagccagtacaggcaaaacgtttcctggattcttcagccctatgctcggtgagtttgtgtctgaaacggaaagtcgcggcagcgagtcaggcatcttcacaaatactaaggaatcctcatctcaccatccgggcatcgcggagtttccatccagaggcaaaagctctagttacagcaagcagtttacgagtagcacatcgtataacaggggagactctacgttcgaaagtaaatcatataaaatggctgatgaggccggttcagaggccgatcacgaaggtacgcattccacaaagagggggcacgctaaaagtcggcccgtgagggactgtgacgatgtactgcagactcatccttctgggactcaaagtggaatattcaatatcaagctaccaggatcctctaagatttttagcgtgtactgtgatcaggaaaccagcctcggagggtggctgcttattcagcagcggatggacggttccctcaactttaaccgcacatggcaggactataagcgtggctttgggtccctaaatgacgaaggggagggggaattctggctgggcaacgattatcttcacctgctgacacagagagggagcgtgcttagagtggagctggaggactgggcgggtaacgaggcttacgctgagtatcatttcagggttggaagtgaggcagaggggtatgctctgcaggtaagtagctacgaaggaactgccggggacgcccttatcgagggtagcgtcgaagaaggcgcagagtatacaagtcacaacaacatgcagttctctacctttgacagagatgcggaccagtgggaagagaactgcgccgaggtctatggtggggggtggtggtataacaattgccaggcggccaatctgaacggtatatactacccaggtgggtcttacgatccgcgaaataacagcccttacgaaatagaaaacggtgtggtttgggtgtcatttcgtggggctgactatagtttgagagccgtgcggatgaagatccgacccctcgtcacacag

SEQ ID NO: 11148 - DNA, 2598 bp, synthetic construct
  misc_feature 1..2598: note = source = /note="Description of Artificial Sequence: Synthetic coding sequence"
  source 1..2598: mol_type = other DNA
atgttctcaatgcggattgtctgcctggtcctgtccgtggtgggaaccgcatggacggcagactcaggcgagggcgactttctggccgaaggcggaggtgtcagggggcctcgcgtagtagaacgtcaccagagcgcctgtaaagacagcgactggcctttctgcagtgatgaggactggaattacaaatgccccagcggctgtaggatgaagggactcatcgacgaagtgaaccaagactttacaaaccggattaataagttaaagaactctttgtttgaataccaaaagaacaataaagattctcattcactgacaactaacattatggagattctgagaggggactttagcagtgcaaataacagggacaacacctacaaccgtgtttcagaagacttgcggagccgcatcgaagttctgaagcggaaggtgatcgaaaaggtgcaacacattcagctattacaaaaaaatgtgagggcccagctggtcgatatgaagagactggaggtggacatagatatcaagatacggtcttgtcggggtagttgcagtcgggcactcgccagggaggtggatttaaaggattatgaggaccaacaaaagcagctggagcaggtcatcgctaaggatctgctgccctcaagggacagacagcacctcccgctcatcaagatgaaaccggtcccagatttagttcccggcaactttaaatcacaactccagaaggtgcctcccgagtggaaagcgctcaccgacatgccccaaatgcggatggagctggagaggcccggggggaatgaaatcacccgtgggggctccactagttatgggactggcagcgagaccgaatccccccgtaatccctcttcagccggtagttggaacagcggcagctctggtccagggtctacgggaaatagaaatcctggttcatcaggcaccgggggtaccgctacatggaaacccgggagcagtggtcccggtagcacgggctcctggaatagtggttctagcggtaccgggtccactggcaatcagaatcccggctctccaagacctgggtcaaccggaacatggaaccctggatcttctgaacggggctctgcaggccactggacctccgagtctagtgtcagtggttccaccgggcagtggcactctgagtccggatcctttcgaccagactcgccaggctccgggaacgcccgacccaacaaccctgactgggggaccttcgaagaggttagcgggaacgtgagtccaggtacgcgtagagaatatcatacggaaaagctggtaaccagtaaaggagacaaagaattacgaaccggcaaggagaaagttacatcggggagcacgaccacaaccaggcgctcctgttcaaagacagtgacaaagacggttatcggtcccgacgggcacaaagaggttacgaaggaggtggtgacctcggaggatggaagcgactgccctgaagccatggacctgggcactttgagtgggattggcacactggacggattcaggcatcggcaccctgacgaggctgcattcttcgacactgcctctaccgggaaaacctttccaggcttctttagcccgatgttgggtgaattcgtgagtgagaccgaaagccgaggaagcgaatccggaatcttcacgaacactaaagagtcttctagtcatcaccctggaatcgcagaatttccgtcacgcgggaagagttcttcctattcaaagcagttcacgtccagcacctcttacaatcggggcgatagcacattcgaatctaagagctacaaaatggccgatgaagctggttccgaggctgaccacgagggtactcactcgacaaaacgcggccacgctaagagcagaccagttcgagattgtgacgatgtgctgcagacccatcccagcggcacccagtccggcatctttaacatcaagctccccggatcttccaaaatattttccgtgtactgcgaccaagagacctccctcggaggttggctgcttattcagcagaggatggacgggagcctgaattttaaccgcacttggcaggattacaagcgggggttcggatcactaaatgacgagggtgaaggggaattctggttaggcaatgattatctccatctgctgacgcagcggggcagtgtgctgagagtggagctcgaggactgggcaggcaatgaagcttacgccgagtatcacttccgggtgggttctgaagccgagggctatgcgttgcaggtctccagttatgaaggtaccgctggcgacgccctgatcgaaggctcagtagaggaaggtgcagagtacaccagccacaacaatatgcaattctctacatttgaccgcgacgccgaccagtgggaggagaactgcgcagaagtctatggcggggggtggtggtataataactgtcaggccgccaacctaaacggtatctactaccctggtggttcatacgatccaaggaacaacagcccctacgagattgagaacggtgtggtgtgggtctcctttagaggagctgactatagtctaagggcagtgcgcatgaagatccgccccctagtgacccag

SEQ ID NO: 11149 - DNA, 2598 bp, synthetic construct
  misc_feature 1..2598: note = source = /note="Description of Artificial Sequence: Synthetic coding sequence"
  source 1..2598: mol_type = other DNA
atgttctcgatgcgaattgtctgcctggtattgtccgtagtaggtactgcttggacagctgacagtggtgaaggtgattttttggctgagggaggcggagtgagggggccacgcgttgttgagcggcaccagagcgcctgtaaggacagtgactggcctttttgcagtgatgaagactggaactataagtgcccatcaggatgtaggatgaaaggtctcatcgatgaagtgaatcaggatttcacaaaccgtatcaacaaactgaagaactcactatttgagtatcagaagaataataaggacagtcacagcttaactaccaatatcatggagattcttagaggtgatttctccagcgctaacaatagggataacacttataatagggtgagcgaagatttaagatctaggattgaggtccttaagagaaaggtcattgaaaaagtgcaacacattcaattgcttcaaaagaatgttcgggcccagcttgttgatatgaagcgtttggaggttgatatcgatattaagatccggtcttgcaggggaagttgcagtagggcattggctcgtgaagttgatcttaaagattatgaagatcaacaaaaacaactcgagcaagtgatcgctaaggatttattgccatctcgtgatcgccaacatctgccgttaattaaaatgaagcctgttcctgatctggtgccaggcaactttaagtctcaacttcagaaggtcccacctgaatggaaagcactcaccgatatgccacaaatgagaatggagctcgagaggcctggaggtaacgaaattactaggggaggcagtaccagttatggaaccggaagtgagaccgagtctccaagaaatccaagttctgcgggttcttggaattcaggttcctcgggtcctgggagtactgggaacagaaaccccggatcttctggtactggtgggacggcaacatggaagcccggaagtagcggaccgggaagcactggatcatggaatagcggatccagtggaactggcagcactggcaatcaaaatcctggatcccctcgtcctggatctacaggtacatggaaccccggatcttcagaaagggggagcgcaggccattggacatcggagtcctcagtttcagggtcaaccggccaatggcattccgagagtggctcattccggccagattctcctggttctgggaacgcaaggcctaataatcctgattggggcacttttgaggaagtatctggaaatgtttcgccaggaacaaggagggagtaccacactgagaagctagttacatcaaagggtgataaggaacttcgcaccggtaaagaaaaagtgacatccggctcaactactactactcggaggtcttgtagcaagaccgttactaagactgtcattggtccagatggacataaagaagtgactaaggaggttgtaacgagcgaggatgggtcagattgcccagaggccatggatttagggaccctgtcaggcattggtaccttggatggttttaggcaccgtcatcctgatgaggctgcatttttcgacactgcctccaccgggaaaacatttcctggctttttttctcctatgctgggagagtttgttagtgaaaccgagtctagaggttcggaatcaggaatcttcacaaacaccaaggagtcctcttctcatcatccaggtattgccgaattccctagtagaggaaaatcatcttcatatagtaaacaatttacaagttctacatcctataatagaggtgactcgactttcgagtccaaaagctataaaatggctgatgaagcagggtctgaggcagatcatgaaggaactcattctaccaagcggggacatgcaaaatcacgtccagttagagactgcgatgacgttctacaaacccatccgagtggcactcagagcggaattttcaacattaagcttcctggttcatcaaaaatcttctccgtttattgcgatcaggaaacttcacttggaggatggcttctcattcaacagaggatggacggaagtctcaacttcaaccgaacctggcaagactacaaacggggattcggatcactaaacgatgaaggagagggagagttctggctcggtaatgattatcttcatttgcttacgcaaagaggatctgtcctgcgagtggaattggaggactgggcaggcaacgaagcatatgctgaataccattttagggtcgggtccgaagcggagggatacgctctccaggtcagctcctatgagggaactgctggtgatgcacttatcgaaggttctgttgaggaaggggctgaatacacctcacataacaatatgcagttcagtactttcgatagggatgccgaccaatgggaggagaactgtgctgaagtttacggtgggggatggtggtacaacaattgccaggctgccaacctgaatggtatttactatcccggggggagctatgaccccaggaataacagcccttatgaaattgagaatggggtcgtatgggtgtctttcaggggtgccgattattcattgcgggccgtgcgtatgaaaattcgtccacttgttacgcag

SEQ ID NO: 11150 - DNA, 2598 bp, synthetic construct
  misc_feature 1..2598: note = source = /note="Description of Artificial Sequence: Synthetic coding sequence"
  source 1..2598: mol_type = other DNA
atgtttagtatgagaattgtgtgccttgtgctgagtgtggtgggtaccgcttggactgctgattctggagagggtgactttctcgctgagggaggtggtgtacgcggcccacgcgtggttgaaaggcaccagagcgcttgtaaagactcagactggccattttgcagtgatgaggactggaactacaagtgcccaagtggatgcagaatgaaaggactgatcgacgaggtcaatcaggacttcacaaacagaatcaataaattgaagaactctctcttcgaataccagaagaacaacaaggacagtcactcccttaccaccaatatcatggaaatcctcagaggcgacttctcctccgctaataatcgcgacaatacttacaatcgcgtcagcgaggatcttcgctcaagaatagaggtgttgaagaggaaggtgatcgagaaagtccagcacatacaactgcttcaaaagaacgtcagggcacagttggtggatatgaagagacttgaggtggatattgacatcaagattaggtcttgcaggggttcttgcagtagagccctggcaagggaggttgacctgaaggattacgaggaccagcaaaagcaactggagcaggttatcgctaaggatcttcttccaagccgcgaccgccagcatctgcctctcatcaagatgaaaccagttccagacctggttccaggaaacttcaaatcacaactgcagaaagtcccacccgagtggaaagccctcacggatatgcctcagatgcgcatggagctggagaggcctggaggtaacgagattaccagaggtggatccacctcttacggtaccggaagcgaaactgagagccccaggaatccaagtagtgcgggtagctggaactccggatcctcaggaccaggcagcaccggcaacaggaatccaggttccagcggcactggcggtacagcgacatggaagcccggttctagcggtccaggaagtactggctcctggaattccggatcaagcggcacaggctccactggcaatcagaaccccggatcacctagaccaggctctacaggaacctggaatccaggatccagcgagagaggatcagcgggccattggactagtgagtcttcagtgagcggatctacaggccaatggcactccgagtccggctctttccgccctgacagcccaggctcaggaaatgccagacctaataacccagactggggtaccttcgaagaggtgagcggaaatgtgtccccaggcactcgcagggaataccacaccgagaagctggtcaccagtaagggagataaagaactgcgcacgggtaaggaaaaggtaaccagcggaagtaccacaactaccaggagatcctgctctaaaactgttactaagaccgtgattggaccagatggacacaaggaggtgactaaggaggttgtcacaagcgaagacggtagtgattgcccggaggccatggacctgggcacactttccggaatcggtacgctggatggattccgccacaggcatcctgatgaagctgcattcttcgacaccgcatcaaccggtaagacattcccaggttttttctcacctatgctgggtgagtttgtgtcagagacggaaagtaggggatccgagagtggtattttcactaacaccaaggagagtagttctcaccatccaggtatcgccgaatttccatcaagaggcaaatctagctcttatagtaaacagttcacttcatctactagctacaaccgcggcgactccacgttcgaaagcaagagctacaaaatggccgatgaagcaggctccgaagccgaccatgagggaacccacagcacaaagaggggacacgcaaagagtcgccctgtgagagactgcgacgatgtgttgcagacccacccctctggaacccagtctggtattttcaacatcaagcttccaggatcttcaaagatatttagcgtgtactgcgaccaggagactagcctcggaggatggctgctgattcaacagcgcatggacggctctctcaacttcaatcgcacatggcaggactacaagcgcggttttggctctctgaacgacgagggagaaggcgagttctggttgggaaacgattatctccaccttctcacccaaaggggatctgtccttagagtggaactcgaagactgggctggcaacgaagcttatgccgagtaccacttcagagtcggatctgaagccgaaggttacgcactccaagtcagctcctacgagggtacggctggtgacgctttgatcgagggatcagtcgaagaaggtgcagaatacacttcacacaataatatgcagttttccacattcgaccgcgatgctgaccagtgggaagagaattgcgcagaggtttatggaggcggttggtggtacaataactgccaggcagccaacctcaacggcatttattacccaggcggttcatatgatccgcgcaacaactccccttatgagattgagaacggcgtggtctgggtatcctttcgcggagccgactactccttgcgcgcagtgaggatgaagatccgccctctcgtgactcag

SEQ ID NO: 11151 - DNA, 2598 bp, synthetic construct
  misc_feature 1..2598: note = source = /note="Description of Artificial Sequence: Synthetic coding sequence"
  source 1..2598: mol_type = other DNA
atgttttccatgcgaattgtgtgtctcgtgctatcagtggtgggtaccgcatggacagcggactctggagaaggtgattttctcgctgagggcgggggcgtaagggggccccgagttgtggagagacaccagagtgcttgcaaggacagtgattggccattttgttctgatgaggactggaactataaatgcccctcaggctgccgcatgaagggtctgattgacgaagttaatcaagactttacaaaccgcatcaataagctgaaaaattcacttttcgagtaccagaagaataataaggactcccactcattgacaacgaatatcatggagatactccgcggagacttctcaagcgccaacaaccgggacaatacctataatagggtctccgaagacttacgcagccggattgaagtccttaagcgaaaggtgattgagaaagtgcagcacatccaactgctgcagaagaatgttagagcccagctagtggacatgaaacggttggaagtcgatattgatataaagatccgcagctgtcggggatcctgtagtcgggcgttggcaagggaggtcgacctaaaagactacgaggaccagcagaaacagttggagcaggtgatcgccaaggacttacttccctcacgcgacaggcaacatctacccctgatcaaaatgaagcccgtgccagacctagttccaggcaactttaagagccagcttcagaaggtcccgccagagtggaaggccctcacagacatgccgcagatgaggatggagctggaacggccagggggcaacgagatcacccggggagggtcaacgtcctatggcactgggagcgagactgagagtccgcggaaccccagctctgctgggagctggaactctggcagttctggtccggggtccacagggaaccgcaatcctggatcaagtggcactggaggcaccgctacctggaaaccggggtcatcaggcccaggcagcaccggttcctggaattcaggcagctctggtacaggaagtaccggcaatcagaaccccggcagccccagaccgggatcaaccggaacctggaacccagggtcgagcgagagagggagtgctggtcattggacatcggagtcttcagtgtcgggttcaactggccagtggcatagcgaatcagggagctttcggcccgattcacccggtagcggtaatgctaggcctaacaaccccgattggggcacttttgaagaggtatccgggaacgtttctcctggcaccagacgcgaataccacactgagaagctggttacgtccaagggagacaaagagcttcggaccgggaaagagaaagtgaccagtggctcaaccaccacaacacgtcgatcatgttccaagacagtaactaaaaccgtgattggtccagacggtcacaaggaggtgaccaaagaggttgtgacatcggaggacggcagcgactgtcccgaagcaatggatctcggaacactctccggtattggcaccctggatggatttcgccataggcacccggacgaggccgcatttttcgacaccgcgtccacggggaaaactttccccggcttcttttctccaatgttgggggaattcgtttcagagaccgagagccggggaagcgaatccggaatattcaccaacacaaaggagagcagcagccaccatcctggcatcgctgagtttccttcaaggggcaagtcgtcctcttatagtaaacaattcacatcatccacttcctacaaccgaggtgactccacttttgagagtaagagctacaagatggcagatgaagccggctcggaagccgatcatgagggaactcactcgactaaaagggggcatgccaagtctcggcccgttcgggactgcgatgacgtactacagacgcatccttccgggacccagtccggaattttcaatataaaactccctggcagttccaagatcttctccgtgtactgcgaccaggaaacatctctcggcggctggctgctgatacaacaacggatggatggctcactcaactttaatcgaacatggcaagactataaacggggcttcgggtcattgaacgatgaaggcgagggcgagttttggctcggaaacgactatctgcatctgctcacacaaagggggtcagtgttgcgggtcgagctagaagactgggctggaaacgaggcatatgcggagtaccacttcagggtgggttcagaagctgagggatatgccctgcaggtgtcttcatatgaaggaaccgcaggcgacgcattgatcgagggatccgttgaagaaggcgccgagtatacgtcacacaataacatgcagttttccactttcgaccgggatgctgatcagtgggaggaaaactgcgcggaagtgtacggcggcggctggtggtacaataactgccaagccgcgaacctcaatggcatctactatcccggcggtagctatgaccctcggaacaactctccctacgagatcgaaaacggtgtggtctgggtttcctttcgaggcgctgactactctttacgggcagtgagaatgaaaatccgtcctctcgttacccag

SEQ ID NO: 11152 - DNA, 2598 bp, synthetic construct
  misc_feature 1..2598: note = source = /note="Description of Artificial Sequence: Synthetic coding sequence"
  source 1..2598: mol_type = other DNA
atgttttcaatgcggatagtatgtctcgtgttgtctgtagtcggaacagcttggacagcggatagtggggaaggggattttcttgctgaaggggggggagtcaggggacccagagtggttgaacggcatcagtcagcctgtaaagattcggattggccattttgctcagatgaagattggaactataaatgtccctccggatgtcggatgaaaggacttatagacgaggtcaatcaggattttactaaccggataaataaactcaaaaattccctgtttgaataccagaagaacaacaaggattcacactcgttaactacaaacataatggagattctgcggggagatttttcatcggcaaataacagggataatacttataatcgggtgtcagaggatctaagatctcgaattgaagtgctcaaaagaaaggtcatcgaaaaagtgcagcatatccagctgctccagaaaaacgttagagctcagttagtcgatatgaaaagattggaggttgatattgatataaaaatccgttcatgcagaggatcatgctcccgcgcccttgcccgtgaagtggaccttaaagattatgaagatcagcagaaacagttagaacaggtgatcgccaaagatttgttaccctctcgcgatcgccagcatcttcccctgattaaaatgaaaccagttcccgatctagtgcccgggaactttaagtctcagttgcagaaagtgcctcccgagtggaaagctcttactgatatgccacagatgcggatggagcttgagcgcccaggagggaacgaaataacacggggagggtctactagttatgggacaggatctgaaactgaatcaccccgaaacccttcgtccgctggatcctggaattccggaagttccggacctggatctacaggaaatcgcaatcctgggtcttctggaacaggaggaacagcaacttggaaacccgggtcttcagggccaggatccacggggtcttggaatagtgggtcctccggaactggaagtacaggaaaccagaatccaggatctcctaggccaggatcaactggaacttggaatccgggatcctccgaacgagggtctgctgggcactggacttcagaatcctcagtgtcagggagtactgggcagtggcatagtgagtctggatcctttcggccggattctcccgggtcaggaaacgccagacccaataatcctgattggggaacttttgaagaagttagtggaaacgtgtcccccgggactcggcgagaataccatactgagaaactagttacttcaaaaggagataaagaattgcggacaggaaaagaaaaagtgacttctgggtccacaacaacaacacggaggtcatgttctaaaacagtcacaaaaacagttatcggacccgatggacacaaagaagtcactaaagaagtggtcacaagtgaagacggaagtgattgtcccgaggctatggatctaggaactttgtctggaatcgggacactagatgggtttagacatcggcatccagacgaagctgctttttttgacactgcttccactggaaagactttcccaggatttttctcccctatgcttggggaattcgtgtctgaaactgaatcccgaggatctgaaagtggaatattcactaatactaaagaatcatcttcccatcatcccgggatagccgaatttccaagtcgcggaaaaagttctagttattcaaagcagtttacatccagtacatcctataacagaggggatagtacatttgaaagtaaaagttataaaatggctgatgaagctggatcagaagctgatcacgaagggactcactccactaaacgtgggcacgccaagtccaggcccgtaagggattgcgatgatgttctgcagacacatccttctgggacacagagtgggatattcaatattaaactaccaggatcatctaaaatcttctctgtgtattgtgatcaagagacttctttgggggggtggttgctgatccagcagcggatggatgggtcattgaatttcaatcggacatggcaggattacaaacggggattcgggtccctcaacgatgagggggaaggagaattctggctgggaaacgattacctccatctattaacacagcgcgggtccgtgcttagggtggagctcgaagattgggccgggaacgaagcttatgccgagtatcatttccgggtggggtcagaggcggaggggtacgctttacaggtaagttcttacgaagggactgctggagatgcacttatagaaggaagtgtggaagaaggagccgagtatactagtcacaataacatgcagttttcaacatttgacagggacgccgatcaatgggaagaaaactgcgccgaagtttatggaggaggatggtggtataataattgtcaggccgcaaacttaaacggaatatattaccctggaggatcttatgatccacgaaacaatagtccttacgaaatagaaaatggggtggtgtgggttagttttaggggagccgattactcacttagagctgttcgcatgaagataagaccactggtgacacag

SEQ ID NO: 11153 - DNA, 2598 bp, synthetic construct
  misc_feature 1..2598: note = source = /note="Description of Artificial Sequence: Synthetic coding sequence"
  source 1..2598: mol_type = other DNA
atgttttccatgagaattgtttgtcttgtgctcagcgtggtcggcacagcctggacggccgatagtggtgagggggacttcttggctgaaggtggcggcgtgcggggaccgcgagtcgtcgaacggcaccagtcagcctgcaaggattctgactggcccttttgctccgacgaggactggaactacaaatgtccaagtggctgtcgcatgaagggcctcatagacgaggtgaaccaggattttaccaatcgcattaacaagctgaagaacagtctctttgagtatcagaaaaataataaagactcccattccctgactactaacattatggaaatccttcgcggtgacttttcctcggccaataacagagataatacgtacaatcgggtttcagaggatctccgctccaggatagaggtgttaaagcgaaaagtaattgagaaggtccagcacattcaactgttgcaaaagaacgtgagggcccagctcgtggatatgaaaagactggaagtggatattgacattaaaattaggagttgccgaggaagctgcagcagggccctggcacgagaagtagacttgaaggactatgaggaccaacaaaagcagcttgagcaggtcatcgcaaaggatctgcttccctcacgggatagacagcatctgcccttgattaagatgaagcctgtccccgatctcgttccagggaatttcaagtctcaactccagaaagttcccccagagtggaaagctttgacagatatgccccagatgagaatggaacttgagcggcccggaggcaacgagatcactaggggaggcagcaccagttatggcactggctcagagaccgagagcccacgcaatccctcatctgccggaagttggaactctggttccagcggcccggggagcactgggaatcgaaatccagggtcttctggaacagggggtacggctacttggaaaccaggatcctctggtcctgggagcacggggtcctggaactcaggctcttcggggaccggaagcacaggaaatcagaacccagggtcccctcgtccaggatctacaggcacatggaacccaggatcctccgagcgaggaagcgcaggtcattggacttcggaatctagcgtttcaggctccacagggcagtggcacagcgaatcaggctcgttcagacccgactcccctgggagcggcaacgcgcggccgaacaaccctgactggggaacattcgaggaagtttctggtaacgttagtccggggaccagaagagagtatcacaccgagaagctggtgacatctaaaggcgataaggaattgaggactggaaaggaaaaggtgacatcaggcagtactacgacaacgagaaggagttgttctaagacggtgaccaaaactgtcatcggccctgatgggcacaaggaggtaaccaaagaggtagtgacgagtgaggatggatccgactgcccagaggcaatggatcttgggacactctctggaatcggcacactcgacggatttaggcaccggcaccctgatgaagctgcctttttcgatactgcaagtactggaaagacttttccaggcttcttttctcccatgctgggcgagtttgtgtcagaaacagagagccgtgggtcagaaagtggcatcttcacaaatacgaaagagagttctagtcaccacccgggaatcgcagagttcccttcccggggtaagtcatccagttatagcaagcaattcacgtccagcacctcttataatcgtggtgactcaacgttcgagtccaagtcctataagatggcagatgaggccggtagcgaagctgatcatgaaggaacccacagcacaaaaagaggtcatgcaaagagtagaccagtacgggattgcgacgacgtactccagacccacccatctggcacgcaatcggggatctttaacataaagcttcccgggagtagtaagattttctctgtatattgcgaccaggaaacaagtctgggcggctggctcttgatccaacagcggatggacgggtctctaaattttaacagaacgtggcaggactacaagcggggctttggttccctgaatgacgagggggagggtgagttttggttgggcaacgactatttacacctgttgactcagaggggcagcgttcttcgtgtggaactggaggattgggccggaaacgaggcatacgccgagtatcatttcagagtcggctctgaagccgagggttacgccctgcaggtctctagttacgaaggaaccgctggagacgccctcattgagggcagcgtggaggagggcgctgagtatacaagtcataacaatatgcaatttagcactttcgaccgggacgccgatcagtgggaggaaaattgcgctgaggtgtacggtggtggatggtggtataataactgtcaggctgccaatcttaacgggatatactacccaggtggatcctatgacccgcgcaacaacagcccttatgaaattgaaaacggagtagtatgggtgagcttccggggtgccgactatagtttgagggcggtgaggatgaagatccgtccgctggtaacccag

SEQ ID NO: 11154 - DNA, 2598 bp, synthetic construct
  misc_feature 1..2598: note = source = /note="Description of Artificial Sequence: Synthetic coding sequence"
  source 1..2598: mol_type = other DNA
atgttctctatgcgtattgtctgcctggtcctttcggtcgtcggcaccgcctggaccgcggactccggcgagggtgattttctcgcagagggcggaggtgtcagaggcccccgtgtcgtcgagcgtcatcagtcagcctgcaaggacagcgattggcctttctgctcggacgaggactggaactataagtgcccttccggatgccggatgaagggtcttattgacgaggtcaatcaggactttaccaatcgtatcaacaagctaaaaaactccctgtttgagtaccaaaaaaacaacaaggattctcacagtcttacaacgaacatcatggagattctgcgaggcgacttctcgagcgccaacaaccgtgacaatacgtacaaccgagtgagcgaggacctgcgatctagaattgaggtcctgaagcgcaaggtcatcgagaaggtgcaacatatccaacttctgcagaagaacgtccgcgcgcagttggtcgacatgaagagactagaagtcgacattgacatcaaaatacgctcttgccgcggctcttgctcccgcgcattggcgcgtgaggtcgacttgaaggattatgaggatcagcagaagcaattggaacaagtcatcgccaaggacctgctccccagccgtgatcgccagcatctccctttgattaagatgaagcccgtccccgatttggttccgggtaactttaagagccagttgcagaaggtgcccccagaatggaaagccctgaccgacatgcctcagatgcgcatggagttggaacgcccagggggcaacgaaatcacccgtggcggctccacgtcctacgggacgggctccgagacggagagcccgcggaacccgtcctccgcgggaagctggaactcaggctcgagcggtccgggttccaccggcaaccgcaaccctggctccagtggcaccggcggcactgcaacctggaagcccggttcctctggtcctggaagtacggggagctggaactctggttcttccggcaccggttcgaccggtaatcagaaccccggctcgcctcgtcccggcagcacaggtacttggaaccccggttcatctgagcgagggtctgctggccactggacttccgaatcctccgtttcgggtagcactggccagtggcacagcgagtcgggtagtttccgccccgattcccctggatccggaaacgcccgccccaataacccagactggggaaccttcgaagaggtctcgggaaacgtcagtccgggaacccgacgtgagtaccatactgagaagcttgtgaccagtaagggagacaaggagctccggaccggtaaggaaaaggtgacctcaggtagcaccacgacgacgcgaaggtcgtgcagcaagaccgtgacgaagaccgtcatcgggcccgatggccacaaagaggtcaccaaggaggtcgtcacttcagaggatggcagtgattgccccgaggcaatggatcttgggaccctgagcggtatcggtaccctcgatggcttccgacacagacatcccgatgaagctgcttttttcgatactgcatccacgggcaagacgtttccaggtttcttcagccccatgcttggtgaatttgtttccgagacggaatcgcgcggttcagaatctggcatcttcactaacaccaaagagagttccagtcaccatcctgggattgccgagtttccctcccgtggaaaaagcagcagttactccaagcagttcactagttctaccagctataaccgcggcgacagtaccttcgaatccaagtcctacaaaatggcggatgaggccggaagcgaggccgatcacgaaggtacccactccaccaagcgcggtcatgcgaagtcgcgaccggtgcgagactgcgatgacgtccttcagacccatcccagtggtacccagtcgggaattttcaatatcaagctccctggaagttccaagatctttagcgtctactgcgaccaggagactagcctaggcggctggctgctcatccagcaacgtatggacggttcgctgaacttcaaccgcacttggcaggactacaagcgcggttttggttctctgaatgacgagggcgaaggtgagttctggctggggaacgattacctgcatctcctcacccagagaggctctgtgctccgcgtggagcttgaggactgggccggcaacgaggcatatgccgagtaccatttccgcgtcggaagtgaggctgagggttatgctctccaggtcagctcctatgaaggtaccgctggtgacgcactgatcgagggttccgtggaagagggggctgagtacacctcgcacaacaacatgcagttttcgacgtttgatagagacgcggaccaatgggaagaaaactgcgccgaagtctacggtggcggttggtggtacaataactgccaagcggcaaacctcaatggcatttattaccccggtggcagctatgaccccagaaataactccccctacgagatcgagaacggagttgtttgggtcagtttccgtggagctgactactccttgcgggccgtccgcatgaagatcaggcccctcgtcactcag

SEQ ID NO: 11155 - DNA, 2598 bp, synthetic construct
  misc_feature 1..2598: note = source = /note="Description of Artificial Sequence: Synthetic coding sequence"
  source 1..2598: mol_type = other DNA
atgttcagcatgaggatcgtgtgcctcgtgttgtctgtggtgggcacagcctggaccgcagattctggagaaggcgacttccttgcggaggggggcggggtgagaggacccagagtggtggaaaggcaccaatccgcttgcaaggattccgattggcccttctgttctgacgaagattggaattataagtgccctagtgggtgccgaatgaagggccttatcgatgaggtcaatcaggacttcactaatcggataaataaactgaagaactcactgttcgagtatcagaagaacaacaaagacagccacagtctgacgactaacatcatggagatcctgagaggcgatttcagctccgccaataacagagacaacacctacaacagagtgtccgaagacctgagaagccggattgaagttctgaaacggaaagtgattgagaaagtgcaacacatccagctgctccagaagaacgtcagggcacagcttgtggacatgaaaaggctcgaagtagacatcgatatcaaaattcgcagctgcagagggagctgtagtagagccttggccagggaagtggatctgaaagattacgaagaccagcaaaaacagctcgaacaagtaattgcgaaggaccttctgccgtccagagatagacagcatctgccactgattaagatgaagccagtccccgatctcgtgccgggcaatttcaagagccaactgcaaaaagtgccaccggaatggaaggctctgaccgatatgccccagatgcgcatggagctcgaacgcccggggggtaatgagattactagaggcggcagtacctcctatggaacgggctcagaaaccgagtccccgaggaatccgtcatccgcaggaagctggaatagcggaagtagcggaccgggctccacagggaacaggaaccccggctcatctgggacaggtggaaccgccacatggaagccgggctcctccgggccaggatctactgggtcctggaactccggatcctccggtactgggagcacagggaatcaaaacccggggtctccgagacctggctccactggaacctggaatccaggaagttccgagcgggggagtgcggggcattggaccagtgagtcctctgtgagtggttcaaccggccagtggcactcagaatctggcagctttcggccagactctcctgggtctggcaacgcccgacccaataaccctgactggggcacttttgaagaggtctccggaaacgttagcccaggcactaggagggaatatcacaccgagaagcttgtcaccagcaagggcgataaagagctgaggacagggaaggaaaaggtgacatctggctccactacaacaactcgacggagctgttcaaagaccgtgacgaagacggtgatcggccccgacggtcacaaagaggtcacgaaggaagtggtgacaagtgaggatggttctgattgtccggaggcaatggacctgggaaccctctctggcatcggcaccctggacggatttcgacatcggcaccctgacgaagcggcctttttcgataccgcatccaccggaaagacttttcccgggttcttctcccccatgctgggcgaattcgtttcagaaactgaaagtcgaggaagcgagtccggtatcttcaccaacacaaaggaaagctcaagtcaccatccgggaatcgccgagtttccctcaaggggtaagagtagttcctattccaaacagtttacctcctccacttcatataatagaggagattcaacctttgagtctaagtcctacaagatggccgacgaagccggctctgaagccgatcacgaggggacgcactctactaaacgaggccacgcaaagtctcgcccagtacgcgactgcgatgacgtgctgcagacacatcccagcggcactcagagcggcatcttcaacatcaagctgccggggtcatctaagattttcagtgtgtattgcgaccaggaaacgtctctcgggggatggctccttattcagcagaggatggacggaagcctcaattttaataggacgtggcaagactacaagcgcggatttggtagcttgaacgatgagggcgagggagaattttggctgggaaatgattatctccacctcctgacccaacggggatctgttctccgggtggagctggaagattgggctggaaatgaagcttatgctgaatatcacttccgggttgggagtgaggcagaaggctatgcgctgcaggtgtcttcatatgaggggacagcaggtgacgctctgatcgagggaagcgtggaagaaggcgccgaatataccagtcacaataacatgcagttcagtaccttcgacagagacgcagaccaatgggaggagaactgcgcagaggtgtacgggggtggttggtggtacaacaactgccaggccgcaaatcttaacggtatctactacccaggtggttcatacgatccgagaaacaattccccctatgagattgaaaatggagtggtctgggtgagcttccggggcgccgactacagcctgcgagccgtgaggatgaaaatccgaccgctcgttactcag

SEQ ID NO: 11156 - DNA, 2598 bp, synthetic construct
  misc_feature 1..2598: note = source = /note="Description of Artificial Sequence: Synthetic coding sequence"
  source 1..2598: mol_type = other DNA
atgttcagtatgaggatcgtgtgcctagtcctgtccgtcgtggggacagcatggaccgctgattccggggaaggcgacttcctggctgaaggcggcggggttcggggtccacgcgttgtggagcgacaccagtccgcttgcaaggacagtgactggcctttttgctcggacgaggattggaactataagtgcccctctggttgccgcatgaaagggctaatcgacgaggtgaaccaggatttcactaaccgaatcaacaaattgaagaactctttattcgagtaccagaaaaacaataaagactcccacagtctgactactaatattatggagatcctgagaggtgacttttctagcgctaacaacagggacaacacctacaacagggtttctgaggacctacgctcacgcatagaagtgcttaaacgtaaagtaattgaaaaggtccaacacatccagcttcttcagaaaaatgtaagagcgcagctcgtggacatgaagagactggaggtggacatcgacattaagatccgctcctgccggggctcctgcagtcgggccctggccagggaggtggacctcaaagattatgaagaccagcagaaacagctcgagcaggtgatcgccaaggacctgttgccaagtcgcgacaggcagcacctcccactcatcaaaatgaagccagtgccagacttggtgcctgggaacttcaagtctcagctgcagaaagtgcccccagaatggaaagccctgaccgacatgccccagatgaggatggagctcgagagaccaggggggaacgagattacacgcggcggttccacaagttatggcaccggatccgaaactgaatccccacgcaacccgtcctcagctggcagctggaactccggaagcagtggacccgggtccacaggtaatcggaatccgggatcaagcggaaccgggggaactgccacctggaaacctggctcatctggtcctggcagcaccggaagttggaatagcggctctagtggtactggctccacgggcaatcagaatcccgggtcccccaggccaggctccacgggtacctggaacccaggttcctccgaacgggggtccgccgggcattggactagcgagagttcagtcagtgggtccactggacagtggcattcagaaagcgggtcttttagacccgactccccaggctccggcaacgcgcgtccaaataaccccgactggggaacatttgaagaggttagcggaaacgtgagtcctggcacgaggagagaatatcacactgagaagctagtcacctctaaaggggacaaggagttacgcacagggaaagagaaagtgactagcgggtcaaccacaaccacccgacgtagctgctctaagactgtgaccaagaccgtgataggaccagatgggcacaaagaggttaccaaggaggtcgtgacatccgaagacggaagtgattgccccgaggccatggaccttggcaccctctccggtatcggcacactggatggcttccgacacaggcacccggacgaggccgcttttttcgacaccgctagcactggaaagaccttccccgggttcttttcccccatgctgggcgaattcgtgtctgaaaccgagtcccgaggatcagagtctggcatttttacgaatactaaggagagtagcagccaccacccaggaatagctgagtttccttcgcggggcaagagttcgagctactcgaagcagtttactagcagcactagctacaataggggcgacagcaccttcgaaagtaagtcttacaagatggctgatgaggccgggagtgaggctgaccacgagggaacacactctacgaagcgagggcacgcaaagtcgcgccccgtgagagactgcgatgacgtgctgcagactcatccaagcggtacgcagtccgggattttcaacattaaactcccgggctcctcaaagatcttcagcgtgtactgtgatcaagagacctctctgggcggctggctgctgatccagcagcgcatggatgggagcctaaatttcaaccgaacctggcaggattacaaaaggggttttggcagccttaacgatgaaggcgagggtgagttctggctggggaatgattaccttcacctgctgactcagcgcggctccgtgcttcgagtggagctcgaggattgggccgggaacgaggcctatgctgagtatcattttagagtcgggagtgaagctgagggttacgccctgcaggtctcttcgtacgagggtaccgccggggatgcacttatcgaaggatcagtggaagagggggcagaatacactagccacaacaacatgcaattcagtacattcgacagggatgctgatcaatgggaggagaattgcgctgaggtttatgggggcggctggtggtacaacaattgtcaggcagcgaacctgaacggcatttactaccctggcggttcctacgatccccgtaataacagtccgtatgagattgaaaacggtgtcgtctgggtgtctttcaggggagccgactattccctgagagccgtccggatgaagataagacccttagtcacacag

SEQ ID NO: 11157 - DNA, 2598 bp, synthetic construct
  misc_feature 1..2598: note = source = /note="Description of Artificial Sequence: Synthetic coding sequence"
  source 1..2598: mol_type = other DNA
atgttttcgatgcgtattgtctgcctcgtcctttcagtagtcgggacagcgtggacagcggacagcggtgaaggggactttctggctgaaggcggaggagtccgcggcccccgagttgtcgagcggcaccagagcgcctgtaaagactctgattggcctttttgctccgatgaggattggaactataaatgtcctagcggctgtaggatgaagggcctcattgatgaagtaaaccaggatttcaccaacaggattaataaactgaaaaatagtctctttgagtaccaaaaaaacaataaagattcccactcactgaccacgaacatcatggagattctgcggggcgatttctcgtccgcgaacaatcgagacaacacatataacagagtctctgaagacctgcgcagtcgtatagaagtccttaagcgcaaagtaattgagaaggtgcagcacatccagctactgcaaaagaatgtccgagctcagctggtggacatgaaacgcctcgaggtggatatcgacatcaaaattcgttcctgtcgtggatcctgttcaagggcgctggcgagggaagtcgacttaaaggactacgaggaccaacagaagcaactggagcaggttatcgctaaggatctccttccatctcgagaccgccaacacctacccctgattaaaatgaaaccggtgccagatctggtaccaggcaattttaaatcccagttgcagaaagtacccccagagtggaaggcccttacagacatgccgcagatgcggatggagttggaaagacctggtggtaacgagatcacacgaggaggaagcacctcttatggaacgggctcagagactgaatcaccccgcaatccatccagcgccggcagctggaacagcggctcaagtggccctggttccacaggaaaccgtaatcctggttccagtggcaccggtggcaccgccacttggaagccagggtccagcggccccggaagcaccgggtcttggaattctggatcctcaggaaccggcagcacaggcaaccagaatcctgggtccccgagaccgggttcaacaggaacctggaaccctggttccagcgaacgtggatcagcaggtcactggacctcagagagttccgtcagcggtagcaccgggcagtggcactctgaatccggctcatttagacccgacagcccaggcagcggcaatgccagaccaaataaccccgattggggtacgttcgaggaagtaagtgggaacgtttcacctggcacacgccgggagtatcacaccgagaaacttgttacgtccaaaggcgataaggaactacgcacaggcaaggaaaaagtgacaagcggaagcaccaccacaactaggcggagctgttccaagacggtcactaagaccgtgataggccctgacgggcataaagaggtcacaaaggaagtggtgacaagtgaagatgggtcagattgtccagaggctatggacctgggcaccctgtcaggcatcggcactctggacggatttcgccaccgccaccccgacgaggctgccttctttgacacagcctcaactggtaagaccttccccggatttttttcccctatgctcggcgagttcgtgagcgagaccgaaagccgaggcagcgagtccggaatctttacaaatacaaaagaatccagttcccaccaccctggtattgcagagttccctagtagggggaagagcagctcgtattcaaaacagttcacgtcctctacttcttacaaccgcggagattcaacctttgagtcaaaatcctacaaaatggccgacgaggctgggtccgaagccgaccacgaggggacccactccaccaaaagggggcacgcgaagtccaggcccgtacgggactgcgacgacgtcctccaaactcatccgagcgggacccagtctgggatatttaatatcaagctaccaggaagcagcaagatcttcagcgtatattgtgatcaggagacaagcctgggtggctggcttctgattcagcagcgcatggatggatctctgaatttcaacagaacctggcaggactacaagcgggggttcgggagcttgaatgatgagggcgaaggtgaattctggttgggaaatgattatctgcatttgctgacacagcgaggttccgtgcttcgcgtggagttggaagactgggctgggaacgaggcgtatgcagagtatcattttcgggtgggctccgaggctgagggttacgctctgcaagtctcttcttacgagggaaccgcaggggatgccttgattgagggctctgtggaggagggcgccgaatacacctcccacaataacatgcagttctctacctttgaccgggacgcagaccaatgggaggaaaattgcgccgaagtttatggtggcggttggtggtataacaactgccaggcggctaacctaaatggcatctattaccccggaggaagctatgatccgagaaataattctccttacgagatagagaacggcgtcgtttgggtctcctttcgaggcgcagactactcgcttagggccgtcaggatgaaaatccgaccccttgtgacacag

SEQ ID NO: 11158 - DNA, 2598 bp, synthetic construct
  misc_feature 1..2598: note = source = /note="Description of Artificial Sequence: Synthetic coding sequence"
  source 1..2598: mol_type = other DNA
atgttctccatgcggatcgtgtgtcttgtgcttagcgtggttggaaccgcatggacagcagactcgggagagggagactttctagctgaaggtggaggagttcgtggaccacgagttgtagagcgacatcagtcggcttgtaaagattcagactggccattttgctctgacgaagattggaactataaatgtcctagcggttgtaggatgaaagggctcatagatgaagttaatcaagactttacaaaccgaatcaacaagttaaaaaattcactgtttgagtaccagaagaataataaagattcacattccctcacaactaacattatggaaatattgaggggagatttctcctccgctaacaatcgagacaatacatacaacagagtgtccgaagatctcagatcacgaatcgaagtgctaaagagaaaagtgattgaaaaagttcaacatattcaacttctccaaaaaaatgtacgagctcaacttgttgatatgaagagacttgaagtcgacatagatattaaaattagatcttgtcgtggctcatgctcacgtgcacttgcaagagaggtcgatctcaaagactacgaggatcagcaaaagcaacttgaacaggttattgctaaagacctgctgccgtcacgtgatcgtcaacatttgcctttgatcaaaatgaaacctgttccagaccttgtaccgggtaattttaaatcacagttgcaaaaagtcccaccagagtggaaggctttaacagatatgcctcaaatgcgaatggaactcgagaggcctggtggaaacgaaataactagaggaggaagcacctcatatggaactggatcagaaactgagtctccacgtaatccgtcatcagccggttcatggaatagcggctcgtcaggcccaggatcgacaggtaacagaaatccaggatcatctggaaccggaggcacagccacgtggaagccaggatctagtggaccgggttccacaggatcctggaactcaggatcatcgggaactggcagtacaggaaaccaaaacccaggaagcccacgtcccggatccaccggaacttggaatccgggctcttcggagcgtggatcagccggacattggacgtcagaatcgtcggttagtggatccacaggtcagtggcattcagaatctggatcttttcgaccagactcacccggatccgggaatgctcggccaaataatcctgactggggaacttttgaagaagtgagcggaaacgtttccccaggaacgagacgtgaatatcataccgaaaagcttgttacgtcaaagggagataaagaactgagaactggaaaagaaaaggttacgtcgggatcaacgaccacaacgcgtcgttcttgcagtaagacagttaccaagacagtcattggaccggacggacacaaggaggttaccaaagaggttgtcacatcggaagatggaagtgattgtccagaagctatggacttagggactctctccggaattggaactctagacggcttccgtcaccgtcacccggatgaagctgcatttttcgatacagcctctacgggaaaaacttttccaggatttttctctccaatgctcggagaattcgtttctgagacagaatcgcgtggctcagagtctggaatttttactaataccaaagaatcctcgagtcaccacccaggaatagcggaatttccatcgcgtggaaaaagttcatcctattctaagcaattcacaagttcaacctcgtacaatcgaggagattcaacgtttgaatcaaaaagctataaaatggctgatgaggcaggatccgaggctgaccatgagggcactcacagtactaagcgcggtcatgcaaagtcgcgcccagtgcgtgattgcgatgatgtcctacagacccacccaagcggaactcaatccggaatttttaacataaagctcccagggtctagcaagattttttcagtatattgcgatcaagagacctctcttggaggatggctactcatacagcagcgaatggacggatcactaaactttaatcggacttggcaagattataagaggggatttggaagtctcaacgatgaaggagaaggagaattctggcttgggaatgattatcttcatctgctaactcaaagagggagcgttctgagagtggaattagaagattgggctggaaacgaggcttatgcagagtaccatttcagagttggaagtgaagctgaaggttatgctctacaggtatcctcatatgagggaacggctggagatgcattgattgaaggatccgttgaagaaggtgctgaatacacgtcacacaataatatgcagttcagcacgtttgacagagatgcagatcaatgggaggaaaattgcgcggaagtgtacggaggaggatggtggtataataactgccaagctgctaatctaaacggaatttactatcctggaggaagttacgacccaagaaataactctccttatgaaatcgagaatggggtcgtgtgggtgtctttccgcggtgctgattattcattgagagctgtacgtatgaagatcagacctttagttactcag

SEQ ID NO: 11159 - DNA, 2598 bp, synthetic construct
  misc_feature 1..2598: note = source = /note="Description of Artificial Sequence: Synthetic coding sequence"
  source 1..2598: mol_type = other DNA
atgttcagtatgcgaattgtttgtctcgttttatctgtggtcggaactgcgtggacagccgatagcggcgagggggactttttagcggaaggaggcggagtacgcgggccgagggtcgttgaacgccatcagtcggcgtgtaaagactccgactggccgttttgttctgatgaagactggaattataaatgtccgagcggctgtagaatgaaagggctgatcgacgaggttaaccaagattttacaaaccgtattaacaaactgaagaattctttatttgagtaccaaaaaaacaacaaggatagccattcgctcacaactaacattatggaaatcttaaggggagacttctcttcggccaacaaccgcgataacacctataatagagttagcgaagatctgcgctcgaggatagaagtattaaagcgaaaagtaatcgaaaaagtgcagcatatccaattattgcaaaagaacgttcgtgcacaacttgtcgacatgaagcggctggaggtcgacattgatataaagatccggagctgtcgtggaagctgctcacgcgcactcgccagagaggtagacctgaaagattacgaagatcaacaaaaacagttagagcaggtcatcgctaaagaccttttgcctagcagagatcgccagcatctaccgttgattaaaatgaagcccgttcctgatcttgtgccgggaaactttaaatcacaactgcagaaagtccctccagaatggaaagcacttactgatatgcctcaaatgcgtatggaattagagcgacctgggggaaatgagattacacgaggaggctctacttcatacgggacaggaagtgagacagaaagtccgagaaatccgtctagcgctggatcatggaattccggatcttctggcccgggctcaactggaaatagaaaccctgggagcagcggcacagggggcaccgctacatggaagccaggctcatctggcccgggctctacgggatcatggaattccggatcatccggcaccggaagcacaggaaaccagaatcctggttctcctcggcctgggtcaactgggacgtggaaccccggttcaagcgaacgagggtctgccggacactggacaagcgaatcatcagtgtctggctctacaggacaatggcattccgaatcaggatcatttaggccggatagcccgggcagcggtaacgcgcggcctaataatccggattgggggacctttgaagaggtttcaggtaacgtttcaccgggtacgcgcagagagtatcatacagaaaagttagtgacaagtaaaggagacaaagagcttcggacggggaaagagaaagtcacatcaggaagtacgaccacgacgaggaggtcgtgttctaaaactgtgacgaaaacagtcattgggcctgatgggcacaaggaggttacaaaggaagttgtcacgtctgaggacggctctgactgtccggaagcaatggatttaggcacactgtctggcattggtacgctggatggattcagacacagacatcctgatgaagcggcattcttcgacacggcatccacaggtaaaacgtttccgggattcttttcaccgatgctgggagaatttgtttcagagacagaatcacgtggctctgaaagcggaatctttacgaatacaaaagaatcctcctcacatcatccaggtatagccgagtttccgagccgcggcaaaagctcaagctattccaaacaatttacgtcatcaacgagctataacagaggggactcaacatttgagagcaaatcttataaaatggcggacgaggcgggtagcgaggcagaccacgagggtacgcatagcacgaaacgcggtcatgcgaagtctagaccagtcagagattgtgatgatgttttacagacacacccatccggaacccagagtggtatttttaatattaaactgccaggcagcagcaaaattttttctgtctattgcgatcaggagacctctttgggaggttggcttctaattcaacaaagaatggatggcagcttaaattttaacaggacatggcaagattataagaggggttttggtagccttaacgacgaaggtgaaggcgagttttggttgggcaatgactatcttcatttgctgacgcaaagaggcagtgtcctacgagttgaactggaggattgggctggcaatgaggcctatgccgaatatcattttcgcgtaggctcagaagccgaaggatatgcccttcaagtttcatcttatgagggcaccgcaggagacgcgttgattgaagggtctgtagaggaaggggcagaatacacatcgcataataatatgcagttctctacatttgatcgtgatgcagatcaatgggaagagaattgcgctgaggtttatggtggcggctggtggtacaacaattgccaagccgcaaatttgaatggaatctattatccgggtggatcctatgacccaagaaataatagcccatatgaaatcgaaaatggggtagtctgggtcagctttcgaggcgcagattattctcttcgggcagttaggatgaaaattcgccctttagtaacccaa

SEQ ID NO: 11160 - DNA, 2598 bp, synthetic construct
  misc_feature 1..2598: note = source = /note="Description of Artificial Sequence: Synthetic coding sequence"
  source 1..2598: mol_type = other DNA
atgttctcaatgcggatcgtgtgtctggtgttgagtgtggtgggcacagcctggaccgctgatagtggcgagggcgattttctcgctgagggcggaggcgtgagaggcccaagggtcgttgaaaggcaccagtccgcctgcaaggactctgattggccattctgttcggacgaggactggaactacaagtgtcctagcggctgtcgaatgaagggactgatcgatgaggtgaaccaggatttcaccaaccggatcaacaaactgaagaatagcttattcgagtaccagaagaacaataaggactcccactcactcactaccaatattatggagatactccggggtgattttagttccgcgaataacagagacaacacctacaatcgggtgtcggaggacctgaggagtcgaatcgaagtgttaaagcgcaaggtgatagagaaagttcagcatattcaactgttgcagaagaatgtccgcgcgcaattggtggacatgaagcgacttgaggtggatatcgacattaagatcaggtcttgccgggggtcttgctctcgggcattggcccgagaggtggacctaaaagactatgaggatcaacagaagcagctggaacaagtcattgctaaggatttactgccgagcagggataggcagcatttacccctcatcaagatgaaacctgttcctgacctggtacccggtaacttcaagtcacagcttcaaaaggtgccccctgaatggaaggccttgacggacatgccacagatgagaatggagttggaacgaccaggtggcaacgagatcactaggggagggtcaacatcctatggcaccggcagcgagaccgaaagcccccgcaaccccagtagcgctgggtcttggaactctgggtcttcggggcctggatctaccggtaacaggaatcctggttcctccggcacgggcggcacagcaacatggaagcctgggagttccgggcccgggagtacaggcagctggaatagcggcagttcaggcaccggctctaccggtaaccagaaccccggatcaccacgcccaggatccacggggacttggaaccctggttccagcgaacgtggctccgctggacactggacctcggagtcttcagtgagcggttcaaccggacagtggcactcagagtctgggagctttaggccagattctccaggatctgggaatgcaaggcctaacaacccagattggggaacatttgaggaagtttccggcaacgtgtcgccaggcacgcgacgcgagtaccatactgaaaagctcgtgactagcaaaggcgacaaggagctcaggacaggcaaagaaaaggttacaagcggaagcaccacaacgacccggcggtcttgctctaaaactgtgactaaaacagttattggaccagatggacataaggaggttaccaaagaagttgtcacaagcgaggacggctccgactgtcccgaggctatggacctgggcaccctgagcggcataggtacattggacgggttccgccacaggcacccagacgaggccgcctttttcgacacggcatccaccgggaagaccttcccagggtttttcagcccaatgctgggtgaattcgtctctgagactgagagtagagggtccgaaagcggaatctttacgaacactaaagagtcaagctcccatcatccggggattgctgagtttccatcaagaggtaaatcttcctcatacagcaagcagtttacctcttcgacatcatacaaccgcggggatagcacctttgaatctaagtcttataagatggctgatgaggcaggctccgaagcagatcatgaaggcacacacagtaccaagagggggcacgctaaatcaagaccagtgagagattgcgatgacgtgctgcagacgcatccttcagggacacagagtggcatattcaatatcaagctccctggctcatccaaaatcttcagtgtctactgtgaccaagagacttccttaggtggttggttactgatccaacagagaatggatggcagtctcaattttaaccgcacctggcaagactataagaggggctttgggtcgctgaacgatgagggtgagggggaattttggctcggcaatgattatctccaccttctcacccaaaggggcagtgtgctgagagtggagctggaagattgggccggtaacgaagcgtatgccgagtaccattttcgagtgggctcagaagccgaaggatatgcgttacaggtgtcttcctacgaggggacagccggggacgccctcatcgagggatcggtggaagagggcgcggagtatacaagccacaataacatgcaattcagcacctttgatagagacgccgaccagtgggaagaaaactgtgctgaggtttacggaggtggatggtggtacaacaactgtcaggcagcgaacttaaatggcatctactatcctgggggctcttatgacccaaggaataactccccttatgaaattgaaaatggagtagtgtgggtgtcttttcgcggcgcggattactctttgagagctgtgcggatgaagatccgacctctcgtaactcag

SEQ ID NO: 11161 - DNA, 2598 bp, synthetic construct
  misc_feature 1..2598: note = source = /note="Description of Artificial Sequence: Synthetic coding sequence"
  source 1..2598: mol_type = other DNA
atgttctccatgcggattgtctgcttagttctgtccgtagtgggaaccgcttggacagctgactctggtgaaggcgatttcttagcggagggcggcggcgtacgtggaccgcgggtggtggagagacatcaatcagcatgcaaggactcagactggcctttctgctcagatgaagattggaattacaaatgtcctagcgggtgcaggatgaaggggcttattgatgaggtgaatcaggacttcaccaaccggatcaataagctaaagaattctctgttcgagtatcaaaagaacaataaagactcacatagtttgacgacaaatatcatggaaattctcagaggcgacttctcatccgcaaataatcgggataacacatacaaccgcgtgtcagaagatttgcgctctaggattgaagtgcttaaacgtaaagtaatcgagaaagtgcagcatatccagctgctgcagaagaatgtgagagcccaactagtcgatatgaagaggctggaggtggatattgatatcaagattcggagttgtcggggttcttgcagcagagctctggctagggaggttgatctaaaagactacgaggaccagcaaaagcagctcgaacaggtgatcgcaaaggaccttttgccgagtcgggataggcagcatttacctttgatcaaaatgaagccggttcccgaccttgtgccggggaatttcaagtctcagctgcagaaggtcccaccagagtggaaagccctgaccgacatgccccagatgagaatggaactggaaaggcctggggggaacgagataaccagaggcggtagcacttcatacgggactggaagtgagacagagtcaccacgcaatccttcttccgccgggtcgtggaactctggatcctcaggacccggttccaccggaaatcgcaatccaggttcaagtggcaccggcggcactgctacctggaagcctggaagtagcggaccagggagcactgggtcctggaactccggaagctcaggaacaggttcaaccgggaaccagaatcctggaagtcccaggccgggttcaactggcacttggaatccgggctcctccgagcggggttcagccggacattggacttccgagagcagcgtaagtggttctacagggcagtggcatagcgagtccggatcattccgacccgatagccccggaagcggaaacgctcgcccaaacaaccctgattggggtacattcgaggaagtctcgggtaacgtgtcacccggaacacggcgtgaataccacacggagaaactagtaacgtcaaagggagacaaagagctcagaactggtaaggagaaagtcacgtcgggctctactacaacgactcgaagatcttgctccaaaaccgtgaccaaaactgtgatagggccggacggacacaaggaagtgactaaggaggtagtgacctccgaggacggatctgattgccccgaggcaatggatctgggtacattaagcggcatcgggacactggatgggtttcgacatagacatcccgacgaggctgcctttttcgacactgcgagcactggaaagacctttccggggtttttttccccaatgttgggtgagttcgtcagtgagacggagagtcggggttctgagtcaggtatctttacaaataccaaggagtcctcctcccaccaccccggcatcgccgaattccccagcaggggaaagagctccagctattcaaaacagttcacatccagtacttcctacaaccggggtgattctacttttgaaagcaaatcatacaaaatggccgatgaagccggcagtgaggccgaccacgagggtactcattctaccaaacgcggtcacgctaaaagtaggccagtgcgcgattgcgatgacgtcctgcagacgcacccctcaggaacccaatccggcatctttaacatcaagcttccgggcagtagcaagatcttctctgtttactgcgatcaggagacatctctgggagggtggctactgatccagcaaagaatggacgggtctctcaattttaataggacttggcaggattacaaacgcggctttggttcactcaatgatgagggggagggggagttttggttgggaaacgactatcttcacctgttgacccagaggggatccgtgcttcgggttgaactcgaagactgggcgggaaacgaggcttatgccgagtaccactttcgggtgggttctgaagccgagggctacgctttgcaggtctcaagttacgaaggaacagccggtgatgcactaattgaggggtcggtcgaagagggagctgagtatacaagccacaacaatatgcagttcagcacgtttgatcgggatgccgatcagtgggaggaaaattgtgccgaggtctacgggggaggttggtggtataataactgtcaggcggctaacttgaacggaatctactacccagggggcagctatgatccgaggaacaatagcccatatgaaattgagaatggcgtcgtgtgggtctcctttcgcggtgcagactacagcctgcgtgcagtcagaatgaagattagacctcttgtaactcag

SEQ ID NO: 11162 - DNA, 2598 bp, synthetic construct
  misc_feature 1..2598: note = source = /note="Description of Artificial Sequence: Synthetic coding sequence"
  source 1..2598: mol_type = other DNA
atgttctcaatgcgcattgtgtgcctagttctgagcgtagttggtacggcttggacggccgactccggggagggcgactttctcgcggaaggcggcggcgtccgtggcccccgtgtggtggagcgacatcagagtgcctgtaaggacagcgattggccgttttgctcagatgaggactggaattacaaatgtccatcagggtgcagaatgaaaggcctgattgacgaggtcaatcaggacttcacaaatagaattaacaaactcaagaatagtctgtttgaatatcaaaagaataacaaggattcccactctctcactacaaacattatggaaatcctcaggggcgattttagtagcgctaacaaccgggacaacacctacaaccgtgtcagtgaggatctcagatctaggattgaggttttgaagaggaaggtgattgaaaaagtgcagcacatccaattgttgcagaagaatgtacgggcacaattagtggacatgaagagactggaggtggacattgatatcaagattaggtcatgtaggggtagctgtagccgggctctggctagagaagtggatctgaaggactatgaagatcaacagaagcagttggaacaagtcatagcaaaggaccttctgccatcacgagaccgtcagcatctcccactgattaagatgaaacctgtccctgatctcgtgcctggcaactttaagtcacagctgcaaaaagtgcccccagaatggaaggccctaactgatatgccccagatgagaatggagctcgagagacctggaggtaatgaaataactagggggggcagcacgagttacgggactgggagcgagacagaatcccccaggaatccctcttctgcaggttcctggaacagcggtagctctggacctggatctactggcaatcgtaacccggggagctcagggaccggggggactgccacatggaagcccgggtcgagcggacctgggtcgactgggtcttggaactccgggagctctggaaccgggagtacaggaaaccagaaccccggcagcccccggccaggaagcactggcacttggaacccgggctcaagcgagcgggggtctgcgggacactggacttcagaatcttccgtttccggatccactgggcaatggcacagtgaatccggaagcttcagacctgactcgcctggcagtggaaacgctagacctaataatccggattgggggacattcgaggaggtgagtggcaatgttagtcccggcaccaggcgggaataccacaccgagaaactagtaacctctaaaggcgacaaggaattaagaacgggcaaagaaaaggtaaccagtggcagtactacaactacacggagaagttgtagcaaaacagttactaagaccgtgataggaccggacgggcacaaagaagtgactaaggaggtcgtcacttccgaggatggctctgattgcccagaagcgatggacctggggacactttccggaatcggcacactggatgggtttaggcaccggcacccagacgaggccgccttctttgacacggcgtcgacgggcaagacatttcccggattcttctccccaatgctgggggagttcgtgtcagaaacggaatcccgcggatcagagtcggggatcttcaccaacactaaagagtccagcagccaccaccccggaattgctgagttcccctctcgaggtaagtcttcatcatactctaaacagttcacatctagtaccagttacaatcgaggcgattccacttttgaaagtaagtcatacaagatggcagacgaagccggctcagaggcagaccatgaggggacccatagcaccaaaaggggccatgccaagtcacgaccagttcgggattgtgacgatgtgttacagacgcatccatctggcacacagagcggcatctttaatataaaattacctgggtcatctaagatctttagtgtctactgtgatcaggaaacttctcttggcggttggttgttaatccagcaacgtatggatggcagcctgaactttaatcgaacgtggcaggactacaaaagagggttcggttctctaaacgacgaaggcgagggcgagttttggctggggaacgattatcttcatctgcttacacagagagggtccgtgctgcgcgtagagctggaagactgggcgggtaacgaggcctacgcagaataccattttagggtgggctctgaggccgagggttatgccctgcaggtgagctcgtacgagggcactgccggcgatgcactcatcgagggctcggtggaggaaggggcagaatatacaagtcataacaacatgcagttttccacgttcgaccgagatgcagaccagtgggaggagaactgcgctgaggtctacggaggaggctggtggtataacaattgccaggccgcgaacctgaatgggatctactacccaggaggatcctatgatcccagaaacaacagtccttacgaaatcgagaacggtgtggtctgggtgtcatttcgaggagccgattacagcctgagggccgtcagaatgaagattcgcccactcgtaacacag

SEQ ID NO: 11163 - DNA, 2598 bp, synthetic construct
  misc_feature 1..2598: note = source = /note="Description of Artificial Sequence: Synthetic coding sequence"
  source 1..2598: mol_type = other DNA
atgttttcaatgagaatcgtgtgtctcgtcctctccgttgtaggtactgcatggaccgcagactcaggcgaaggtgacttcttagctgaaggcggaggcgtgcggggacccagggtggttgaacgccaccaatctgcttgtaaagacagcgactggcctttttgttcagatgaagattggaactataaatgtccgtctggctgcaggatgaagggcctgatagatgaggttaatcaagactttacgaaccgtatcaacaaactgaagaactccctgttcgagtaccaaaaaaataataaagactctcatagccttaccacaaacattatggaaattctccggggcgactttagctctgctaacaaccgagacaatacgtataaccgagtcagtgaggatctgaggagtaggatcgaggtgctgaagaggaaggtaattgagaaggtacaacatatccagctgctccagaaaaacgtgagggcccaattggtggatatgaagaggctggaagtggacattgacatcaagatacgcagttgccgcggatcctgctctcgggcgctagccagagaggttgatttgaaagattatgaagaccagcagaagcagttagaacaagttatcgcaaaggacctccttccgagccgcgatcgtcagcacctgcctttaattaagatgaaacccgtgcccgacttggtccctggtaatttcaaatcccagctgcagaaggtgcccccagaatggaaggcactgaccgacatgcctcaaatgcgcatggagctcgagaggccagggggcaacgaaattacaagagggggcagtacatcttacgggacaggttcagagactgaaagccctcggaatcctagctccgccggttcctggaactcgggtagctccggccccgggagtactgggaatagaaacccgggttctagcggcacaggggggacagccacatggaagcctggaagcagtggccccgggagcaccggaagctggaattctggctccagcggtaccggctccacgggtaatcagaatcctggatcccccagaccaggctccactgggacttggaaccctggatcttccgagcggggatccgccggccattggacatcagagagctctgtgtcaggctcgacaggccaatggcactcagaatcgggctcctttcggccagattctccagggtcggggaacgcacgtcctaacaatcccgattgggggacatttgaagaagtcagtggaaatgtgagtccaggcacccgaagagagtaccatactgagaaattggttacctctaaaggggataaggagctccggacaggcaaggagaaggtaacatccggcagcactacgaccactaggcggtcttgtagcaaaacagtaacgaagaccgtcataggtccggatggtcacaaggaggttacaaaagaagttgtgacttcagaggatggtagcgactgcccggaggcaatggatctaggcacacttagcgggattggaaccctcgacggattcaggcaccggcaccctgacgaggcggctttcttcgataccgccagtaccgggaaaaccttccctgggtttttttcccccatgctgggcgagtttgtcagcgagaccgagagtcgcgggagtgagtccggaatctttacaaacaccaaggagtcgtcttcccatcatcctggtatcgctgagttccccagtagagggaagagctcaagctactccaagcagttcacttcctccacttcatacaaccgcggagattctacttttgagagtaaatcttacaagatggccgacgaggccggttccgaagcagatcatgagggcacccatagtacgaagagaggccacgcgaaaagccgccccgtgagagattgcgacgatgtgttgcagacccatccctctggtactcagtctggaatcttcaatatcaagttgccgggctcttccaaaatcttctctgtgtattgtgaccaggaaacttcactaggtggttggctgctgattcaacaacgtatggacggttccctaaactttaatcggacctggcaggactacaagcgcgggtttggctccctgaatgatgaaggagaaggcgagttctggctcgggaatgactacttgcacctgcttactcagagaggtagcgtcctgagggtcgaactggaagattgggctggaaacgaggcttacgccgagtatcacttccgcgtggggagcgaagccgaaggatacgccctccaagtgagctcctatgaaggaactgccggtgatgccttgattgaagggtcagtggaagagggagcagagtacacaagccacaacaacatgcaattctcaacattcgacagagatgccgaccagtgggaagaaaactgcgctgaggtatacggtggaggctggtggtacaacaactgccaggccgcaaatctgaatggaatctattaccccggcggctcctacgaccctcgaaacaacagcccttacgaaatcgaaaatggggtggtctgggtcagtttcaggggggcggactacagccttagagccgttcgcatgaagattcggcccttagtgacacaa

SEQ ID NO: 11164 - DNA, 2598 bp, synthetic construct
  misc_feature 1..2598: note = source = /note="Description of Artificial Sequence: Synthetic coding sequence"
  source 1..2598: mol_type = other DNA
atgttttctatgcggatcgtgtgcctcgtcttgtcggtagtgggaaccgcttggaccgccgactccggggagggagacttcctcgccgagggcggcggcgttaggggcccaagggtagttgagcgtcatcaatccgcatgcaaggactctgactggcccttttgctctgatgaggactggaattacaaatgtccttcaggatgccgcatgaaagggcttatcgacgaggtcaaccaggacttcacaaataggattaataagctgaagaactcactgttcgaatatcagaaaaacaataaggactcccattctctgaccactaacatcatggaaattctgagaggcgacttttccagtgctaacaatagagacaatacatataacagggtgtcagaggatctgcgtagcaggattgaagtccttaagcgcaaagtaatcgagaaggtgcaacatatccaactgttgcaaaagaatgtgagagcgcaactggtagacatgaagcgactggaggtggatatcgacatcaaaatcaggtcatgcagaggctcctgttctagggcattagctagggaggtggacctgaaagactacgaggatcaacagaaacagctggaacaggttatcgccaaggatctactcccgtcaagagaccgacagcacctgcctctgatcaagatgaagccggtaccagacctcgtccctggcaattttaaatcacagctccagaaggtaccgcccgaatggaaggccctgaccgatatgccgcagatgcgaatggaacttgaaaggccaggaggcaatgagataacaaggggcggctccacaagttatgggacagggtccgagacagaatctccaagaaacccctcaagtgcaggatcttggaactccggctcatctggcccaggctctacagggaatcgaaaccccggctcctcgggcacaggcggaacggccacatggaagcccggtagttccggccccggctccaccggctcctggaatagcggatctagcggaaccggctcgacgggtaatcagaacccgggcagtcctagacctggctctaccggtacctggaaccccggatcgtcagaacgaggctccgctggccattggactagcgaaagctctgtgtcgggcagcacgggccaatggcactctgaaagcggttcctttaggccagattcaccaggatctggaaatgcaaggcccaacaacccagactggggcacatttgaggaagtctccggaaatgtgtcgcctgggaccaggagggagtatcacacggaaaaactggtgacatctaaaggagataaggaattgagaacgggaaaagaaaaggttacctctggatccacaaccaccactaggagatcctgtagcaagaccgtcactaaaaccgttataggccctgacggtcataaagaagtgaccaaggaagtcgtcacctctgaggatggcagtgattgccccgaggccatggatctcggcacgctgtcgggaataggtactctggatggttttagacaccgccaccccgacgaagccgcattttttgacaccgcgtccacagggaaaaccttccctggtttcttcagccccatgctcggggagtttgtgtcagaaactgagtctagaggatcggaaagcgggatcttcactaacaccaaggagtccagctcccaccacccggggattgccgaatttccatccaggggcaaatctagctcctactccaaacaattcacctcttccacctcctacaaccgaggagactcaacttttgaaagtaagtcctacaaaatggccgatgaagccggaagcgaagctgatcacgaaggaacccacagcacaaagcgaggccacgccaagagcaggccggttagagattgcgatgatgtactgcagacacacccttcgggaacgcagtccggaatcttcaatatcaagctgcctggctcttctaaaatcttttccgtgtactgcgatcaggaaacttctttgggaggctggctgttgattcagcagcgaatggatggttctcttaactttaatcgaacctggcaggactataagcgaggattcggctccttaaatgacgagggggaaggggaattctggttaggtaacgactacctgcacctcctaactcagagaggctcagtgctgagggttgagttggaggactgggcagggaacgaggcgtatgcagagtaccatttccgcgtcggctctgaagccgagggctatgcgctgcaggtaagttcttacgaaggcacagcaggtgacgcattgatcgagggaagcgttgaagaaggggctgagtatacttcacacaataacatgcaattctctacctttgatagggacgcagaccagtgggaagagaattgcgccgaggtgtatggtgggggctggtggtacaacaactgccaggcagccaatttgaacgggatttactatcccggtggatcttacgatccaagaaacaattctccatacgaaatcgagaatggcgtggtgtgggtttcattccgtggagcggattattcgctgcgggctgtcagaatgaagattcgcccactggtgacacag

SEQ ID NO: 11165 - DNA, 2598 bp, synthetic construct
  misc_feature 1..2598: note = source = /note="Description of Artificial Sequence: Synthetic coding sequence"
  source 1..2598: mol_type = other DNA
atgttttcaatgagaatagtttgcctggtgctgagtgttgtcggcaccgcctggactgcagacagcggcgagggtgatttcctggcagaggggggcggggtccgtggccctagagttgttgaacggcatcaatcagcctgcaaggattctgactggcctttttgctctgatgaagattggaactataaatgcccaagcgggtgccgcatgaaaggcttaattgacgaggttaaccaagacttcacaaaccggataaacaagctgaagaattctctctttgagtaccagaagaacaataaagactctcattctctgaccaccaatattatggaaatcttgaggggagatttcagtagtgcaaacaatcgcgataatacatacaacagagtctcagaagacttgaggtccagaattgaagttctgaaacggaaagttatagagaaagtgcagcacatccagctgttgcaaaaaaacgtgcgagcccaacttgtggatatgaaacgtttggaagtggacattgatattaaaatcagatcatgccgcggaagctgctcacgagcactggcgagagaagtcgacctcaaagattatgaggatcaacagaaacagctggagcaggtgattgccaaggatttactaccctcaagggacaggcagcatctaccactaattaaaatgaaacctgtcccagacttagtgcccggcaatttcaaatcccagcttcagaaggtgcctccagagtggaaagccctgaccgacatgccccagatgcggatggagttggaacggccaggggggaatgagatcaccaggggcggttctacaagctatggcactggctctgaaacagagtcgccccgcaaccctagtagtgcgggatcttggaatagcggaagctctggccccggctctaccggcaatcggaaccctggcagcagcggcacgggcggaaccgcaacctggaagcccggctccagcggtcccgggagtactgggagttggaactctggaagcagcggtacaggttctacaggcaatcagaacccaggctcgccgaggccaggctccactggaacttggaacccaggctcctcagagcgcggttcagccggccactggacctccgagagcagcgttagcggcagtacaggacaatggcatagcgagtccggtagcttcaggccagactcccccggctccggtaatgcgcgcccaaataaccctgactgggggacgtttgaggaagtaagtggtaatgtgagccctggaacccggcgcgagtaccatactgagaagctagtgacatctaagggcgacaaggagttgaggaccggaaaggagaaagttacctccggtagcactacgaccacccgccgatcctgcagtaaaaccgtcactaaaaccgtgatcgggccggacgggcataaggaggtgactaaggaggtggtaacctctgaggatggctcggattgtccagaagccatggacctaggcacactgtcgggcatcggcaccttggacggatttcggcacagacaccctgatgaggccgcctttttcgacacagcctccaccggaaagacgtttcccggtttcttttcacctatgcttggcgagtttgtgtccgaaacagagtctcggggaagcgagtccggcatcttcacgaacacaaaggagtcctcctcacaccaccccggaatcgctgagtttcctagtagaggcaagtcaagttcctacagtaaacaatttaccagttccacatcatacaaccgcggtgactccactttcgagtctaaaagttataagatggctgatgaggccggttccgaggctgatcatgaaggaacacactctacaaagcgtggccacgctaagtcgcggccagttagggactgtgacgacgtgctccagacacacccttccgggacccaaagcggcattttcaacatcaaattgccaggaagctctaaaatctttagcgtgtactgcgaccaggaaacgtcactcggcggctggcttctgatccaacagcggatggacggctctcttaatttcaatcgaacatggcaggattacaagcgggggttcgggtctctgaatgatgaaggagaaggcgagttttggctgggcaacgattatcttcatcttctgacccagcgaggaagcgtcctgcgagtggagctggaggactgggctggaaatgaggcctatgcggaataccacttccgagtcggatccgaagccgagggctatgccctgcaggtcagtagctacgagggaaccgccggggatgcccttatcgagggaagcgtggaagagggggcggagtatacatctcataacaatatgcagttttctacatttgaccgcgatgcagaccagtgggaggagaactgtgctgaagtgtacggcggtgggtggtggtataataactgccaagcagccaacctgaacggtatctattatccaggaggctcctatgacccgcgcaacaattcgccatacgagatagagaatggggtggtgtgggtaagttttagaggtgctgattatagcttgagggccgttcgcatgaaaattagacccttagtgactcaa

SEQ ID NO: 11166 - DNA, 2598 bp, synthetic construct
  misc_feature 1..2598: note = source = /note="Description of Artificial Sequence: Synthetic coding sequence"
  source 1..2598: mol_type = other DNA
atgttcagcatgcgaatcgtgtgtctagtgctgagtgtggtcggaacggcctggactgctgatagtggcgagggcgacttcttggcggaggggggcggcgtgaggggaccgcgcgtagtggagcgacaccagtcagcatgcaaagactccgactggcctttctgtagcgacgaggactggaactacaaatgcccttcaggctgccgtatgaaagggctcatagacgaagtaaaccaggacttcaccaaccgcatcaacaaacttaagaactcactttttgagtaccagaaaaacaataaagacagccacagtctaaccaccaatattatggaaattctgagaggtgacttctccagcgccaataaccgcgataacacctataatcgcgtctctgaagacctccgaagtaggatcgaggtgctgaaaagaaaggtgatcgagaaggtgcagcatatccagctgcttcagaagaacgtgcgggcccagctcgttgatatgaaacgcctggaggtcgacattgatatcaaaatcaggagctgcagggggagttgctctagagctctggccagagaagtcgacctcaaagactatgaggaccagcagaaacagctggagcaggtaatcgccaaagacctcctgccctccagggaccggcagcacctaccacttatcaagatgaaaccggttccggacttagtgccagggaatttcaagagtcaacttcagaaagtgcccccagagtggaaggccttgactgacatgccacagatgagaatggaactagagagacccggcggaaacgagataacaagaggcggttctactagttacggcacagggtccgagaccgaaagtccacgtaacccgagtagcgccggtagctggaattctgggtcctcggggccaggttctactggcaatcggaaccctggctcttctggtactggcggaacagctacatggaagccaggctcttccggccccggctccactgggtcatggaactccgggtccagtggcactgggtccactggcaatcagaacccaggctcaccaagacctggctccacaggaacctggaaccctgggagctctgaaaggggatccgctggtcactggacatccgagtcaagcgtgtctggatctactggacagtggcattccgaaagtgggagttttcgccccgactctcctggtagtggaaacgcacgtccaaataatccagactggggaacctttgaagaggtttccggcaatgtctcacctgggactagaagggaatatcacaccgagaagcttgtcacgtccaagggtgataaagagctgaggaccggtaaggaaaaggtgacaagcggcagtacaaccactaccaggaggtcttgttccaagaccgttactaagacagtaattgggccagatggacacaaagaggtcactaaagaggtcgtcacttcggaagacgggagtgactgtcccgaagcgatggacttggggactctgagtggcataggaacattggatggttttcggcatcgacacccagatgaagccgccttctttgacactgcgtcaacgggtaaaacgtttcctggattcttctcacctatgctcggagagtttgtaagcgaaacagagagtcgggggtccgaatctggcattttcactaatacaaaagaatcgagctcccatcaccccggaattgccgagtttcctagtagaggcaagagcagttcttactccaagcaattcactagtagtacttcatacaacaggggcgattccacattcgaatccaagtcctataaaatggccgatgaggctgggagtgaagccgaccacgagggtacccacagcactaagagaggccacgctaagagcagacccgtgcgggactgtgatgatgtgcttcagacacacccatctggaactcagagcggaatcttcaatatcaagctgccggggagttcaaagatatttagtgtctattgtgaccaagagacctcactgggtgggtggctcctcatccagcaacgaatggacggaagtttgaacttcaacaggacctggcaggactataagagggggttcgggtcactgaatgacgagggggaaggggagttctggctgggtaacgactatctgcatctcctcactcagagaggtagcgtgctgagggtggaactcgaggattgggccggcaatgaagcttacgccgaatatcacttccgggtggggtctgaggcggaggggtatgctttacaggtgtcttcttatgagggaaccgccggagatgccctcatagaaggatcagtggaggagggtgccgaatacacgtcccacaacaatatgcaatttagcacgttcgaccgcgacgccgaccagtgggaggagaattgcgccgaggtctacggcggtggatggtggtacaacaattgccaggcagcaaatctgaatggaatatactacccaggcggctcatatgatcctcgaaacaacagcccttatgagatagagaatggcgtcgtgtgggtgtccttcagaggagctgactattccctgagggctgtccggatgaaaatcaggcccttggttactcaa

SEQ ID NO: 11167 - DNA, 2598 bp, synthetic construct
  misc_feature 1..2598: note = source = /note="Description of Artificial Sequence: Synthetic coding sequence"
  source 1..2598: mol_type = other DNA
atgttctcaatgcgaatcgtgtgcctggtcctatcggtagtgggaacagcctggacagccgattctggggaaggagatttcctcgctgagggagggggggtaagagggcctcgggtagttgaacggcatcagtctgcttgtaaagattcagattggccattttgcagtgatgaagattggaactataagtgtccctcaggatgtaggatgaaagggcttatagatgaagtcaatcaggactttactaaccgaataaacaaactcaaaaacagtctgtttgaataccagaaaaataataaagattcccatagtctcacaactaacatcatggaaatattacggggggatttttcatcagcaaacaacagggataacacgtataacagggtgtctgaagatctgagatctcggatagaagtgctgaaacgcaaagtgatagaaaaagtacaacatattcagctgcttcagaagaacgtgcgggcccagctagtcgatatgaaaaggctagaagttgacattgatataaaaatccggtcgtgtcgcgggagttgctctagggccttagcacgggaagtcgatctcaaagattacgaagatcagcagaaacagctagagcaggtcatagcaaaggatttactcccttcacgagatagacagcacctacccctgattaagatgaagccagtgcctgatctcgtgcctggaaattttaaatctcaacttcagaaggtacccccagaatggaaagccttgactgatatgccacagatgcggatggagctggaaagacccgggggaaacgagataactcgcggagggtccacatcctatggaacagggtcggaaacagagagtccacgaaatccctcatccgcaggatcatggaattctgggtcctccggaccaggatccacagggaatcgaaaccctgggagttcagggactggggggacagccacttggaaaccaggatcttccgggcctggatccacaggaagttggaactccgggagttctgggactgggtctactgggaatcagaaccctgggtccccccgacctggatccacaggaacatggaaccccggaagttctgaaaggggaagtgcgggacactggacttccgagtcatctgttagtggatcaacaggacagtggcactctgaatcaggatctttcagaccagattcccccgggtccggaaatgcccgacccaacaatcccgattggggaacatttgaggaagtctcggggaatgtgtcacctggaacaaggcgcgaatatcacacagaaaaactagtcactagtaaaggggataaagagctacgcactgggaaagagaaagtcacttctggatctacaacaactactaggcggagttgttctaaaacagtgactaagactgtaattggaccagatgggcacaaagaagtgacaaaagaagttgttacatccgaagacgggtccgattgtcctgaagctatggatctcggaactctctcgggaatagggactttggatgggttcagacatcgacacccagatgaagccgcgttctttgatacagcatcaacagggaaaacattccctgggttcttttcccctatgctgggggaattcgtgtcagaaactgaatctcggggatctgaatcagggatatttactaatactaaagaatccagttcccaccaccctggaatagctgagttcccctctcgcgggaaaagtagtagttattcgaaacagtttacatcctcaacttcatataataggggagatagtacatttgagagtaaatcttataagatggctgatgaagctggatctgaagctgatcacgaaggaactcattcgactaaacggggacatgctaaatcccgcccagttcgggattgtgatgatgtcctccagacacacccatccgggactcagtccgggatctttaacatcaaactgcccgggtcctcgaaaatattttccgtatattgcgatcaggaaacttctttaggagggtggttacttatacagcagaggatggatgggtcgctgaattttaaccgaacatggcaggattacaaaaggggattcgggtccctcaacgatgaaggagaaggagaattttggttaggaaacgattatctgcaccttctgactcagcgggggtctgtcctcagagtggagcttgaagattgggccggaaatgaagcctatgcagaatatcatttccgagtcgggtcagaagctgaggggtatgcactacaggtatcaagttacgagggaacagcaggggatgcccttattgaggggtctgttgaagaaggggctgaatatacatcccacaataatatgcagttttccacttttgatcgggatgcagatcagtgggaagagaactgcgcagaagtttacgggggagggtggtggtataacaactgccaggcggccaatctaaacgggatctattacccagggggatcttacgatccacggaataattcaccttatgaaatcgagaatggggtggtatgggtgtctttcaggggagccgactattccctccgcgccgtacgaatgaaaataaggccactggtgacacag

SEQ ID NO: 11168 - DNA, 2598 bp, synthetic construct
  misc_feature 1..2598: note = source = /note="Description of Artificial Sequence: Synthetic coding sequence"
  source 1..2598: mol_type = other DNA
atgttcagtatgcgtatcgtctgtctagtgctctctgtggtgggaactgcatggaccgcagattcaggcgaaggagactttttagctgagggaggaggcgtgaggggacctcgggtcgtagaaaggcaccagagcgcatgcaaagactctgactggccattttgcagtgatgaagactggaattataagtgcccatcagggtgccggatgaagggactaattgacgaagtcaatcaggattttacgaatcgaataaacaagttgaagaacagcctgttcgagtaccagaaaaacaataaagacagtcatagcctgaccactaacatcatggagattttgcgtggagatttttcctccgcaaataacagggacaacacatacaacagggtttccgaagatctgcgctcaaggatagaggtgctgaagcgcaaggtcatcgagaaggtccagcacatccagctactccaaaagaacgtcagggcacaactggtggacatgaaaaggttggaggtcgatattgatataaaaatccgctcatgcagaggctcttgctcaagagctctggcccgtgaggttgatctcaaggattacgaggaccagcagaagcagttagaacaggtcatcgctaaagacttgctaccaagccgtgaccgccagcacctgccactgataaagatgaagcctgtccccgaccttgtaccagggaattttaagtcccagcttcagaaagtgccgcccgaatggaaagcattgactgatatgcctcagatgcgtatggagctggaacggccgggtggtaacgagattaccagaggaggctccacctcttatggcacaggatccgaaacagagtccccaaggaatcctagcagcgcagggtcctggaactctggctctagcggcccgggttccacaggaaatcgtaacccagggtcctccggaactggcggcacggcaacctggaagcccggctctagcgggcccggatctactggttcctggaactctggcagctccggcactggaagcaccggcaaccagaaccctggcagccccagacccggctccaccgggacctggaatccaggtagttccgagcgaggcagtgctggccactggacatccgaatctagcgtctccggctcaaccggtcagtggcactccgagtcaggcagtttccggcctgacagcccaggctcagggaacgctcggccaaataaccctgattggggaacgtttgaggaggtctccgggaatgttagccctggcacacggcgcgagtatcatacagagaaactcgtcacgtctaaaggcgataaagaacttcggacgggaaaggagaaggttacgtctggctcaactactaccaccagacgtagctgttccaagaccgttactaagaccgtgattggacctgatggtcacaaggaagtcaccaaagaagtggtgacctcagaggatgggtccgactgcccagaggcaatggatctcggaaccctgagcggaattgggacgctagacggctttcgtcaccggcacccagacgaggctgcgttttttgacactgccagcacaggaaaaactttccccggcttctttagccccatgctgggagagtttgtgtcagaaacggagtcgagggggtcagaatcaggcatcttcacaaacactaaggaatcctcatctcatcatcccgggattgctgaattccctagccgaggcaagtcttcctcctattccaaacagttcacgtcctcaactagttataatcgtggtgacagtacattcgaaagcaagtcctacaaaatggcagacgaggcgggctcagaggcagaccacgagggcacccacagtacaaaaagaggtcacgctaaatcacggcccgttagggactgtgacgacgtactgcagacccacccaagcggcacccaaagtgggatcttcaacattaagctgccaggtagttccaagattttttcagtatattgtgatcaggaaacctccctgggagggtggctgctaattcagcagcggatggatggtagtttgaatttcaaccgtacttggcaggattacaaacgagggtttgggagtctaaacgatgaaggcgaaggagagttttggctggggaacgattacctgcacctgctgacacagagaggatctgtgctgagggtggagcttgaggattgggctgggaatgaagcttatgccgagtaccatttcagagtgggcagcgaagccgagggctatgctttacaagtgagttcttatgaggggactgctggggatgcactgatcgaaggctcagtcgaggaaggcgcagagtacacctctcacaacaacatgcagttcagcacttttgacagggacgcagaccagtgggaggagaattgtgctgaggtgtacggcggcggctggtggtacaataattgccaggctgcgaatctgaatggtatatattatcccggcggaagctatgatcctcgaaataacagtccgtatgagatagagaacggagtggtttgggtgtctttccggggcgctgattattctctgagagcagtccgaatgaaaatcaggcctctcgtcacacag

SEQ ID NO: 11169 - DNA, 2598 bp, synthetic construct
  misc_feature 1..2598: note = source = /note="Description of Artificial Sequence: Synthetic coding sequence"
  source 1..2598: mol_type = other DNA
atgttcagcatgaggatcgtgtgcctcgtcctgagcgtggtgggaacagcttggacagctgacagcggggaaggagactttttagctgaaggaggcggcgtaaggggtcctagggtagtggagaggcatcaatcggcatgcaaggattcagactggcccttctgcagtgatgaggactggaactacaagtgccccagcggctgtcgcatgaaagggctgatcgacgaagtgaatcaagactttacaaatcgtatcaataagctgaagaactcgctgtttgagtatcaaaagaataacaaagatagtcactcccttaccactaacatcatggagatcctccgcggtgacttttcgagtgcaaataaccgagacaatacatacaaccgtgtgtccgaggatctcagatcacggattgaggtattgaagcgcaaggtcatcgagaaagtacagcatatccagttattgcagaaaaacgtgcgcgcccagctggtcgatatgaaacgacttgaagttgacatagacataaagattagatcttgccgcggctcctgtagtcgggccctcgcccgcgaggtggatttaaaagactacgaagaccagcagaagcagctggaacaagttatcgccaaggatcttctgccaagtcgagataggcagcacctccctctgattaaaatgaagcccgtgcctgatcttgtgccaggtaatttcaaaagccaactccagaaagttcctccagagtggaaagcattgactgacatgccacagatgcgaatggagctggagcgacccggaggaaacgagataaccaggggtggtagtacgtcctatggcaccggcagcgagacagaaagcccgcgcaatccctcttcagccggctcatggaacagtggcagtagcggacccggctccactggaaaccgtaaccccgggagttccggcaccggcgggacagctacatggaagccaggatcttccggacccggctccaccgggtcctggaattccgggtcatcggggactggctcgacagggaaccagaatcccggatcccctcgtcccgggtctaccggaacatggaacccaggctcttcggagcgcggaagtgcaggtcactggacaagcgagagtagtgtgagcgggagtacaggtcagtggcattccgaaagcggctcttttcgccccgattccccaggctcaggcaacgcccgtccgaacaatccagactggggcacgttcgaggaagtcagcgggaatgtgtccccagggacccgcagagaataccacacagagaagctggtgaccagcaaaggggacaaagagcttcgcacaggcaaagaaaaagtgacgagtgggtcaacgacgacgaccaggcggagttgtagcaagacagtcaccaaaaccgtgataggacctgatggtcataaagaggtcacaaaagaagtagtcaccagtgaggatggaagtgactgccctgaggcaatggatctcggtaccttatcaggaattggtaccctggatggcttcagacaccggcatcccgatgaagccgctttctttgacacagcctcaaccggaaagactttccctggttttttttctcctatgctgggcgaattcgtctccgagacagagtcaagaggttccgaatccggaatatttacaaacaccaaagagtccagtagtcatcatccgggaattgcagagtttccgtctcgcggtaagtcgagttcgtactcaaagcagttcactagtagtacctcatataaccgtggcgactccacatttgagtcaaaatcttacaaaatggctgacgaggccgggtcggaagctgaccatgaggggacccattcgacaaaaagaggacatgctaagtctcgaccagtgagggattgcgacgacgtgcttcagacgcacccttccggaacccagagtggcatcttcaacataaagctgccagggtcctcaaaaatcttctctgtgtactgcgatcaggaaacgtcattgggcggctggttgctcatccagcagaggatggatgggtccctgaactttaaccgcacttggcaggactataagcggggctttggctctctaaacgatgaaggggagggagagttctggctagggaacgattatctccatctccttactcagcgcgggtcagtcttgcgagttgaactcgaggactgggccggcaatgaggcgtatgccgagtatcattttcgggtcggctcagaagctgaaggctacgccttacaggtgagcagctatgagggaaccgccggagatgccctaattgaaggctcagtagaggaaggggccgaatacacatctcataacaacatgcagttttcaacctttgacagggacgccgaccagtgggaagagaattgtgccgaagtctacggagggggatggtggtataataattgtcaagccgcaaatctgaacggaatatattatccgggtggttcctatgatcctcgcaacaattccccctacgagatcgaaaacggagtggtgtgggtatcatttcgtggagccgactactcattgagagcagttcggatgaaaattcggcccctagtgacccag

SEQ ID NO: 11170 - DNA, 2598 bp, synthetic construct
  misc_feature 1..2598: note = source = /note="Description of Artificial Sequence: Synthetic coding sequence"
  source 1..2598: mol_type = other DNA
atgttcagcatgcgcatcgtatgtctagtgctgtcggtcgtcggcactgcttggaccgccgactcaggtgaaggagattttctggcggagggcggcggcgttagggggccacgtgttgtcgaacgacaccagtccgcctgcaaagattcagactggcccttctgcagcgatgaggattggaattacaagtgccctagtggctgtcggatgaaagggctcattgacgaggtgaatcaggattttaccaaccggatcaataagctaaagaattctttatttgaataccagaaaaacaataaagattcgcacagtttgaccactaacattatggaaattctgcgtggcgatttttcaagtgccaataatcgagataacacgtacaaccgagttagcgaggatttacgatccagaattgaggtgcttaaacggaaggtcatcgagaaagttcagcacatccagctcctgcagaaaaatgtgcgtgcccaactggttgacatgaagaggctggaggtcgatattgatatcaagatccgctcctgcaggggctcttgctctagagcactcgcccgcgaggttgacctgaaagactacgaagatcaacagaaacaactagagcaggtgatcgcaaaggatctactcccgtccagagatcgacagcacctgcccctgattaaaatgaaaccagttccggatcttgtccccggcaacttcaaatcccagctacagaaggtgcccccggagtggaaggcactgaccgacatgccccaaatgaggatggagttggagcgcccagggggaaacgagatcacacgtggtggcagtacctcctatggaactggatccgagaccgaatctcccagaaacccgtcctctgctggcagctggaattcgggctcaagcggacctggttccactgggaaccgcaaccctggtagctctgggacagggggtactgcaacctggaagccagggagcagcggtccaggctccaccgggtcatggaacagcggttcaagcggaaccgggagtacaggcaaccaaaatcctgggagccctagacccgggagtacgggcacatggaatcccggtagttctgaaagggggtcggccggccactggaccagcgagtcgagcgtaagtgggagtactggccagtggcatagtgaaagcggctctttcaggccggactctccaggttcggggaatgcaaggcctaacaaccccgactggggcactttcgaggaagtaagcgggaacgtgtcccctggtacccgtcgtgagtatcacaccgaaaaactggttacgtctaagggcgacaaagagctaaggacaggtaaagagaaggtgacctcaggcagtacaacgaccacgaggagaagttgttctaagactgtcaccaagaccgtgatcggccccgacggccacaaagaagttacaaaggaggttgtgacatcagaggatggaagtgactgccctgaagctatggatctaggcactctgtccggcattggcaccttggatggattccggcacaggcaccccgacgaggctgcctttttcgatactgcatctactggtaaaacctttcccgggtttttttcccctatgctcggggagttcgtgagcgagacagagagtcgaggctcagaatcgggaatcttcaccaacaccaaggagtcttcttctcatcacccaggtatcgctgaatttccatcacgcggcaagtctagctcttattcgaagcagtttacaagctcaacctcatacaatagaggcgacagcaccttcgagtccaaaagctacaagatggctgacgaggcgggctcggaagcggatcacgaaggtactcatagtacaaagaggggtcacgccaagtccagaccagtgagagattgcgatgatgttctgcagacacacccaagcgggactcagagcggcatcttcaacattaaattgcctggtagtagcaaaattttttcagtgtattgtgatcaggaaacttctctgggaggctggctgctgattcagcagcgcatggacggcagccttaatttcaacaggacctggcaggactacaagcggggctttggctctcttaacgacgagggcgagggagagttctggttggggaatgattatttgcatctgcttacccagcgcggttcagtcctgcgcgtcgaacttgaagattgggccggaaatgaggcttacgcagaataccattttcgggtgggctcagaggctgaaggatatgcgttacaagttagttcttatgaaggaactgccggggatgccctcattgaaggaagcgttgaggagggcgcagaatatacttcccacaacaacatgcaattctccacctttgaccgcgatgctgaccagtgggaagaaaattgcgcggaggtatatggaggaggctggtggtacaacaactgccaggcagccaatctcaatgggatttactaccccgggggttcctacgatcctagaaataactctccttacgaaatagagaacggtgtagtttgggtcagcttccggggagccgactatagtttgagggcagtacggatgaaaatccgccctctggttactcag

SEQ ID NO: 11171 - DNA, 2598 bp, synthetic construct
  misc_feature 1..2598: note = source = /note="Description of Artificial Sequence: Synthetic coding sequence"
  source 1..2598: mol_type = other DNA
atgttctcaatgcgtattgtttgtcttgttttatctgttgttggtacagcatggactgcagatagtggagaaggagattttcttgcagaagggggaggagtacgtggtccaagagtagtcgaaagacatcaaagcgcatgtaaagattcagactggccattttgtagtgatgaagattggaattataaatgtccatcaggatgtagaatgaaaggattaattgatgaagtaaatcaagattttacaaatagaattaataagcttaagaattcattatttgagtatcaaaaaaataataaagattctcattcattaacaacaaatattatggaaatactacgtggagatttctcatcagcaaataatagagataatacatataatagagtttctgaagatctccgttcaagaatagaagttctaaagcgtaaggttattgaaaaggttcaacatattcaattattacaaaaaaatgtaagagcacaacttgttgatatgaaaagacttgaagttgatattgatattaaaattagatcatgcagaggatcatgttcaagagctcttgcaagagaagttgatcttaaggattatgaagatcaacaaaaacaattagaacaagttatcgctaaagatttactcccatcaagagatagacaacatttacctttaattaaaatgaaaccagttccagatcttgttcctggaaattttaaaagtcaattacaaaaagtaccacctgaatggaaagctttaactgatatgccacaaatgagaatggaattagaacgtccaggaggaaatgagattacaagaggaggatcaacatcctatggaacaggtagtgaaactgaatcgccaagaaatccttcatcagctggatcatggaatagtggatcaagtggaccaggttctactggtaatcgtaatccaggaagttcaggtacaggtggaactgctacatggaaaccaggttcatcaggtccaggatcaaccggatcatggaattcaggaagtagtggaaccggttcaacgggaaatcaaaaccctgggtcaccaagaccaggatcaacaggaacatggaatccagggtcatctgagagaggatctgctggtcattggacatcagaaagttcagtctctggatctactggacaatggcatagtgaatcaggaagtttcagaccagattcaccaggaagtggaaatgcaagaccaaataatccagattggggaacgtttgaagaagttagtggaaatgtttctcctggaacacgaagagaatatcatactgaaaagttagttacttcaaaaggggacaaagaattaagaactggtaaggaaaaagtaacaagtggatcaacaactactacacgtcgttcatgtagtaagacagttacaaaaactgtaattggaccagatggacataaagaagtaactaaggaagttgttacatcagaagatggtagtgattgtccagaggctatggacttaggaacattaagtggaattggaacattagatggtttcagacatagacatccagacgaagctgcattctttgacacagcttctacaggaaaaacatttccaggatttttttcaccaatgttaggagaatttgtttcagaaacagaatctagaggatcagagagtggtatttttacaaatactaaagaatcatcttcacatcatccagggattgcagaatttccatctagaggaaaatcttcttcatattcaaaacaatttactagtagtacatcatataatagaggtgattcaacttttgaatcaaaaagttataaaatggctgatgaagcaggatcagaagcagaccatgaaggtacgcatagtacaaaacgaggtcatgcaaagtcaagaccagttagagattgtgacgatgtattacaaactcatccaagtggaactcaatcaggaatttttaatattaaattacctggatcttcaaaaatattttcagtttattgtgatcaagaaacttcattgggaggatggttactaattcaacaaaggatggatggatcattaaactttaataggacatggcaagattataagagaggttttggaagcttaaatgatgaaggagaaggagaattctggcttggaaacgattatttacatttattaacacaaagaggaagtgttttaagagttgaacttgaagattgggcaggaaatgaagcatatgcagagtatcattttagagttggttcagaagctgaaggatatgctttgcaagtttcatcttatgaaggaacagcaggtgatgctttgattgaaggaagtgttgaagaaggagctgagtatacatcacataataatatgcaatttagtacatttgatagagacgctgatcaatgggaagaaaattgtgcagaagtatatggaggtggatggtggtataataattgtcaagctgcaaatttaaatggaatatattatccaggaggaagttacgatccaagaaataactcaccatatgaaattgaaaatggagttgtatgggttagttttagaggtgcagattactcattaagagcagttagaatgaaaattcgaccattagttacacaa

SEQ ID NO: 11172 - DNA, 2598 bp, synthetic construct
  misc_feature 1..2598: note = source = /note="Description of Artificial Sequence: Synthetic coding sequence"
  source 1..2598: mol_type = other DNA
atgttcagtatgcggattgtgtgcctcgtgctgagcgttgtcggcacagcctggaccgcagatagcggcgaaggcgatttccttgctgagggaggcggtgttaggggccctagggtggtggaaaggcaccagtccgcctgcaaagattccgattggcctttttgctccgatgaggactggaattataaatgcccatcagggtgcaggatgaagggccttattgacgaggtgaaccaggacttcacaaatcgcattaacaaactgaagaattccttgtttgaataccagaaaaacaataaggatagccactccctgactaccaatatcatggagattttgcggggcgacttttcttccgccaataaccgggacaatacttataaccgggtctctgaagacctgcgcagtagaatcgaggttctcaagagaaaggtgatcgaaaaggtgcaacatattcagctgctgcagaagaacgtcagggcccaattggtggatatgaaacggctggaggttgatattgacataaagattcgcagttgtaggggttcctgtagccgagcactggcccgagaggtggatctgaaagactacgaggaccagcagaagcagctcgagcaggtgatcgctaaagacctccttccttcccgggacagacaacatctgcccctcatcaagatgaagcctgtccctgatttggttccaggaaactttaaatcccagctccagaaagtcccacctgaatggaaagcccttactgatatgcctcaaatgagaatggagctcgagaggcccggaggtaatgaaattaccaggggcgggtccacaagctatggaaccggctccgagacagagtctccccgaaatccgagcagtgctggatcttggaatagcggcagctccggtccaggtagtacaggaaatagaaatcccggttctagcgggaccggagggactgccacctggaagccaggatcctccggaccagggagcaccgggagttggaattctggcagctctgggactggctcaacaggcaaccagaacccagggtccccgcgccccggcagcacaggaacctggaaccctggctctagtgagcgggggagcgccggacactggacttctgagagttccgtctcagggagcactgggcaatggcatagcgaaagcggcagctttagacccgacagtcctgggagcgggaacgcccgaccgaataatccggactggggaacatttgaggaggtctccggaaatgtgtcacctggaacccggcgggaataccacacggagaagttggtgacatcaaagggggacaaggagctgcgaacaggcaaggagaaggtgacttctggctccacaacaacaaccaggcgaagctgcagcaaaacagtcactaagaccgtgatcggtccggatgggcataaggaggttacgaaggaagtcgtcacgagtgaagatggcagcgactgccctgaagcaatggatctgggtacactctccgggatcggtacgctcgacggctttagacacaggcacccagatgaggccgctttctttgacaccgcaagcactgggaagacctttcccggcttcttcagccctatgttgggcgagtttgtgtccgagacagagtcccgggggagcgaaagcgggatctttaccaataccaaggagagcagctcacatcatcccggaattgccgagttcccatccagggggaaaagctcatcttactctaagcagtttacgagcagtacctcctacaatcggggcgacagcaccttcgagtcaaaatcttataagatggcagacgaagccggctcagaggcagatcatgaagggacacactctaccaaaagaggacatgccaaatcccgacccgttcgcgattgcgacgacgtgctgcagacccacccgtccggcacccagagcgggatctttaatatcaaactgcccggatcctccaaaattttttccgtgtactgcgatcaggagaccagcctcgggggatggctcctgattcaacaaaggatggatggctcattgaatttcaaccgcacctggcaggactataagcggggcttcggctcccttaatgacgagggggaaggggaattttggctgggtaacgactatttgcatctgctgacccagagaggatctgtcttgcgggtcgagctggaagactgggccgggaacgaagcgtacgccgagtatcactttcgcgtggggtctgaggctgaaggctatgctctgcaggtgagctcttatgaagggacggccggagacgcactgatagagggcagcgtagaggagggcgctgagtacacaagccataataacatgcagttctcaaccttcgatagagacgcggatcagtgggaagagaattgtgctgaagtctacggtggcggttggtggtacaacaactgccaggctgctaatcttaatgggatttactaccctggaggctcttacgacccccggaataattctccttacgagatcgaaaacggagtggtctgggtgagctttcggggtgccgactattccctgcgggctgtacgaatgaaaattagaccccttgtgacccag

SEQ ID NO: 11173 - DNA, 2598 bp, synthetic construct
  misc_feature 1..2598: note = source = /note="Description of Artificial Sequence: Synthetic coding sequence"
  source 1..2598: mol_type = other DNA
atgttctcaatgcgcattgtgtgcctagtcctgtccgtggtcggtactgcctggaccgccgactccggcgaaggggatttccttgcagagggcggcggcgtccgcggaccgcgagttgtagagcgccaccagtctgcctgcaaagatagcgattggcctttctgctcggacgaagattggaattacaagtgcccctcgggatgcagaatgaagggacttattgatgaggtgaaccaggatttcacaaaccggatcaataagctgaagaacagcctcttcgagtaccaaaaaaacaataaggatagccacagcctgaccacgaacatcatggagatactgcgtggtgatttttcgtcggctaacaaccgcgataatacctacaaccgagtgtccgaggacctgcgaagtagaatagaagtgctaaagcgtaaggtgatcgaaaaggttcaacatatccagcttcttcagaagaatgtgagggcccagctggttgacatgaaacggctcgaggtcgacattgatattaaaatccgcagctgcagaggctcctgcagccgtgcactggcccgggaggtagacctgaaggattacgaggaccagcagaagcagctagagcaggtaatcgccaaggatctattaccatccagggaccggcaacacctcccattaataaaaatgaagcctgtcccagatctcgtccccggaaatttcaagagccaacttcaaaaggtgcctccagagtggaaagcgcttacagatatgccccagatgcgcatggagctggaacgacccggcggtaacgagattacacgaggtggtagcacgtcgtacgggaccggcagcgagaccgagtcgcccaggaatccttccagcgccggctcttggaattcaggctcctccggcccagggtccactggcaaccgcaaccccggctctagcggaactggtggaaccgcgacgtggaaaccgggtagttcgggacctggctcgaccggatcttggaactcaggaagctcaggcacaggcagcaccggaaaccagaaccctggaagcccgaggcctggttcaacgggtacttggaatccaggtagcagcgagaggggaagtgccggacattggacctccgagagctcggtgtcgggtagcacaggccagtggcacagcgaatcgggctctttccgtccagattcaccaggatctggaaatgcccggcccaacaatcctgactggggcaccttcgaagaggtcagtggcaatgtgtcgccgggaacgcgtcgtgaataccatacagaaaagctcgtcacctccaaaggtgataaggagctacgaaccggtaaggagaaggttacaagcggcagtactaccacgacccgccgcagttgcagcaagaccgtgacaaagaccgttatcggtcctgacggacacaaagaggtgaccaaagaagtagtgaccagcgaggatggatcggattgtccagaagctatggaccttgggaccctgagcggaatcggaacactcgacggctttcgtcaccgccacccggatgaggcagcgttctttgatacagctagtactggcaaaacgttccccggattcttttcgccgatgctgggagagttcgtctccgagacggagagtcgaggctcagagtccggaatcttcactaacacgaaggagtcctccagtcaccatcctggaattgcggaattccccagccgaggaaagagttccagctacagcaagcagtttacgtcttccacatcctacaatcgtggcgatagtaccttcgagtcgaaaagctacaaaatggccgacgaggccggtagcgaggcagaccatgaaggcactcactcgacaaaacgcggtcatgctaagagcaggccggtacgtgactgtgatgacgttcttcaaacccatccctccgggacacaaagtggaattttcaacataaagttgccgggtagttccaagatcttctccgtgtactgcgatcaggagaccagcctgggtggatggctcttgatccagcagcgaatggacggctctctcaatttcaaccgaacttggcaagattacaagcggggtttcggcagtctcaacgatgagggcgaaggcgagttctggctcggcaacgattatcttcacctacttacacagaggggatccgttctgcgcgtagagcttgaggattgggccggcaacgaggcatacgccgagtatcacttcagggtcggcagcgaggctgaggggtacgctttacaggtctccagctacgagggcaccgccggagacgctcttatagagggcagtgtggaggagggagcggagtatacatcgcacaacaacatgcagttttccaccttcgatcgcgatgccgatcagtgggaagagaactgcgcggaagtgtacggaggaggatggtggtataataactgtcaggccgccaatttaaacggcatctattacccgggtggcagctacgacccgcgtaataatagtccgtacgagatcgagaacggagtggtgtgggtgtcattccggggtgccgattactccctacgcgctgtgcggatgaagatccgtccattggtgacccaa

SEQ ID NO: 11174 - DNA, 2598 bp, synthetic construct
  misc_feature 1..2598: note = source = /note="Description of Artificial Sequence: Synthetic coding sequence"
  source 1..2598: mol_type = other DNA
atgttcagcatgcggatcgtgtgcctcgttctgtctgttgtgggcactgcgtggacagcagatagtggagaaggcgactttttggctgaggggggaggtgttaggggaccacgagtggtagagcgacatcagtcagcctgtaaggatagtgactggccattctgttctgacgaggattggaactataagtgtccttcaggctgtaggatgaagggattgattgacgaagttaaccaggatttcaccaaccgcatcaataagctgaagaacagtctctttgagtaccaaaaaaacaacaaagattctcacagcttgactaccaatatcatggagatccttagaggggatttctcctcggccaacaaccgggacaacacatataatcgtgtaagcgaggacctgcgctcccgcatcgaggtgctgaagaggaaggtgattgaaaaggttcagcacatccagctattgcaaaaaaacgtcagggcccagctagtggatatgaagcgtctcgaggttgatatcgatatcaaaatccgtagttgccgcggctcttgctctagagcacttgccagggaagtcgatttgaaagattacgaagaccagcagaagcagctcgagcaggttatcgcaaaggacctgttgccctcccgtgatcggcaacacctgccgctcataaagatgaagcccgtgcccgaccttgtgccagggaactttaagtctcagttgcaaaaggttccacccgaatggaaggctctgaccgatatgccacaaatgcgcatggagctggagcgccccggtgggaacgagattacccgcggggggtcgacttcatatggcacaggttcagagacggaaagccccaggaaccccagtagtgccgggtcatggaattctggcagcagcggtccaggttccacaggtaatcgcaatcccggcagctccggcacaggggggacagcgacctggaaacccgggagttccggtcctggcagcaccggcagctggaactctggctcatccggaaccggtagtacaggaaatcagaaccctggctctccaaggcctgggtctactggaacttggaatcctggaagcagcgagcgcggttctgctggacactggactagtgaaagctcagtttcaggaagcacaggacagtggcactcagagagcggcagttttcgcccagattcgccagggtctgggaatgccaggcccaacaatcccgactggggcacctttgaggaggtctcagggaacgtcagtccaggcacgagaagggagtaccataccgagaagttagtaacgagcaaaggcgacaaggaattacgcacagggaaggaaaaggtcactagtgggagcaccaccactacccgacggtcctgctcaaaaaccgttaccaagacagtgattgggcccgacggccacaaagaagtaacaaaagaggtagtcacttccgaagacggctcagattgtccagaagccatggatttgggcaccctctcaggaatagggacccttgatgggtttcgacaccgtcacccagacgaggcagctttctttgataccgcatccactggcaagacatttcctggctttttcagtccaatgctgggggagttcgttagtgagacagagagccgcggaagcgaaagcggaattttcacgaacacaaaggagtctagtagccatcacccaggaatcgcggaattcccctccagggggaagtcttcctcatatagtaaacaatttacttcttctacatcatataatagaggtgattctacattcgaaagcaaaagttacaagatggcggatgaggctggatccgaggccgaccacgaggggacacatagcaccaaaaggggccacgcaaagtcgcggccggttagagactgcgacgacgtgctccaaacccacccatctggtacccagtctggtatcttcaatattaagctcccgggctctagcaagatcttctccgtgtactgtgatcaggagacttccttgggaggatggttactcatccagcagcggatggacggttccctcaacttcaaccgcacatggcaggactataagcgtggcttcgggtcactgaatgacgagggcgagggcgaattttggctgggtaacgattatttgcatctgctcactcagcgcggctccgtgcttagggtagaattggaagattgggccggcaacgaggcctatgccgagtaccacttcagagtgggctccgaggccgaaggatatgccttgcaggtgtcctcttatgaaggtaccgccggcgacgcactgatcgagggatcagtggaagagggggccgaatacacctcccacaacaacatgcaattttctacatttgatagggatgccgaccagtgggaagaaaactgtgccgaagtgtacggaggtggctggtggtacaacaattgccaggccgcgaacttgaatggtatttactatccgggcggatcatatgatccccggaataactctccctacgagatcgagaacggcgtggtgtgggtgtcatttagaggtgcagactacagccttcgcgctgttcgaatgaagattcggccccttgttacacag

SEQ ID NO: 11175 - DNA, 2598 bp, synthetic construct
  misc_feature 1..2598: note = source = /note="Description of Artificial Sequence: Synthetic coding sequence"
  source 1..2598: mol_type = other DNA
atgttttctatgagaatagtctgcctagtgctgagcgtagtggggactgcttggacggccgacagcggggaaggcgatttcttagccgaagggggtggtgtgcgcggcccccgagtggtggaacgccatcaatctgcttgcaaagattctgattggcctttctgttcagacgaagactggaactacaagtgcccctccgggtgccgcatgaaagggctgatcgatgaggttaatcaggatttcacaaatcggattaacaaactgaaaaactcactgttcgaatatcaaaaaaataacaaagattcccattccttgactaccaatataatggagatcttacgcggcgatttctcctccgctaacaatagggataatacttacaaccgagtttctgaggatctgcggagccgaattgaggttttgaagagaaaggtgattgaaaaggtacagcatatacagctcctccaaaagaatgttcgggctcagttggtggacatgaaacgcttggaggtagatatcgacatcaagattcgctcctgccgcggcagctgctcacgcgccctggcaagagaagtggacctaaaagactacgaagaccagcagaagcagctggagcaggttatagccaaggatcttctcccatccagagacaggcagcacctccccctaatcaagatgaaaccagtaccagacttggtgccgggtaacttcaagtcacagttgcaaaaagttccgccagaatggaaggcgcttacagatatgccccagatgcgcatggaactagagaggcccgggggcaatgaaatcacccgcgggggttccacttcttatggcaccgggtcagagacggagtctccacggaatccatcttcagcagggtcttggaattctggaagcagcgggcccgggtcgaccggaaatcgcaatcccggaagttccggaactggaggaacagctacctggaaaccagggtctagcggcccgggatcaacagggtcttggaatagcggatcctcaggcactgggtcaacaggaaaccagaatcctgggtcaccccgccctggctcaacaggtacctggaatccgggtagtagtgagcgagggtctgcagggcattggactagcgagtcctctgtgtccggtagtactggacaatggcacagcgagagtggtagtttcagacctgattcacctgggtcgggaaacgcccgcccgaataaccccgattggggcacttttgaggaggtctctggcaatgtgtccccaggcacccgccgcgagtaccataccgagaaactcgtgacatctaaaggagataaggagctaaggacagggaaagaaaaggttacctccggatcaacaaccaccactcgtcgatcttgtagcaaaacagtgacaaagacggtgatagggcccgacggacataaagaagttacgaaggaggtggttacttcagaggacggatctgactgccctgaggccatggaccttggcacattgagcgggatcggcactttagacgggttccgccacagacacccagacgaggccgctttttttgataccgcctcgacaggcaagaccttccctggctttttcagcccaatgcttggtgagttcgtttccgagaccgaaagtagaggcagtgaatccggcattttcactaacactaaggaatcttcgtctcaccacccaggaatcgcagaatttccctcccgaggaaaatcctcatcttactccaagcagttcaccagcagtacatcctacaaccgtggcgattcaacgtttgagagtaagtcttacaagatggcagacgaagctggaagtgaagcggaccacgagggcacacatagcaccaaacgaggccacgcaaaatctcgcccagtgagagactgtgacgatgtgctgcagacgcatcctagcggaacccagagtggcattttcaatatcaaactgcctggcagttcaaagattttttctgtttattgcgaccaggagacatctcttggaggatggttacttattcagcagagaatggacggatctctcaattttaatcggacctggcaggactataaacggggcttcgggtctctaaacgatgagggggagggtgagttttggctcggcaacgactaccttcatttgttgacacagcgaggaagcgtgctgagggtggagctggaggactgggccggaaacgaagcgtatgctgaatatcacttcagagtcggcagcgaggctgaggggtacgctctgcaggtatcttcctatgaaggcactgcgggcgacgctcttatcgaaggctcagttgaggaaggggctgagtatacatctcacaacaatatgcagttttccactttcgatagagacgccgatcagtgggaggaaaactgtgctgaagtttatggcggtggttggtggtacaataattgtcaggcagctaacctgaacggaatttactacccaggcgggtcctacgaccctcgcaataatagcccctatgagatcgagaatggcgtagtttgggtgtccttccggggagccgactacagtctccgcgcagtgcgcatgaaaatccgaccccttgttacgcag

SEQ ID NO: 11176 - DNA, 2598 bp, synthetic construct
  misc_feature 1..2598: note = source = /note="Description of Artificial Sequence: Synthetic coding sequence"
  source 1..2598: mol_type = other DNA
atgttcagcatgagaatcgtgtgccttgttctctcagtggtgggaacagcgtggacagctgacagcggggaaggagactttctcgctgagggaggaggagtgagaggaccacgggtggtcgagaggcaccaatctgcctgtaaggatagcgactggccgttttgcagtgatgaagattggaactataaatgcccttcaggatgccggatgaaaggtcttatcgatgaggtaaaccaggatttcaccaacaggatcaacaagcttaagaacagcctgttcgaataccagaagaacaacaaagacagtcactcactgacaaccaacattatggaaatacttagaggcgactttagctctgccaataaccgggacaatacctacaacagggtttctgaagacctcagatctaggatagaggtactcaaaaggaaagtaatcgaaaaagttcaacatattcaacttctgcaaaaaaacgtccgagctcagcttgtggacatgaaaagattggaggtcgatatagacatcaagattaggagttgccgcggtagttgcagtagagccttagcacgggaagtggatctgaaagactacgaagatcaacaaaaacagctggaacaggttatcgcaaaggatttactgcctagtagggataggcaacacctcccactcatcaaaatgaaaccagttcccgacttggtccccgggaacttcaaatctcagctccaaaaggtgcctcctgaatggaaggctctcaccgacatgccccaaatgcggatggagcttgagcgacctggcggaaatgagattacacgaggcgggagcacgagctatggaacaggaagcgaaactgaatctcccagaaacccatcttctgcaggcagctggaactctggaagcagcggaccaggctccactggcaacaggaaccccgggagctctggcacaggaggcaccgccacatggaagcccgggtctagcggccctggtagtactggcagttggaactctggatcctcagggaccggcagcacagggaatcagaatccaggcagtccaagaccaggatctactggaacgtggaaccctgggtcctctgaaaggggaagtgctggacactggacctcggaaagtagcgtcagcggttctacaggacaatggcactcagaatccggaagctttaggccggattctcctggctcaggcaacgctaggcctaacaacccggactgggggacatttgaagaggttagcggcaacgtcagcccagggactagaagagaatatcacacagagaagctcgtgacctccaaaggagacaaggaactcagaaccggtaaagagaaggtgaccagcggctctaccactactactcggcggtcttgttctaaaacagtcactaaaactgtgattggaccagatggacataaggaggttaccaaggaggtggtcacttcagaagatgggtcagactgtcccgaggctatggatctgggaacccttagtggaatcggtaccttagatggctttcgacaccgtcatccagatgaggcagcctttttcgacacggctagcaccggcaagacctttccaggctttttctcacccatgctgggcgaattcgtcagtgaaactgaatctaggggatccgagtccggaattttcaccaacaccaaagaaagttccagccatcaccctggcattgctgagtttccctcgaggggcaagtcgtcttcatactcgaaacagtttacctctagtacatcgtacaatagaggcgattccacatttgaatctaagtcatacaaaatggctgacgaagcaggttccgaggccgatcacgagggaactcacagcactaagcgtggacatgccaagagtcgccccgtgagagattgtgatgatgtcctgcagactcaccccagtggaacccaaagcggcatctttaatatcaagctgcctggtagttcaaagattttttccgtgtactgtgatcaggagacaagtctcggcggttggcttctgatacagcagaggatggacggttctctgaattttaaccggacttggcaagattacaaacgtggctttggctctttaaacgatgagggcgagggcgagttttggctgggcaacgattacctccatctcctgacccaacggggatcggtcttgcgagtagagctcgaggattgggcgggcaacgaggcttacgctgagtaccattttagagtggggtctgaggctgaaggctacgccctgcaagtgagttcgtacgaaggaaccgctggggacgccctgattgagggatccgtggaagaaggagccgagtatacctctcacaacaacatgcagttcagcaccttcgacagggatgctgaccagtgggaggagaactgtgccgaggtgtatggcggaggctggtggtacaacaactgtcaggctgcgaatctgaacggaatctattaccccgggggaagttacgatccgcgaaacaattctccctatgaaattgaaaacggagttgtttgggtatcttttaggggagctgattacagccttagagctgtgcgcatgaaaatcagaccgctcgtcacacaa

SEQ ID NO: 11177 - DNA, 2598 bp, synthetic construct
  misc_feature 1..2598: note = source = /note="Description of Artificial Sequence: Synthetic coding sequence"
  source 1..2598: mol_type = other DNA
atgttctctatgagaattgtgtgccttgtgttatccgtggttggtaccgcatggacggctgatagcggagaaggagattttcttgctgagggggggggggttcgaggccctagagttgtggaaaggcaccagtctgcctgtaaagatagcgactggccgttctgttctgacgaggactggaattacaaatgcccatcaggctgccgaatgaagggcctgatcgatgaagtaaaccaggactttaccaacaggatcaacaagctgaaaaactcccttttcgagtaccagaagaataacaaagactcccattctcttaccacaaatattatggagattctgcgaggtgacttcagctctgcaaacaacagagacaacacctacaaccgagtttccgaagaccttcgatctagaatcgaagtgctgaaaagaaaagttattgagaaagtgcagcacatacagttgctgcagaaaaacgtgagagcccaactggtcgatatgaaacgacttgaagtggacatcgacattaaaatccgaagctgtcgaggctcctgttcaagggctctggctagagaggtcgacttgaaggactacgaggatcaacaaaagcagcttgagcaagtgatagcaaaagacctacttccatcaagggacaggcagcatctacctttgattaaaatgaagccggtccccgatctggttccaggaaatttcaaatctcaactgcagaaagttcctcctgaatggaaagccctgactgatatgccccagatgcgaatggagcttgagcgcccaggtgggaatgaaatcacccggggggggtcgacttcctatggtactggttcagagactgaaagccccaggaacccctcctcggcagggtcttggaattccgggtcttccggacctgggtccaccgggaaccgaaatcccggctcaagcggcaccgggggtaccgcaacttggaagcccggaagttcaggccccggcagtactgggtcatggaatagcggctcttccgggacgggttctacgggaaaccaaaaccctggatctccccggcccggctcaacaggcacatggaaccccggctcttcggagaggggctctgccgggcactggaccagcgagtcgagcgtaagcggctcgacaggacagtggcattctgaaagcggcagcttccgacccgactccccgggcagtggtaatgctcgtcccaataatcctgattggggtacattcgaggaagtaagcggtaacgtgtcgccagggacacggcgggagtatcatacagaaaaactcgtgacttccaaaggagataaggagctcaggactggtaaggagaaggtcacttcaggcagcactacaactacacgtaggtcctgtagtaaaacggtcaccaagacggtgattggacctgatggccacaaggaggtgacgaaggaagtcgtgacatcggaagatggcagtgactgtcccgaagctatggatcttggcacactgagcggaattgggaccctggatgggttccgacatcgtcatcccgatgaagcagcatttttcgataccgcctcgaccggaaagacatttccgggcttcttctctccgatgttgggggaatttgtcagcgagaccgaaagtagagggtctgaatctggaatattcaccaacacgaaggaatccagctctcatcatcctggaatcgctgaattcccgtcgaggggcaagagttcatcatatagcaagcagttcacgtcaagcaccagttataatagaggggactccaccttcgagtcaaaaagctacaagatggcagatgaagccggctctgaagcagaccacgagggcacacacagtaccaagcgaggacacgcgaagagtagaccggtgcgagattgcgatgacgtactgcagacgcacccaagcggaacccagtccggaatcttcaacatcaagcttcctggctcctcaaagatcttctccgtatactgcgatcaggagaccagcctcggagggtggcttctaattcagcagcgaatggatggatctctgaacttcaatagaacgtggcaggattataagcgtgggttcgggtcattaaatgatgaaggagagggggaattctggctcggcaatgattacctacacttgctaacacagagagggtccgttctgagagtagagctagaagattgggcgggaaatgaggcctatgctgaataccatttccgggtgggatcagaggcggaaggatacgcacttcaggtttcctcctatgaaggcaccgctggcgatgcactgatcgaaggcagcgtggaggaaggtgccgagtacacgtctcacaataatatgcaattcagcacatttgatagggacgccgatcagtgggaggagaattgcgctgaggtatacggcggggggtggtggtataacaattgtcaggctgcaaatttgaacggtatatactaccctggcgggtcctatgacccacgaaacaatagcccttacgaaatagagaacggcgtggtttgggtttcatttcgaggggcggactactcactgcgagccgtcaggatgaagatccgacccctggtgacgcaa

SEQ ID NO: 11178 - DNA, 2598 bp, synthetic construct
  misc_feature 1..2598: note = source = /note="Description of Artificial Sequence: Synthetic coding sequence"
  source 1..2598: mol_type = other DNA
atgttttcaatgcggattgtgtgcttggttctctcagtggtcgggacagcctggaccgccgattccggcgagggggattttctcgccgaaggtggaggagtgcgcggaccccgcgtggtggagcgccaccagtctgcttgtaaggattccgactggccattttgttctgatgaggattggaactataaatgccctagtggttgccgaatgaagggattgatcgacgaggtgaaccaggacttcacgaaccgtatcaacaagctaaaaaattcattgttcgaatatcagaagaataataaagattcccactcattgaccaccaatatcatggaaatcctcagaggtgatttttcatccgcgaataatcgagataatacatacaaccgggtgtcggaagatctgaggtctaggatcgaggtcctaaaacgcaaggtaatagagaaggttcagcatattcagttactacagaaaaacgtccgggcccagttggtcgatatgaagaggctggaagtagacattgacatcaaaatcaggtcttgcagaggcagctgctccagagcccttgctagggaggttgacttaaaagactatgaggaccagcagaaacagttagaacaagtcatcgcgaaggacttgttaccctcaagggacagacaacacttaccattaataaaaatgaaacccgtacctgatctggtgcccggaaacttcaaatcccagttgcaaaaggtgccaccagagtggaaggcccttactgacatgccccagatgagaatggagttagaaagacctggaggcaacgagatcactagagggggtagcacatcctacgggacgggtagcgagacggagtctccccggaacccctcctccgcaggctcttggaactctggtagctctggacccggttcaaccggtaacaggaatcctggtagcagcggaacaggggggaccgccacttggaagcccgggtccagcggaccgggcagcaccggttcttggaatagcggcagcagtggaacagggagcaccgggaatcagaatccagggagcccccggcccgggtctacaggaacgtggaatcccggcagcagtgagcgaggatcagcaggccactggaccagtgaatcatccgtctcaggatcaaccggacagtggcacagcgagtctggctcttttaggccagattctcctggctctggcaacgccaggccaaacaatccagattggggcacctttgaagaagtgtctggaaatgtgagtccaggaacccggcgggagtaccatacagagaaactggtcaccagtaaaggagataaggaactgaggaccggaaaggagaaggtgacgagcggttccacaacaaccacgcggcggtcttgtagcaaaactgtgacgaaaaccgtgataggccccgacgggcacaaagaggtcactaaggaagtcgtcacctcagaagatggatccgattgtcccgaagctatggatctgggaacactgtctggaattggaacccttgacgggttccggcatagacaccccgacgaggcagcgttctttgacacagcctccaccgggaaaacttttccagggttcttctccccaatgctcggagagtttgtatctgagacagagagcaggggttccgagagtggaatttttaccaatacaaaggagtcaagctctcaccatccgggcattgcggagtttccctcccggggtaaatcaagctcttattccaaacagtttacctcttccacctcatacaaccgaggcgacagcacatttgaaagcaagtcctacaagatggctgacgaagctggctctgaggcagaccacgaaggaacacactccaccaaacgggggcacgccaagagtcggccggtgcgcgactgtgatgacgtcctccagacccaccccagtggcacccagtccggtattttcaatatcaaactccccggtagtagcaagatcttctcggtttattgtgatcaggagacgagcctgggcgggtggttgcttatccaacagagaatggatgggtctctaaatttcaataggacatggcaggactataagcgtggttttgggtcactcaacgatgaaggggaaggcgagttttggttgggaaacgactatctgcacttgcttacacagaggggaagcgtgctcagagtggaactggaagactgggctggcaacgaggcttatgccgagtatcattttcgcgttggaagtgaggccgaagggtatgcattgcaggtgtcgtcatacgaaggaacagccggagatgcgctcattgagggctcagtcgaggagggcgccgaatacactagtcacaataacatgcagttctccacgtttgaccgcgatgccgaccaatgggaagaaaactgcgctgaggtctacgggggaggctggtggtataataactgtcaggcagccaacctgaatggcatctattatcccggtgggagctatgacccccgtaacaactccccgtatgaaatcgagaacggcgtggtctgggtgtctttccgcggagccgattactccctgcgggcagtaagaatgaaaattcggcccctggtgacacaa

SEQ ID NO: 11179 - DNA, 2598 bp, synthetic construct
  misc_feature 1..2598: note = source = /note="Description of Artificial Sequence: Synthetic coding sequence"
  source 1..2598: mol_type = other DNA
atgttttcaatgcgcatcgtgtgtctggtgctgagcgtagtgggcacggcctggactgccgatagtggggaaggcgacttccttgcagagggcgggggtgtgaggggacctagggtggtagaaagacaccaatccgcctgtaaggatagcgactggcctttttgtagcgatgaggattggaactataaatgcccatcaggttgcaggatgaagggcctgattgacgaggtcaatcaggatttcacaaatcggatcaacaaattaaaaaacagcttgtttgagtatcagaagaacaacaaggattctcatagcctgaccactaacatcatggagatcctccgtggggacttttcaagtgccaataacagggacaacacatataatcgggtctccgaggatttacggtctcggattgaggtgctgaaaagaaaggttatcgaaaaagttcagcatattcagctattgcagaagaatgtacgtgcccaactcgtggacatgaagagactggaagtggatatcgatattaaaatccggtcttgcagagggtcctgtagtagagccctggctcgggaggtcgacctcaaggactacgaggaccaacaaaaacagctagaacaggtgattgccaaggaccttctcccatctagagatcgtcaacatcttccgctgatcaagatgaagcccgtgcccgacctggtgcccggtaacttcaaatcgcagcttcagaaggtccccccggagtggaaggctctgactgacatgccacaaatgcgcatggagctggagcggcctggcggtaacgaaattaccagggggggcagtacctcctatggcacaggatccgagaccgaatctccccggaatccttcttccgctggctcgtggaatagcggtagttcaggccccggttcgactggaaacagaaacccaggtagtagtgggacaggcggaacagccacctggaagcctgggtccagcggacccggttcaactggctcttggaatagcggaagcagcggtactggcagtaccggcaaccagaatcccggatctcctcgcccagggagtaccgggacgtggaaccccggttcatcggaaagaggcagtgccgggcactggacgtccgagagctcagtatctggctctaccggtcaatggcatagtgaaagtggcagttttaggccagacagtcccggatctggtaacgcaagaccaaataaccctgactggggcacatttgaggaagtgtcagggaatgtgtcacctggaacgaggagggagtaccacactgagaagctggtgacgtctaagggtgataaggaactgcgaacaggaaaggagaaagttacatctgggtcaacaaccactactcggcggagttgcagcaagactgtgacaaaaaccgtgatcgggcccgacggacacaaagaagtcactaaagaagtcgtgacatctgaagatggcagtgattgtcccgaggcgatggacctaggcacactgtcgggtattggcacgctcgacgggttccggcaccgccaccccgatgaggcagcttttttcgacaccgcttctacaggtaagacattcccaggcttcttcagcccgatgctgggcgaatttgtatctgagactgagtcgaggggttcagagtctggcatctttactaatactaaggagtcttctagccaccaccctggaattgctgaatttccatcgaggggcaagagctccagctactccaagcagtttacctcaagcacatcttataaccgcggcgattcgacattcgaatccaagtcctacaagatggcagacgaggccgggagcgaggctgatcacgaggggactcattctacaaagagaggacatgccaagtctcgccctgtgcgtgactgtgacgacgtccttcagacacacccatccggtacgcagtccgggattttcaatattaaattgcctggatccagcaagatcttttctgtctactgcgaccaagagactagtctgggcggatggctgttaattcagcaacgtatggacggatccctgaacttcaaccgtacctggcaggattataagcgaggcttcggctctttgaacgacgagggggagggagagttctggttaggaaacgactatctacacctgctgactcaacgaggctccgttttgagagtggagctggaagactgggccgggaacgaggcttacgcagagtaccattttcgcgtgggatcagaggccgaggggtacgccctgcaggttagctcatacgagggcactgcaggtgatgctcttatcgagggaagtgtggaggagggagctgagtacacatcacataacaacatgcagttcagcactttcgatcgagatgcagatcaatgggaggagaactgcgcagaagtgtatggcggtggctggtggtacaataactgccaggctgcaaacctcaacggaatatactaccctggcggtagctacgacccaaggaataacagcccatatgagatagagaacggggtggtgtgggtgagtttccgaggtgctgattattccttacgggctgtacgaatgaagatccggccattggtcactcag

SEQ ID NO: 11180 - DNA, 2598 bp, synthetic construct
  misc_feature 1..2598: note = source = /note="Description of Artificial Sequence: Synthetic coding sequence"
  source 1..2598: mol_type = other DNA
atgttttccatgaggattgtctgccttgtcctgtctgtggtggggacggcatggaccgccgactcgggcgagggagattttttggccgagggtgggggggtgaggggaccacgcgtcgtcgagcggcatcagagcgcctgtaaggactccgactggccattctgctctgatgaagactggaactataaatgcccgagcggatgcagaatgaaaggcctgatcgacgaggtgaatcaggatttcaccaatagaatcaacaagctgaagaatagtctcttcgagtatcagaaaaacaataaggacagtcactcattgactaccaatatcatggaaatcctgcgaggcgacttctcgagcgccaacaaccgcgataacacctacaaccgcgtctcagaggatctgcgctcgagaattgaagttctaaagcggaaagtgattgagaaagtgcagcatatccaactgctccagaaaaacgtgagggctcagctagtcgatatgaagcgcctcgaagttgatatcgatatcaagataaggtcatgccgggggtcatgtagtagagccctggctcgggaagtggaccttaaggactacgaagaccagcagaagcagctagaacaagtgatcgccaaagacttgttacctagcagagatcgccaacatcttcccctcatcaagatgaagccagtcccagatcttgtgccaggaaacttcaaaagccagttacagaaggtgcctcccgagtggaaagccttgacagacatgccccagatgaggatggagctggagcggccaggaggtaacgaaatcaccagaggtgggtcaacctcatatggtaccggcagcgaaaccgaaagccctcggaatccgagttccgctgggtcctggaattcggggagctccggcccaggatccacgggcaacagaaaccccggcagctccgggacaggtgggacagcaacctggaagcctggatcctccggaccgggaagtacaggatcctggaactcagggtcgagcgggacgggcagtacagggaatcagaacccaggtagtccccggcccggctccaccggaacttggaatcccggcagctccgagcgaggttcggccgggcactggaccagtgaatcgtcagtaagcggtagtacaggtcagtggcactccgaatcgggcagttttcgtcccgactcccccgggtcaggtaatgcacgcccgaataaccccgactggggtacgtttgaggaagtcagtggtaacgtgtctcccggcacccgcagggagtaccacaccgagaagctggtgacgagcaagggagacaaggagcttagaacgggtaaggagaaagtgacatccgggagcaccacaaccacacggcggtcatgcagcaaaacagtgaccaagaccgtgattgggccagacggtcacaaggaggtcactaaagaagtggtaacatccgaggatgggtccgactgtcctgaggcaatggatcttggaaccttatccgggatcggaaccttagacggatttagacacagacaccccgatgaggccgcattctttgataccgcctctaccggcaaaacctttccgggcttttttagcccgatgttgggcgagtttgtcagcgaaacagagagcaggggcagtgagtcaggaatttttaccaacacgaaagagtccagcagccaccaccctgggatcgctgagttccccagcagaggtaagagctctagttactccaaacaattcaccagctctacgagctataatcgaggggatagtacgttcgagtctaaatcttacaagatggccgatgaggcgggctctgaagcagaccacgaaggcactcactcaactaagaggggccacgccaaaagcaggccggtacgagactgcgacgatgttttgcagactcatccaagcggcacacaatcaggaatattcaacattaaactgccgggctcttcaaagatattcagcgtatactgcgatcaggagacctctctcggcggatggctgctgattcaacagcgcatggatggatctctcaatttcaatcggacctggcaggattataagcggggctttggaagcctgaatgatgaaggggagggcgaattttggctggggaatgactaccttcacctgctgacgcagcggggcagtgtgctgcgcgtggaattggaagactgggccggaaacgaggcatatgccgagtaccacttcagagtgggatccgaagctgagggttatgctctgcaagtgtcaagttatgaaggcacagccggggacgccctcatagaaggcagcgtggaagagggggctgaatatacttcccacaataacatgcagttctcaactttcgaccgggacgcagatcagtgggaagagaattgtgcggaggtgtatggcggcggatggtggtataataactgccaggccgccaatctgaatggaatttattatcccgggggctcttacgatccaagaaacaattctccatacgagattgagaacggtgtggtgtgggtttccttcaggggcgccgactatagtctgagggccgtgcgaatgaaaatccgccctctggtaacgcag

SEQ ID NO: 11181 - DNA, 2598 bp, synthetic construct
  misc_feature 1..2598: note = source = /note="Description of Artificial Sequence: Synthetic coding sequence"
  source 1..2598: mol_type = other DNA
atgttctctatgagaatcgtttgtttggtgctctccgttgtcggcacggcttggacagctgactcaggcgagggggacttcttggctgaggggggaggtgtgcgtggccctagggttgtggaacggcatcagtctgcatgtaaagactcagattggccattctgcagcgatgaggattggaattataaatgtccgtctgggtgtagaatgaagggccttatcgacgaggttaaccaagactttaccaacaggattaataagctgaaaaactctctgttcgaataccagaagaataacaaggacagccacagtctgacgacaaatatcatggagattttacggggcgatttctcttcggccaacaatcgcgacaatacctacaaccgggtgtcggaggatcttaggtctagaattgaggtactgaagcggaaagtgattgagaaggttcagcacattcagttgcttcagaaaaacgtacgggcccagctggtcgacatgaaacggctggaggtggatattgacatcaaaattaggtcttgcaggggttcttgtagccgggcactggctcgtgaggtggacctgaaagactacgaggatcagcagaagcagttggagcaggtgatcgccaaggatttacttccgagccgcgacagacaacacctgcctcttattaagatgaaacccgtccctgatctagttccggggaatttcaaatctcagctgcagaaagtcccacctgagtggaaagccctgacggacatgccccagatgaggatggaactagaacgccctggggggaatgagatcacgcgtggagggtccacctcttatggaactggttctgaaacagagtctccgagaaatccttcatctgccggctcatggaatagtggctctagtggccctgggagtacaggtaacagaaaccccggcagctctgggactggaggaactgcaacatggaaaccgggatcatccggtccaggctctactgggagctggaactctgggtcaagcggtaccggctccacagggaaccagaacccagggtccccccggccgggctcgacagggacatggaacccaggcagttcagaacgcggctccgccggccactggacgtcggaaagcagcgtgagcggctcaacagggcagtggcattcagagtcaggctcttttcgccccgattccccaggcagtggcaatgctcgtcctaacaaccccgactggggtacttttgaagaggtgagcggtaatgtcagccctgggaccagacgggaatatcacactgaaaagctggtgacatcgaagggggataaagagctgcgaacagggaaagagaaagtcaccagtggtagcaccacaactacgcgcagaagttgctccaagaccgtaactaagacggttattgggccagatggacacaaagaggtaaccaaggaggtagtcacctccgaagatgggtcagactgccctgaagccatggatcttgggactttaagcggcatcgggacacttgacgggttccggcatcgccatcctgacgaagccgctttctttgatacagcaagtacagggaagacgtttccaggtttcttcagcccaatgttgggcgaatttgtgtcagagacagaatctcgcggttcagagagcggtatattcactaacacgaaggagagttcctcacaccaccctgggattgccgaattcccctccaggggtaagtcaagctcctactccaagcagttcactagctcaacaagctataaccggggagattccacgtttgagtcgaaatcctacaagatggcggacgaggctggctctgaagcagatcatgaggggacacatagtaccaagcgaggtcatgccaagtcacgaccagtgagggactgtgatgatgtgctgcagactcatccttccggaacgcaatccggaatatttaatattaagttgccgggatcctcgaagattttttctgtatactgcgaccaggagacatcactgggcggctggctgctgatccagcagcgaatggacgggagcctgaacttcaatcgcacgtggcaggattataaacgagggtttggtagtctcaacgacgaaggcgagggcgagttctggctgggcaatgactacctgcacctgctaacccagcggggcagcgtcctcagagttgagctcgaagactgggcaggaaatgaggcctatgctgaataccacttcagagtaggctctgaggccgaggggtatgctctccaggttagctcatacgagggtacggccggcgatgcacttattgaggggtctgtggaagaaggcgcagagtacaccagccacaataacatgcagtttagtacttttgacagagacgccgaccagtgggaggaaaactgcgcggaggtgtacggtgggggctggtggtacaataattgccaggcagccaacctcaacggaatctactacccaggaggcagttatgatcccaggaacaactccccctacgaaattgaaaacggcgtagtatgggtgagcttcaggggcgcagactacagtttgagggccgtgcgcatgaagatcagacctcttgtgacccag

SEQ ID NO: 11182 - DNA, 2598 bp, synthetic construct
  misc_feature 1..2598: note = source = /note="Description of Artificial Sequence: Synthetic coding sequence"
  source 1..2598: mol_type = other DNA
atgtttagcatgcggatcgtttgtttggttctctcggtggtaggaacagcttggacagctgattccggtgaaggggattttcttgccgaagggggcggtgtccgagggcccagagtcgtggagaggcatcagtccgcatgtaaagattctgactggccattttgctctgacgaggactggaattataaatgtcccagtgggtgccgcatgaaaggattgattgatgaggtgaatcaggacttcactaacaggataaataagctcaagaattccctgtttgagtaccaaaagaataacaaagattcacactcactgactacgaacattatggaaatcttacgcggtgatttcagctcagccaataatagagacaatacctacaaccgggtgagtgaagacctgcggtcacggatcgaagtgttaaagagaaaagtaatagagaaggttcagcacatccaactgctccaaaagaatgttagggcccagctggtggacatgaagcgcctggaagtggatattgacatcaagattagatcgtgccgtggaagctgcagccgggcactggctcgtgaggtggatctcaaggattatgaggaccagcagaagcaattagagcaagtgatcgctaaggacctgcttccctcccgggacagacaacacctgcccctgatcaaaatgaaaccagtaccagacttggtccccggaaattttaaaagtcagctgcagaaagtgccaccagaatggaaggcgttgaccgatatgcctcagatgcgcatggagctggaaagacccggcgggaatgagatcactcggggtgggagtacttcctacggtaccggtagtgagactgagagcccaagaaacccttcgtccgcgggaagttggaattcaggctctagtggtcctggctcaaccggcaaccgcaaccctggatccagcggtacaggcggaacagctacttggaagccaggctcctccggccccgggtcaactggcagctggaactccgggtcaagcggaaccggttcaaccggtaatcaaaacccagggtcccctcgacctggctctacagggacctggaaccctggaagtagtgaaagaggtagcgcaggtcactggactagtgagagcagtgtgtccggctcgacaggacagtggcattccgagtccggcagttttaggcccgacagcccgggctccggcaacgcacggcccaataacccggattggggcacgttcgaggaagtgagcggaaacgtcagcccaggaacacgaagagaataccacaccgagaagctggtcacctctaaaggagacaaagaactgagaacaggaaaggagaaagtgacaagtggttccacaactactacccgtcgctcctgtagtaaaaccgtcaccaagacagtcatcggccctgacgggcacaaagaagtgaccaaagaggtcgtaacctccgaggacggctcggactgtcctgaggccatggacttggggaccctgtcgggcattggtacactcgacggattccggcaccgacaccctgatgaagctgccttctttgataccgcctcaaccggcaagacctttcccgggtttttcagtccaatgttgggggagtttgtctctgaaaccgaatcgcgggggagtgagagtggaatcttcacaaatactaaggagtcatcctctcatcatccaggaatcgcagagtttccctctcgaggcaaaagctcatcttactccaaacagttcacaagcagcacctcatataaccgaggcgacagtacattcgaaagcaaatcttataaaatggccgatgaagccggttctgaagccgatcatgaaggcactcactcgacaaaaagaggccacgcgaagagccggcccgtgagggactgcgacgatgtgttacagacacatccctccggaactcaatccggaattttcaacatcaaactgcccggcagttctaagatcttcagtgtctactgtgaccaagaaacctccctgggcggctggctcctgatacagcagcgtatggatggctctcttaacttcaatcgaacttggcaggattataagagggggttcggctccctcaacgatgaaggcgaaggtgagttctggctgggcaatgactatctgcacctgttgacacagagaggatcagtgcttcgggtggaactcgaagactgggccggtaacgaagcctatgccgagtaccactttcgtgtagggtcagaggcagaaggctacgcccttcaagtgtcaagttatgaaggcacagccggggatgctctgatcgaaggctctgtcgaggaaggggcagagtacaccagccacaataacatgcagttttccacttttgatagggacgccgatcagtgggaagagaattgcgccgaggtatacgggggtggatggtggtacaacaactgtcaggcagccaacctgaacgggatatactatcctggaggatcttacgacccgcgcaacaatagcccttacgaaatagaaaacggagtggtgtgggtgagttttcggggcgcagattattccctgcgagctgtgagaatgaaaatccgtcctttggtcactcag

SEQ ID NO: 11183 - DNA, 2598 bp, synthetic construct
  misc_feature 1..2598: note = source = /note="Description of Artificial Sequence: Synthetic coding sequence"
  source 1..2598: mol_type = other DNA
atgttttctatgcgcattgtgtgcctggtgctatcggttgtcggcacggcatggacagcagacagcggagagggagacttcctcgccgagggaggaggggtgagaggaccaagagtagtcgaacggcaccaatccgcgtgtaaggattctgactggcccttttgtagcgatgaagattggaattacaagtgtccctctggctgtcgcatgaaaggcttaatagacgaggtgaaccaagacttcacaaataggatcaacaaactcaagaatagtctgttcgagtaccagaagaataacaaagacagccattcgctcacaacgaacattatggagatcttacgcggtgattttagctcggccaataacagggataatacgtataaccgcgtctctgaagacctgcgctctcgtattgaggtgctcaagcgaaaagtgatagaaaaagtgcagcacattcagcttctgcagaaaaacgtacgcgcccagcttgtggatatgaaacgcttggaggtggacattgacatcaagatccggtcttgcaggggtagctgttcccgggcactggcacgggaagtcgatctaaaggattacgaggatcagcagaaacagctcgagcaagttattgctaaggacctcctcccaagtagggaccgacagcacctgcccctgatcaagatgaaacccgttcccgacctagtgccgggcaactttaagagtcagctccagaaggtcccaccagagtggaaggccctaaccgacatgccacaaatgagaatggagctcgaacgcccaggcggaaatgagatcacaaggggtggtagcactagctatggcaccgggtcggaaacagaatcccctcgcaatccatctagtgcagggtcctggaacagtgggtcctcaggtcccggaagcaccggcaaccggaacccaggaagctccggcaccgggggcactgccacatggaagccaggctctagtggcccaggcagcaccgggagttggaactccgggtcatcagggacaggaagcaccggaaaccagaacccaggttccccccggcccggcagcaccggcacttggaacccaggatcatctgagagaggctctgcaggccactggacatcagagtctagcgtgtcaggaagcactggtcaatggcattccgaaagtgggtctttcagacctgacagcccagggtccgggaatgctcggcctaataacccagactggggcacatttgaggaggtgtcgggcaacgtatcccccggaactcgccgcgagtaccatactgaaaaattggttacttccaagggtgataaagagttgcgtaccggaaaggagaaggtgacctcgggatcaaccactaccacccgcagatcatgtagcaaaacagttaccaaaacggttatcggtccggacggacataaggaagtcaccaaggaggtcgttactagcgaagatgggtcagactgtcccgaagccatggatctgggcaccctgtccgggataggcaccctagatggattccgtcatcgtcacccagatgaggccgcattttttgatactgcgtcgactgggaagacatttcccggcttctttagtcctatgcttggagagttcgtctcagaaaccgagtcccgcggcagtgagtcaggaatctttaccaacacgaaagagtcttccagccatcaccccggtatcgcagagtttccgagccgcggcaaatcaagctcttacagtaagcagttcacatcctctacatcttataatagaggcgactctaccttcgagtccaagtcttacaagatggccgacgaggcaggtagcgaagcagaccatgaggggacccacagcaccaaacggggacacgcaaagtcgcgcccagtgcgagattgcgatgatgtgctccagacccacccgagtgggacacagtccggaatcttcaatattaaattgcctggcagctccaagattttttctgtgtactgcgaccaagaaacaagcctcggagggtggctcttgatccagcagcgaatggatgggtcactcaactttaacagaacctggcaggactacaagaggggattcggatccctcaacgacgaaggtgagggtgaattttggttgggtaacgattatctgcacctgttgacacaaaggggttccgtactacgcgtcgagctggaggactgggctggtaacgaggcctacgctgaataccatttccgcgtggggtccgaagccgaggggtacgcattgcaagtaagttcatacgagggcacagctggggatgctctgatcgagggaagtgtggaggaaggcgcagaatacacatcacacaacaacatgcaattctctacctttgaccgggacgccgatcagtgggaggagaattgtgcagaggtgtacgggggcggctggtggtacaacaactgccaagctgccaacctgaacggcatttactaccctggtggatcttatgacccaagaaataatagcccctatgagatagaaaacggtgttgtttgggtctcctttcggggcgctgactactctctgagggctgtcaggatgaaaatccggcctctggtcacccag

SEQ ID NO: 11184 - DNA, 2598 bp, synthetic construct
  misc_feature 1..2598: note = source = /note="Description of Artificial Sequence: Synthetic coding sequence"
  source 1..2598: mol_type = other DNA
atgttctctatgagaattgtatgcctggtgctgtccgtagtggggactgcatggaccgctgattccggagagggggatttccttgctgagggcggcggggtacgcggaccacgggtggtggagcggcatcagagcgcatgtaaggactccgattggcccttttgctccgatgaggactggaattataagtgccccagcggatgccgaatgaaaggactgatcgacgaagtcaaccaggacttcacaaataggatcaacaagctcaaaaactccctgtttgaataccaaaaaaacaacaaggacagtcatagtctcacaaccaatattatggaaattcttcgcggcgatttctcatccgccaacaatcgggacaacacttacaaccgcgtgtccgaagacctgaggagtaggatagaggtcttgaaaagaaaggtgattgagaaagtgcagcacatccagttgttgcaaaagaatgtgagggcccaattggtggatatgaaaagactggaggtggatatcgatattaaaataagaagttgtcgcggaagttgctccagggcactggcccgggaggttgatctgaaagattacgaagaccagcagaagcagctcgaacaagtgattgcgaaggatcttctcccaagcagggaccggcaacatcttcctctcattaaaatgaaaccggtcccagacctggtccccggaaacttcaagagccagctgcagaaagtcccgcccgaatggaaggcccttacagacatgccgcaaatgcggatggagcttgaaagacctgggggcaatgagatcacaaggggcggctcaaccagctacggaactggttcagagaccgaaagtcctaggaacccatctagtgcagggagctggaatagtggatcatcaggccctgggagcacaggcaataggaatccaggtagcagcggaactggtgggacagctacatggaaacccgggtcatctggacctggctccacagggtcttggaacagtggcagctctggcaccgggtctaccgggaatcagaacccggggtccccacggccgggatctacaggtacctggaaccctgggagctcagaaagagggtcagccggacactggacttccgagagttcagtgtcaggcagcactggacagtggcatagcgagagcggatcttttcggccagatagtcctggaagtggcaacgcccggcccaataatcccgattggggtaccttcgaagaagtcagtgggaacgtatctcctgggacccggcgggaataccacacagagaaactggtcacttcaaagggagataaagagctccggacaggcaaggaaaaggtgaccagcggttccactacaacaacaaggaggtcttgttccaaaacggtcacaaaaacagtgatcgggccagatggacacaaggaagtgactaaagaagttgtaacaagcgaagacggctctgattgtcctgaggcgatggacttgggcacccttagcggtattggtacactggatgggtttcggcataggcatccggacgaggccgccttcttcgatacggcttctaccgggaaaacattccccggcttcttttctcccatgctgggagaatttgtgagcgagacagaaagtcgagggtctgaatcaggcattttcacaaacacaaaggagagttccagtcaccatcctgggattgctgagttccctagtaggggcaagtctagtagctacagcaagcagtttacaagttccacctcttacaacagaggagactccacctttgagtctaaaagttacaagatggccgacgaggcgggctccgaggcagaccacgaaggcactcactcaactaagagaggtcatgctaaatccaggcccgtgagggattgcgatgatgtgttgcagacacacccaagcggtacgcagagtgggatttttaacattaagctgcctggatcttctaagatcttctcagtttattgcgatcaagagaccagcctgggtgggtggctgctgattcagcagagaatggacgggtccctgaacttcaaccggacctggcaggattacaagaggggattcgggtctctgaacgacgagggggagggcgagttttggctggggaacgattatctgcatttgctgactcagcgggggagcgtattgagagttgagctcgaagactgggccggcaatgaagcttacgctgagtatcacttccgcgtcggctccgaggccgaagggtacgcactgcaggtatcttcttacgaaggaaccgccggagatgccctgatcgaggggtccgtagaggaaggggccgagtatacttctcataacaatatgcaattctcaactttcgatcgggacgcggaccagtgggaagaaaattgtgctgaggtatacggaggtgggtggtggtataacaattgtcaggccgcaaatctgaatggtatctattaccctgggggatcttatgaccctcgaaacaactctccttacgaaatcgagaacggggtggtatgggtatcttttcgaggggctgactattcattgcgggccgtccgaatgaagatacgaccactcgtgactcag

SEQ ID NO: 11185 - DNA, 2598 bp, synthetic construct
  misc_feature 1..2598: note = source = /note="Description of Artificial Sequence: Synthetic coding sequence"
  source 1..2598: mol_type = other DNA
atgttctctatgaggattgtgtgtctagtgctaagcgtggtgggaaccgcatggacagccgactccggggagggggatttcttagccgaaggtggaggggtgagaggtccgcgcgtcgtggagcggcaccaatccgcctgcaaagactctgactggcccttctgttctgatgaggattggaactacaaatgcccttcgggctgcaggatgaaagggctcatcgatgaagtgaatcaggattttacaaaccggattaacaagctgaaaaacagcttattcgagtaccagaaaaacaacaaggacagccacagcttgaccactaacatcatggagattctgcggggcgatttttcttctgcaaataaccgagacaacacttacaaccgggtctccgaggatttgcgatcccgcatcgaggtgttgaagcggaaggtgatagaaaaggtgcagcacattcagctcttgcagaaaaacgtgcgtgcacagctagtagatatgaagcgcctcgaagttgacatcgatatcaaaataagaagctgccgcgggagctgttctcgggccttggctcgggaggttgatctgaaggactacgaagatcagcagaaacagctcgaacaggttattgccaaggacctcctgccttcaagagaccgccaacacctgcccctcataaagatgaagcccgtgcccgacctggtgcctggcaattttaagagtcagctccaaaaagtgcctccagagtggaaggccctgacagacatgcctcagatgagaatggagcttgagcgaccgggaggcaatgagatcacaagaggcgggtccacttcatatggaaccggatctgaaaccgagtcacctcggaacccgtcatctgccggaagttggaatagcggcagttccggacctggcagtactggaaacagaaacccaggatcctcgggaactggaggcacagccacatggaagccaggttccagcggtcccggcagtactggctcctggaacagcggctcctccgggacaggatctaccggcaatcaaaaccccgggtccccaagacccggatccacgggtacatggaacccagggagttccgaaaggggatctgccggccattggacctctgagtctagcgtgtctggttcaactgggcagtggcacagcgaaagcggtagctttagacccgatagtccaggctccggcaatgcccgcccaaataaccccgactggggaactttcgaggaagtgagcgggaatgtgtcccctgggactcgaagagagtatcatacggagaagctcgtgacctccaagggggataaagagttgaggacgggaaaagaaaaagtgacttccggctccaccactaccaccagaaggagctgctctaagacagtcacaaagactgtcattggacccgacggccacaaagaggtcaccaaggaggtcgtgactagcgaagacgggtctgactgccccgaagccatggatctcggaacgctctccggtatcggaaccctagatggatttaggcaccgacatccggacgaagctgccttcttcgatactgcttccacgggcaagacgttcccgggttttttctcgccaatgctcggtgaattcgtgtctgaaaccgaaagccgaggctctgaatctggaatatttaccaataccaaggaaagctcttcgcaccatccgggaatcgctgaattcccctctagggggaagagctccagctactctaagcagtttactagctctacctcatataacagaggcgacagcacttttgagtccaagtcctataaaatggccgacgaggcaggctccgaggcagaccacgaaggtactcacagtacaaaacgaggccatgctaaatcaagacccgttcgcgattgtgatgatgttttacagacacatcctagcggtacccagtctggaatcttcaatatcaagctgccaggatccagcaagattttttctgtgtattgcgatcaagagacaagtctcggtgggtggttgcttatccaacagaggatggacggtagtcttaactttaataggacctggcaggattataagaggggttttggctctctaaacgacgaaggtgagggcgagttttggctgggcaacgattatttacatctgctgacgcaaaggggcagtgttcttcgcgtggaactggaagactgggcaggtaacgaggcctatgcagaatatcacttcagggtgggctctgaggctgaagggtacgccctgcaggtttccagctacgagggcaccgccggcgacgcactgatagagggaagcgtagaggagggagcggagtacacatctcacaataatatgcaattctcgaccttcgatagagatgcggatcagtgggaagaaaactgcgccgaggtttacggagggggatggtggtataataattgccaagcagcaaacctcaatggcatatactaccccggcggaagctacgaccccaggaataatagcccatacgagatcgaaaatggggtggtgtgggtctccttcagaggagccgactattccttgcgcgcagttcggatgaagatccgccccttggtgacacaa

SEQ ID NO: 11186 - DNA, 2598 bp, synthetic construct; identical to SEQ ID NO: 11160
  misc_feature 1..2598: note = source = /note="Description of Artificial Sequence: Synthetic coding sequence"
  source 1..2598: mol_type = other DNA

SEQ ID NO: 11187 - DNA, 2598 bp, synthetic construct
  misc_feature 1..2598: note = source = /note="Description of Artificial Sequence: Synthetic coding sequence"
  source 1..2598: mol_type = other DNA
atgtttagcatgcgaattgtttgtctggtgctgagtgttgtgggtactgcgtggactgccgattccggagagggtgacttccttgcagaaggcggcggtgttcgcggccctcgggttgtggaaaggcatcagtccgcgtgcaaagattcggactggcctttctgtagcgacgaagactggaactataagtgtcctagtgggtgcaggatgaaaggcctgatcgatgaggtgaatcaagactttaccaaccgcatcaacaaactgaagaactccctattcgagtaccaaaagaacaacaaagattcgcattctttgaccacaaacattatggaaatcctgcgaggtgactttagctctgccaataaccgcgataacacttataaccgtgtcagcgaggatctccggagccgaattgaggtcctgaaacgcaaagtcatcgagaaggttcagcatattcaactcctgcaaaagaatgttcgcgcacagctggtcgacatgaaacgtctcgaagttgatattgacatcaaaatccggtcctgtagagggagctgtagccgcgctctggctcgcgaggttgacctgaaggactacgaggaccaacagaagcaactggagcaggtgatcgcaaaagatctcctgcctagtcgagacaggcagcacctgccattgattaagatgaaaccggtgcctgacctggtacctggcaacttcaagtctcaactgcagaaggtgccaccagagtggaaagctctgactgatatgccgcaaatgcggatggaattggaacggccaggcggcaacgagatcacccgcggcgggtctactagctatggcaccggctccgagacagaatcaccgcggaatccgtcgagcgccggcagctggaacagcggctcgagcggtccaggcagcacgggtaataggaacccgggaagcagcggaaccggtgggacagctacctggaagcctggttccagtggtcccggctccactggatcatggaattcaggcagctccggcacgggttcgacggggaaccaaaaccccggcagcccacgccctggaagcacgggcacctggaatccaggtagtagcgagcgcggaagcgccggtcactggacgtccgagagcagcgttagcggatcaactggccagtggcacagcgaatccggctcatttcgcccagacagcccaggtagcggtaacgcccgtcccaataatccggattgggggacgtttgaagaggtcagcggaaacgtaagcccaggtacccggcgggaatatcacacagaaaagttggtgaccagcaagggagacaaagagctacgcacgggtaaagaaaaagttacctccggcagcaccacgactacgcgtcgatcatgctcgaaaaccgttacaaagaccgtgatcggccccgatggacataaggaggtcaccaaggaggtcgtaacgagtgaggatgggtccgattgccctgaagcgatggacttgggcacgttaagcggaatcggcacccttgatgggtttcgtcaccgtcacccggacgaagctgcgtttttcgatacggccagcaccggtaagacctttcctggattcttttccccgatgctgggagaattcgtgtccgaaaccgagtcccgcggctctgagagtggtatttttacgaacacgaaagaatcgagcagccaccatccaggcattgcagagttcccgtcgcggggtaagagctcttcctattctaaacagttcactagctccaccagctacaaccgcggcgattctaccttcgaatctaagtcttataaaatggcggatgaagcaggcagcgaagcagatcatgagggtactcacagcactaaacgtggccatgcgaagtcccggcctgtgcgtgactgtgacgatgtcctgcagactcatcctagtggaactcaatccggcatttttaatataaaactcccaggctctagcaagatattctcagtttactgtgaccaggaaacatcccttggaggttggctgttgatccaacagcgcatggatggcagccttaattttaaccgcacctggcaggattataagagggggttcgggtcgctgaatgatgaaggtgagggtgaattctggcttggcaatgattacctgcatctgttaacacagcgaggcagcgtgctgcgcgtggaactggaagactgggccggtaacgaagcgtatgcagaataccacttccgcgtcggcagtgaagcggagggatacgcactgcaggtaagctcctacgagggtacagcgggcgatgctttgattgaggggagcgtggaggaaggtgctgagtatactagccacaataatatgcagttcagcaccttcgatcgtgacgcggatcagtgggaagagaattgcgcggaggtgtatggcggcggttggtggtacaacaattgtcaggccgcgaatctaaacggtatttactatccaggcgggagctacgatcctcgcaacaactctccatacgagatcgagaatggtgtagtgtgggtcagctttcgcggtgcagactattcccttcgcgccgtgcggatgaagattcgacccctggttacccag

SEQ ID NO: 11188 - DNA, 2598 bp, synthetic construct
  misc_feature 1..2598: note = source = /note="Description of Artificial Sequence: Synthetic coding sequence"
  source 1..2598: mol_type = other DNA
atgttttctatgcgcatcgtttgcctggtactttcggtggtaggtaccgcgtggaccgcagattctggggaaggcgatttcctcgcggaaggtgggggggtgcgaggcccaagagtagtggagcgccatcagtccgcctgtaaagactcagactggcccttctgttcggatgaggactggaattataaatgtccctcaggatgccgcatgaagggtctgatagacgaggtgaatcaggacttcaccaatcggataaacaaactgaagaattccctgtttgaataccagaagaacaacaaggactcccattccctgacgacgaacattatggagattctcagaggcgatttcagtagcgcgaacaacagggacaacacatataacagagtgtctgaagatttaagaagtcgcatagaggtgttgaagagaaaggttattgaaaaagtgcaacatattcagttgctgcagaagaatgtgcgtgcccagctggtcgatatgaagcgtctggaagtcgacattgatattaagatacgatcatgtcgtgggagctgttcacgggcattagccagagaggtggacctgaaggactacgaggatcagcagaaacagcttgagcaagtgattgcaaaggacctgctcccatctagagatcggcagcacctccccctgatcaagatgaagcctgttcctgacctagtacccggtaacttcaaatctcagctccagaaggtgcccccagagtggaaagcactaactgatatgccacagatgcgtatggagctcgagaggcccggagggaacgaaataacccgcgggggatcaacatcttatggtaccggctcagaaacagagtctcctagaaatccctcttctgcaggatcttggaatagtgggagcagtggccccggcagtaccgggaaccggaaccctgggagttcaggcactggcgggaccgccacgtggaaacccggatccagtggccctggaagtacggggtcgtggaattcaggaagctctggaacaggttcaactgggaaccagaatccaggaagcccaaggcccggaagtaccgggacatggaaccctgggtcttcagagcgcgggtctgctgggcactggacatcagagtcaagtgtgagtggctcaactggccaatggcatagcgaatctggatcgtttcggcctgattcgccaggatcaggcaatgcaaggccaaataaccccgactgggggaccttcgaagaggtgtctggcaatgttagtcctggaacccggcgcgaataccacacagagaaattagtgacctcgaagggcgacaaggagctgcgaactgggaaggaaaaagttaccagcggcagtactaccacaacacgccggagttgttccaaaacagttacgaagacagtgatcggcccggatggccacaaagaagtgacaaaagaagtggtcaccagcgaggacgggagtgactgcccagaggcaatggatctgggaacgctgtctggtattggcactctagatggcttcagacaccgccatcctgacgaggctgccttcttcgatacagcttccacagggaagacgttccctgggtttttttcaccgatgcttggcgaatttgtgagcgagaccgagtctcgtgggagtgaatccgggatttttacgaacacgaaggagtcttcctcgcatcatccagggattgccgagttcccatcgcggggcaagtcaagcagctattctaaacagttcacgagctccacctcttataacaggggcgacagcacctttgaatccaaatcttataagatggctgatgaggccggttctgaggcggatcacgaaggtactcacagtacgaagagaggacacgccaagtcccgcccagtgagggattgcgacgacgtacttcagactcaccccagcggcacacagtcaggtattttcaacatcaaactgccggggtctagcaagatattctcggtttactgtgatcaagagactagtctgggcgggtggcttctaatacagcagcgcatggacggctcccttaacttcaaccgcacctggcaagattataagagaggatttggatcgctcaacgatgaaggggagggagagttctggctgggtaatgattacctgcaccttctgacacagagaggaagcgtgttgagggtggaactcgaagattgggccggcaatgaagcatacgcagaataccacttccgggtggggagcgaagccgaggggtatgcgttgcaggtcagctcctatgaggggacagctggagatgccctaatcgagggatctgttgaagaaggcgcggagtataccagccacaataacatgcagttctcaactttcgatagggatgcggatcagtgggaggaaaactgtgccgaggtctacgggggggggtggtggtataataattgccaggctgctaatcttaacgggatctattatcccgggggaagctacgatccccggaacaactcaccgtatgagattgaaaacggcgtggtgtgggtgtcattcaggggtgcggactactcgctcagggcagtcaggatgaagatcaggcctctggttacacag

SEQ ID NO: 11189 - DNA, 2598 bp, synthetic construct
  misc_feature 1..2598: note = source = /note="Description of Artificial Sequence: Synthetic coding sequence"
  source 1..2598: mol_type = other DNA
atgttttccatgcggatagtatgtttggttctgagtgtcgtggggaccgcatggactgctgatagtggagagggggatttcctggctgagggcggaggagtgcggggcccaagagtcgtggagcggcaccagtctgcctgcaaggactcagactggccattctgctccgatgaagattggaactacaagtgtcccagcggttgcaggatgaaaggactcattgacgaagtgaaccaggatttcaccaatcggatcaacaagttgaagaattcgctgttcgagtatcaaaaaaataacaaagatagccacagcttgaccacaaacatcatggagatcctgcggggagacttctctagcgcaaataacagagataatacctataacagagtcagtgaggacctaaggtcaagaatcgaggtgctgaagagaaaagttatcgagaaagtccaacacattcaactgcttcagaaaaacgttcgggcccagctggtggatatgaaaaggctggaagtggacatagatattaaaatcaggagctgccgcggcagctgctccagggcattggcgcgcgaggtggatttaaaagattatgaggaccagcagaagcaactggaacaggtgattgctaaggacctactgccttcccgcgatcggcagcatctcccattgatcaaaatgaaacctgttcccgacttagtgcccggaaattttaagtcccagctccagaaggtgccaccagagtggaaggctctgacagacatgcctcagatgagaatggagcttgagaggccggggggcaatgaaatcacacgcggcggtagtacctcttacggtactggaagtgagaccgagagtcctcgcaacccctccagtgcaggtagttggaatagtggttccagtggtccaggcagcacaggcaatagaaacccaggcagtagtggcactgggggaaccgccacctggaagcccggctccagtgggcccgggtctaccgggtcttggaatagcggcagttcaggcactggcagtactggcaatcagaaccctggaagcccacgtcccggttccactggcacatggaatccaggttcctccgagcggggatctgcagggcactggactagcgagagttcagttagtggttcaactggccaatggcacagcgaaagtggctcttttcgtccagacagcccaggtagcgggaacgcaagacccaacaacccagactggggaacatttgaagaggtctccggtaatgtgtcacctggcacacgtagagagtatcacactgagaagctcgtgacttcaaagggggacaaagagctcagaacaggcaaggagaaggtgaccagcgggagtactacaacaacccggaggagttgcagcaagaccgtaactaagactgttatcgggcctgatggccacaaagaggtcacaaaggaggtggtcacgtctgaagacggctcagactgtcctgaagcaatggacttgggaacgttatcaggaatcggcacgctcgatggtttcagacacaggcatcctgatgaggccgcttttttcgacaccgcatcgacaggtaagaccttccccggttttttctctcctatgctgggggagttcgtttccgaaactgagtccaggggtagcgaatccggtattttcacgaatactaaggaatcctctagccatcacccaggcatcgccgaatttccgtcacggggcaagtcctctagttattctaagcagttcacctcctccacgagttataaccggggagactctacctttgaatccaagtcttacaagatggccgacgaagccggcagtgaggccgaccatgaggggactcactccacaaaaaggggacatgccaaatctagaccggttcgcgactgtgatgatgttctccagacccaccccagcgggactcagagcgggattttcaacatcaaactccctggtagcagcaaaatcttctctgtatattgcgatcaagagacatcattggggggctggttgctcatccagcagagaatggacggctccctgaatttcaaccgtacctggcaggattataagcgagggtttggttcgttgaatgatgaaggcgagggagaattttggctgggaaatgattatcttcacttgcttacccaacgaggctctgtgcttcgagtggaactggaggactgggctgggaatgaggcctatgccgagtatcactttcgggtggggtccgaggccgagggatacgctttacaggtgtccagttacgagggaaccgcaggcgatgccctgattgaaggttctgtggaagagggcgcagagtatacaagtcacaataacatgcagttcagcacctttgatagagatgccgaccagtgggaggagaactgtgctgaggtgtacggcgggggctggtggtacaacaattgccaggcggcaaatctgaacggcatctattacccaggtgggtcctacgatccacggaataattcaccttatgagattgagaatggcgtagtgtgggtgtcatttcgcggcgctgactacagccttcgagcagttcggatgaaaataagaccactggtgacccaa

SEQ ID NO: 11190 - DNA, 2598 bp, synthetic construct
  misc_feature 1..2598: note = source = /note="Description of Artificial Sequence: Synthetic coding sequence"
  source 1..2598: mol_type = other DNA
atgttttcgatgcgaatagtatgtctagtactatcggtagtaggtacggcgtggacggcggattcgggtgaaggtgattttttagcggaaggtggtggtgttcgtggtccgcgagttgtagaacgtcatcaatcggcgtgtaaagattcggattggccgttttgttcggatgaagattggaattataaatgtccgtcgggttgtcgtatgaaaggtttaatagatgaagtaaatcaagattttacgaatcgaataaataaattaaaaaattcgttatttgaatatcaaaaaaataataaagattcgcattcgttaacgacgaatataatggaaatattacgaggtgatttttcgtcggcgaataatcgtgataatacgtataatcgtgtatcggaagatttacgttcgcgaatagaagtattaaaacgaaaagtaatagaaaaagtacaacatatacaattactacaaaaaaatgttcgtgcgcaattagtagatatgaaacgtctagaagttgatatagatataaaaatacgttcgtgtcgtggttcgtgttcgcgagcgttagcgcgtgaagtagatctaaaagattatgaagatcaacaaaaacaactagaacaagttatagcgaaagatttattaccgtcgcgtgatcgtcaacatctaccgctaataaaaatgaaaccggtaccggatttagttccgggtaattttaaatcgcaactacaaaaagtaccgccggaatggaaagcgctaacggatatgccgcaaatgcgtatggaattagaacgtccgggtggtaatgaaataacgcgtggtggttcgacgtcgtatggtacgggttcggaaacggaatcgccgcgtaatccgtcgtcggcgggttcgtggaattcgggttcgtcgggtccgggttcgacgggtaatcgaaatccgggttcgtcgggtacgggtggtacggcgacgtggaaaccgggttcgtcgggtccgggttcgacgggttcgtggaattcgggttcgtcgggtacgggttcgacgggtaatcaaaatccgggttcgccgcgaccgggttcgacgggtacgtggaatccgggttcgtcggaacgaggttcggcgggtcattggacgtcggaatcgtcggtttcgggttcgacgggtcaatggcattcggaatcgggttcgtttcgtccggattcgccgggttcgggtaatgcgcgaccgaataatccggattggggtacgtttgaagaagtttcgggtaatgtttcgccgggtacgcgtcgtgaatatcatacggaaaaattagtaacgtcgaaaggtgataaagaactacgtacgggtaaagaaaaagtaacgtcgggttcgacgacgacgacgcgtcgttcgtgttcgaaaacggtaacgaaaacggttataggtccggatggtcataaagaagtaacgaaagaagttgtaacgtcggaagatggttcggattgtccggaagcgatggatctaggtacgctatcgggtataggtacgttagatggttttcgtcatcgacatccggatgaagcggcgttttttgatacggcgtcgacgggtaaaacgtttccgggttttttttcgccgatgttaggtgaatttgtatcggaaacggaatcgcgaggttcggaatcgggtatatttacgaatacgaaagaatcgtcgtcgcatcatccgggtatagcggaatttccgtcgcgtggtaaatcgtcgtcgtattcgaaacaatttacgtcgtcgacgtcgtataatcgaggtgattcgacgtttgaatcgaaatcgtataaaatggcggatgaagcgggttcggaagcggatcatgaaggtacgcattcgacgaaacgtggtcatgcgaaatcgcgtccggtacgtgattgtgatgatgttttacaaacgcatccgtcgggtacgcaatcgggtatatttaatataaaattaccgggttcgtcgaaaatattttcggtatattgtgatcaagaaacgtcgctaggtggttggttactaatacaacaacgtatggatggttcgttaaattttaatcgaacgtggcaagattataaacgtggttttggttcgctaaatgatgaaggtgaaggtgaattttggctaggtaatgattatttacatctactaacgcaacgtggttcggtactacgagttgaattagaagattgggcgggtaatgaagcgtatgcggaatatcattttcgtgtaggttcggaagcggaaggttatgcgttacaagtttcgtcgtatgaaggtacggcgggtgatgcgttaatagaaggttcggtagaagaaggtgcggaatatacgtcgcataataatatgcaattttcgacgtttgatcgtgatgcggatcaatgggaagaaaattgtgcggaagtttatggtggtggttggtggtataataattgtcaagcggcgaatctaaatggtatatattatccgggtggttcgtatgatccgcgtaataattcgccgtatgaaatagaaaatggtgtagtatgggtatcgtttcgaggtgcggattattcgctacgtgcggtacgtatgaaaatacgtccgttagtaacgcaa

SEQ ID NO: 11191 - DNA, 1473 bp, synthetic construct
  misc_feature 1..1473: note = source = /note="Description of Artificial Sequence: Synthetic coding sequence"
  source 1..1473: mol_type = other DNA
atgaagagaatggtaagctggtccttccataaactaaagactatgaaacacctgctgctgctgctgctctgcgtgttcctcgtgaaaagtcagggcgtgaacgataacgaagaagggttcttctctgcgagggggcacaggcctcttgataagaaacgtgaggaagcgccttccctgcgacccgctccacctcctatctctggcgggggatatagggcccggccagcgaaggcggcggccactcagaagaaggtagagcgcaaggccccagacgctgggggctgtttgcacgccgatccggacctgggagtgttgtgtccgactggctgccagctgcaggaagccctgctccagcaagagcggcctattaggaattcggtggatgaactcaacaacaacgttgaggccgtcagccagaccagtagtagtagctttcagtatatgtacctcttgaaggacctttggcagaaacgacagaagcaggtgaaagacaacgagaatgtggtgaacgagtactcatcagaactggaaaaacaccagctgtacatcgacgagacggtgaattcaaatatccccacgaacctgcgggtgctacgctccatcttggagaacttaaggtcaaaaatccaaaagctggagagcgacgtgtctgcacagatggagtactgtaggaccccctgcacagtgagctgtaatatccccgtagtgtctgggaaagagtgtgaggagattatcagaaaggggggagaaacctctgagatgtatctgatccagcctgactcttccgtcaagccctatcgcgtttactgtgatatgaacaccgaaaatggggggtggacggttattcaaaatagacaggatgggagtgtcgattttggacgcaaatgggatccatacaagcaaggttttgggaatgtggccactaatacagatgggaagaactactgcggactgcctggtgaatattggctgggaaacgataaaatcagccagctgacccgaatgggtcccacagagctgctgatcgagatggaggattggaagggcgataaggttaaggcccactacggcgggtttactgtccagaatgaggccaacaagtaccagattagtgtgaacaagtaccggggcactgccggcaatgctctgatggatggcgcttcccagcttatgggcgagaaccgcacaatgactattcataacggtatgttcttttcgacgtacgatcgcgacaatgatgggtggctgacaagcgatcccagaaagcagtgtagcaaggaggatgggggcggctggtggtacaataggtgccatgccgccaacccaaacgggcggtattattgggggggacagtacacgtgggacatggccaagcatggcacagacgatggagttgtgtggatgaactggaaaggaagctggtactcaatgcggaagatgtccatgaagattaggcccttctttccacagcaa

SEQ ID NO: 11192 - DNA, 1473 bp, synthetic construct
  misc_feature 1..1473: note = source = /note="Description of Artificial Sequence: Synthetic coding sequence"
  source 1..1473: mol_type = other DNA
atgaaaaggatggtgtcgtggtcatttcataaactgaaaactatgaaacacctgctcctgttgctgctgtgtgtgtttttggttaagagccagggtgtcaatgacaacgaagaaggttttttcagcgcccgcgggcacagaccgctggataagaagcgggaagaggcccccagccttcggcccgcgcccccgccaattagcggcggaggctacagagcacgtcctgcaaaggccgcggctactcagaagaaagtcgaacgaaaggcacctgatgcaggaggttgcttgcatgcagaccctgacctgggagtgctttgtcctaccggttgtcaactgcaggaagcacttctgcagcaagaaaggcctattaggaactccgtggatgaactcaacaacaacgttgaggcagtttcacagacctcgagcagcagctttcaatacatgtacctcctgaaggatctttggcagaaacgtcagaagcaagtcaaggataacgagaacgtggtaaacgagtacagctccgaactggaaaaacatcagttgtacattgatgagactgtgaactcaaatatccctactaacttgagagtgctgcgaagcatacttgagaatctgcgctctaaaatccagaagctcgagtccgatgtgtcggcacaaatggagtactgccgcaccccttgtactgtcagctgtaacatacccgtggtttccggcaaggagtgtgaggagattatccggaagggaggtgaaaccagcgaaatgtacctcatccagcctgattcctcggtcaagccatatagagtgtactgcgacatgaacactgaaaatggagggtggacggtgattcagaacagacaagatggatcggtggactttggcaggaagtgggatccttacaagcaaggtttcggcaacgtggcgaccaatactgatggtaaaaactactgcgggcttcctggtgagtactggcttggcaacgacaagatctcgcagcttaccaggatgggaccaactgagctcctgatcgaaatggaggattggaaaggagataaagtcaaggctcactacggaggtttcactgtgcagaacgaagcgaacaagtaccaaatttcggtgaacaagtaccgcggaacggcaggaaatgccctgatggacggagcaagccaacttatgggtgaaaacagaacgatgactattcataatggtatgttcttctcaacttacgatagagacaacgatggttggctcacttcggatccccgcaagcaatgctcaaaggaagatggaggaggatggtggtataaccgctgtcatgccgcgaaccctaacggtcgatactactggggaggccaatacacttgggatatggcaaagcatggaactgacgacggtgttgtgtggatgaactggaagggttcatggtacagcatgcgtaagatgtccatgaaaattcggcccttttttccccaacaa

SEQ ID NO: 11193 - DNA, 1473 bp, synthetic construct
  misc_feature 1..1473: note = source = /note="Description of Artificial Sequence: Synthetic coding sequence"
  source 1..1473: mol_type = other DNA
atgaagagaatggtgtcgtggtcatttcataagctcaaaacgatgaaacatctgcttctgctgctgctgtgcgtgttcctggtgaaaagccagggggtgaacgacaacgaggaaggattcttctcagcccggggccacagaccactggacaagaaacgggaagaagcgcccagcttgcggccggcacccccgcctatctcggggggcggttaccgcgcccgaccggcgaaggccgccgccactcagaagaaagtggagaggaaggcgcctgacgctggtggatgcttgcacgctgaccctgaccttggggtgctgtgcccgactggatgccaactccaggaggcccttctccagcaagaacgcccaatcagaaattcagtggatgagctcaacaataacgtggaggctgtgagccagacctcctcgagctccttccaatacatgtatctcctgaaggacctgtggcagaagaggcagaaacaggtcaaggataacgaaaacgtcgtcaatgaatactcctcagagctggaaaagcaccagttgtacatcgacgagactgtgaacagcaatatcccaacgaacctccgggtgctgcggagcatccttgaaaaccttagatcgaaaatccaaaaactggaatccgacgtgtcggctcaaatggagtactgtagaactccgtgcactgtttcctgcaacatcccagtggtgtcgggcaaagagtgcgaggaaatcatcagaaaaggaggagagactagcgaaatgtacctcatccaacctgatagctcagtgaaaccttaccgcgtgtactgcgacatgaacactgaaaacggaggatggaccgtcattcaaaacaggcaggacgggtccgttgacttcggacgaaagtgggacccgtacaagcagggattcggcaacgtggcgacgaataccgacggaaagaattactgtgggctgccgggggagtactggctgggaaacgacaaaatctcacaactgaccagaatgggtccgaccgagctcctcatcgaaatggaagattggaagggggataaggtgaaggcgcactacggaggattcactgtgcagaatgaggccaacaagtaccaaatcagcgtgaacaagtaccggggcactgccggcaatgcactgatggacggggcttcccaactgatgggcgaaaacagaaccatgactattcacaacggcatgttcttttcgacttacgaccgggataacgacgggtggttgacgtcggacccgcgaaagcagtgctcgaaagaggacggcgggggctggtggtacaaccgctgccacgccgccaaccccaatggccgatactactggggaggacagtacacctgggatatggccaaacacggcaccgatgacggcgtcgtctggatgaactggaaaggatcatggtactccatgcgcaagatgtcaatgaagatccggcccttcttcccacagcag

SEQ ID NO: 11194 - DNA, 1473 bp, synthetic construct
  misc_feature 1..1473: note = source = /note="Description of Artificial Sequence: Synthetic coding sequence"
  source 1..1473: mol_type = other DNA
atgaagcgaatggtgtcgtggagcttccacaagttgaaaacgatgaagcacctgctgctcctgctgctttgtgtgtttctggtaaagtcgcagggtgttaacgataacgaagaaggttttttctccgcccggggacataggccacttgataagaaaagagaagaagcaccttcattgaggcctgctcctccgcctatcagcggcggcggttacagggccagacctgcaaaagcagcagcgacccaaaagaaggtcgaaaggaaggcacctgacgcaggcggatgccttcacgccgacccggatcttggagtgctgtgtccaaccggctgtcagcttcaagaagcacttcttcaacaagaaagaccaatccgaaattcggtcgacgaacttaacaacaatgtggaagcagtgtcgcagacttcctcctcgagctttcagtatatgtaccttctgaaggacctgtggcagaagaggcaaaagcaggtgaaagacaacgaaaatgtggtgaatgaatactcgagcgaactggagaagcatcaactgtacatcgatgagactgtcaactccaacattcctaccaaccttcgcgtcctgagatccatccttgagaacctgcgctcgaaaatacaaaaacttgagtccgacgtctccgcgcaaatggaatactgcagaaccccctgcacggtgtcatgcaacatccctgtggtgtcgggaaaggaatgcgaggagattatcagaaagggcggagagacttcggaaatgtaccttattcagcctgacagctcggtgaagccataccgtgtgtactgcgatatgaatactgagaatggtggctggaccgtgatccagaaccggcaagacggaagcgtcgattttggtagaaagtgggacccatacaagcagggctttggaaacgtggctactaacactgatggtaagaactactgtggtttgccaggagagtactggctgggtaacgacaagatctcccaacttacccgcatgggccctactgaactcctgattgagatggaagattggaagggggataaggtgaaggcccattatggcggatttacggtccagaacgaggccaacaagtaccaaatatctgtcaataagtacagaggtaccgcaggaaacgcacttatggatggagcctcgcaactcatgggcgaaaaccgtactatgactattcataatggaatgttcttttccacttacgatagagacaacgatggttggcttacctccgacccgaggaaacaatgctcgaaagaggatggtggtggttggtggtacaatcggtgtcatgccgcgaatccaaacggtagatattactggggagggcagtacacctgggacatggccaaacacggcactgatgacggtgttgtttggatgaattggaagggtagctggtattccatgcgtaaaatgtcgatgaagattaggccttttttcccccaacag

SEQ ID NO: 11195 - DNA, 1473 bp, synthetic construct
  misc_feature 1..1473: note = source = /note="Description of Artificial Sequence: Synthetic coding sequence"
  source 1..1473: mol_type = other DNA
atgaagagaatggtgtcctggtcgttccataagttgaaaactatgaagcatcttctcctgctgttgctttgcgtgttccttgttaagtcgcaaggcgtcaacgacaacgaagaaggatttttctcggcacgtggacatcggccactggacaaaaagcgtgaagaagccccttcccttagaccagcccctcctcccatttccggaggaggttaccgcgcaagacctgcgaaggctgcagccacccaaaagaaagtcgagcgcaaggcccccgatgcgggcggttgcctgcacgccgaccctgacctcggcgtcctttgtcccaccggttgccagctccaggaagcacttcttcaacaagagcgacctataaggaactcggtggacgaactgaacaacaacgtggaagcagtaagtcagacctcaagctcgtcctttcagtacatgtacctgctgaaagacctctggcaaaaacgccagaagcaagtcaaggataatgaaaatgtggtcaacgagtattcatcggagctcgaaaagcatcagctgtacatcgacgaaaccgtcaacagcaacattcctaccaacctgagggtcttgaggtcaatccttgaaaaccttaggtccaagattcaaaaactggaatccgacgtttcggcgcaaatggagtactgtaggaccccgtgcaccgtgagctgtaacatccctgtagtctcggggaaggaatgtgaagagatcatccggaagggcggcgaaacctcagagatgtaccttattcagcccgattcatccgtgaaaccttaccgcgtttactgtgatatgaacacggaaaatggaggttggactgtgattcagaaccgccaagacggctccgtggactttggaagaaaatgggatccttacaagcaggggtttggaaacgtcgcaaccaatactgatggaaagaattactgtggcctccctggtgagtactggctgggaaatgataagatcagccagctcacccggatgggaccaaccgagttgcttatagaaatggaagattggaaaggcgataaggttaaggcccactacgggggcttcactgtccagaacgaggccaacaagtaccaaatttcagtcaacaaatatcggggaactgcaggaaatgctcttatggacggagcatcccagttgatgggtgaaaacagaactatgaccatacataatggtatgtttttctccacgtacgatagagacaatgacgggtggctgacttcggaccccagaaagcaatgctccaaggaagatggtggtgggtggtggtacaatagatgtcatgcagccaaccctaatggccggtactactggggagggcagtacacttgggatatggccaaacacggaactgacgatggagtggtgtggatgaactggaagggatcatggtactctatgcggaagatgtcgatgaagattagacccttttttcctcagcaa

SEQ ID NO: 11196 - DNA, 1473 bp, synthetic construct
  misc_feature 1..1473: note = source = /note="Description of Artificial Sequence: Synthetic coding sequence"
  source 1..1473: mol_type = other DNA
atgaaacggatggtctcctggagctttcacaaacttaaaactatgaaacatttactgctgctgctgctgtgtgtcttcctcgtgaaatctcagggtgtgaacgataatgaagaagggtttttttctgcccgcggccaccgacctctggataaaaaacgagaagaagccccttccctgcgaccggccccgccgcccattagtggcggcgggtacagagcaaggcccgctaaagcggccgccactcagaagaaagtggaacgcaaagcgccagacgctggcggctgtttacacgctgatcctgaccttggggtgctttgccctacgggttgccagctccaggaagcactgcttcagcaggagcggccgattagaaattccgtcgacgagctcaacaataacgtggaggcagtgtcccaaacctcctctagcagcttccaatacatgtatctcttgaaggatctgtggcaaaagcggcagaaacaggttaaagacaacgaaaacgtggtgaatgaatattcctccgagctagaaaagcaccaattgtacatcgacgaaacagtgaactcgaatatccctactaacctccgggtattgcggtccatcctcgaaaacctgagatctaagatccagaaacttgagagcgacgtctctgcccaaatggagtactgcagaaccccctgcactgtgagctgtaacatccccgtcgtcagcgggaaagagtgcgaagagatcattagaaaaggaggagaaacaagtgagatgtacctgattcagccggattcttcagtcaagccctatcgcgtgtactgtgatatgaacacggaaaacgggggatggaccgtgatccaaaaccgccaggacggcagcgtggactttggtagaaaatgggatccatacaaacaaggcttcggtaacgtggccaccaacacagatggaaagaattactgtgggctccccggagagtactggctgggtaacgacaaaataagccagctaacccggatgggccctacggagcttttgatcgaaatggaggattggaagggagataaagtcaaggcacattatggtgggtttacagtccaaaacgaagccaacaaataccaaatctcggtcaataagtatagaggcactgccggcaatgctctcatggacggtgcctcccagctgatgggtgaaaatcgcaccatgacgattcacaacggaatgtttttttccacctacgacagagataatgacggatggctcacctctgatccccgcaaacaatgtagtaaagaggatgggggcggatggtggtataataggtgccacgcagccaacccaaatggcaggtactattggggaggacaatacacctgggacatggccaaacacggcaccgacgatggcgtggtttggatgaactggaaagggagttggtacagtatgcgcaaaatgtcaatgaaaatcagacccttctttccgcagcag

SEQ ID NO: 11197 - DNA, 1473 bp, synthetic construct
  misc_feature 1..1473: note = source = /note="Description of Artificial Sequence: Synthetic coding sequence"
  source 1..1473: mol_type = other DNA
atgaaacgcatggtgtcctggtcgttccataagctgaaaacgatgaaacacctgctcctgttgctgctgtgcgtattcctggtaaaatcccagggagtcaacgacaatgaggagggcttcttctccgccagaggccatcgccctttggacaaaaaacgggaggaagctccatcactccggccggctcctcctccgatctccggcggaggctaccgcgccagaccggcaaaggctgccgccacgcagaagaaagtcgagcgcaaggccccggatgcgggagggtgcctgcatgccgacccagacctgggcgtcctgtgtccaaccggatgccagctgcaagaggcgctgcttcagcaagaacgcccaatcagaaacagcgtcgatgaacttaacaataatgtggaagcggtcagccaaaccagcagctcctctttccaatacatgtacctgctgaaggacctctggcagaagagacagaagcaggtgaaggataatgagaacgtggtgaacgaatattcatcggaactggaaaagcaccagctctacatcgacgaaaccgtgaactcgaatataccgacgaacctgagagtgctgcggtcgatcctcgaaaacttgaggtcaaaaatccagaagctggagtcagatgtcagcgcgcaaatggagtactgtcggactccgtgcaccgtgtcgtgcaacatcccggtcgtctcgggaaaggaatgcgaggagataattcggaagggaggcgagactagcgaaatgtacctcatccagccggactcctccgtcaagccataccgtgtatactgcgacatgaacactgaaaatggcggctggactgttattcagaatcgccaggacggatccgtggatttcggtagaaagtgggacccgtacaagcaaggttttggaaacgtggccactaacaccgacggaaagaattactgtgggttgcctggagaatattggctcggaaacgataagatctcccaactgacccggatgggaccgaccgaattgctcatcgagatggaggattggaagggcgacaaagtcaaagcacactacggaggatttaccgtgcagaacgaagccaacaagtaccaaatttccgtgaataagtaccggggaaccgccggtaacgccctcatggacggagcttcccaactgatgggagaaaaccggaccatgactatccataatggcatgttctttagcacttatgacagggacaacgatgggtggcttacttcggatccccgcaagcagtgctccaaagaggatggaggtggttggtggtacaatcgatgtcacgctgccaacccgaatgggagatactactggggaggtcaatacacttgggacatggccaagcacggaactgatgatggggtggtttggatgaactggaaggggtcatggtacagcatgcgcaaaatgagcatgaaaatcaggccatttttcccacagcag

SEQ ID NO: 11198 - DNA, 1473 bp, synthetic construct
  misc_feature 1..1473: note = source = /note="Description of Artificial Sequence: Synthetic coding sequence"
  source 1..1473: mol_type = other DNA
atgaagcggatggtgtcgtggtcgttccacaaacttaagaccatgaagcacttgctgctgctgctcctgtgcgtttttctggtcaagtcccagggcgttaacgataacgaagaaggatttttctccgcacggggacatcgtccgctggataagaagcgggaggaggcgccaagcctgcggccggcaccgccgcccatctctggaggcgggtaccgtgcccgcccggccaaggcagcagctactcagaagaaggtggagagaaaagctccagatgcgggagggtgccttcacgcagatccggacctgggagtcctgtgtcctaccggatgtcagctgcaggaagctctgctgcaacaggagcggccaatccgcaattcggtggatgagctgaataacaatgtcgaggccgtttcgcaaacctcctcctccagcttccagtacatgtacctgttgaaagacctttggcagaagagacagaagcaagtcaaggataatgaaaacgtggttaatgaatactcgtcggagttggaaaagcatcagctgtacatcgacgagactgtgaactctaacattccaacgaacctgcgggtccttcgctcaattctcgagaacctgagaagcaagatccaaaaactcgaatccgacgtgtccgctcagatggagtactgccgcacgccgtgcactgtgtcgtgcaatatccctgtggtgtcgggaaaagaatgtgaagagatcattaggaagggaggcgaaacgtcagagatgtacctcatccaacctgactcgtcggttaaaccatacagagtgtactgcgacatgaatactgagaatgggggatggaccgtgatccagaacaggcaggacggatcggtggatttcggccggaagtgggacccatacaaacagggattcggaaacgtggcaactaacaccgatggcaagaattactgcggcctgccgggggaatactggctgggcaacgacaagatatcgcaactcacccggatgggaccaactgagcttctcatcgaaatggaagattggaaaggcgacaaagtgaaggcgcactacggaggattcaccgtgcagaatgaagccaataagtaccaaatctctgtgaacaaatacagaggtactgctggaaatgcgctgatggacggtgcgagccaattgatgggtgagaatcgcaccatgaccatccataacggtatgtttttcagcacctacgatagggacaatgatggatggctgacctccgacccccggaagcaatgtagcaaagaggacggcgggggctggtggtacaacagatgccacgccgccaacccgaacgggagatactactggggcgggcagtacacttgggatatggccaagcacggaacggatgacggagtggtgtggatgaattggaagggatcgtggtattcaatgcgcaagatgtcaatgaagatacggcccttctttccgcaacag

SEQ ID NO: 11199 - DNA, 1473 bp, synthetic construct
  misc_feature 1..1473: note = source = /note="Description of Artificial Sequence: Synthetic coding sequence"
  source 1..1473: mol_type = other DNA
atgaagagaatggtgagctggtcgttccataaactgaagaccatgaaacatctcctcctcctgctgctctgcgtgtttctcgtcaagtcgcagggggtgaacgacaatgaggaaggattcttcagcgcgcgcggacacagaccgctggataaaaagcgcgaggaggccccttcactgcgacctgcaccaccgccaatttcaggaggcggataccgcgcgcgcccagccaaagcggctgccacccagaagaaagtcgaaaggaaggcccctgatgccggcggctgcttgcacgctgacccagacctgggagtgctgtgtccaacgggatgccagctccaggaagcgctgctccagcaagagcgccccatcaggaactcggtcgacgaactgaataacaacgtggaagctgtcagtcagacttcgtcatcctcctttcagtatatgtacctgctcaaggacctctggcagaagcgccagaagcaagtgaaggacaacgaaaatgtggtgaacgagtattcaagcgaacttgagaagcatcagctgtacatcgatgaaacggtcaattccaacatcccgacgaacctcagggtgctgcgctcaatcctggagaatctgagatcgaagatccaaaagctcgagtccgacgtgtcggcacagatggaatactgcagaactccgtgtaccgtgagctgcaacatccccgtggtgagcggaaaggagtgtgaagagatcatcagaaaaggtggcgagactagcgaaatgtatcttatccaaccggactcatcagtgaagccttaccgcgtgtactgcgacatgaataccgaaaatggaggatggactgtgatccaaaatagacaggacggatccgtggacttcggacggaagtgggacccgtacaagcagggattcggcaacgtcgctaccaataccgatggaaaaaactattgtggtctgccaggcgaatactggctgggcaacgataagatctcgcagttgacccgcatgggaccgacggaactgctcatcgagatggaggattggaagggagataaggtcaaggcgcactacggaggattcaccgtgcagaacgaagcaaacaagtaccaaatctccgtgaacaagtaccgcggcactgctggcaatgccctgatggacggtgcttctcaacttatgggagagaaccggactatgaccatccacaacggtatgttctttagcacttacgacagggacaacgacggatggctgaccagcgacccgcgcaaacagtgttcgaaggaggacggcggaggctggtggtacaacaggtgccacgcagcgaatccgaatggcagatactattggggcggtcaatacacctgggatatggccaaacacggcactgatgacggagtcgtctggatgaactggaagggatcttggtactcgatgcgcaagatgagtatgaagatccgaccattcttcccccaacaa

SEQ ID NO: 11200 - DNA, 1473 bp, synthetic construct
  misc_feature 1..1473: note = source = /note="Description of Artificial Sequence: Synthetic coding sequence"
  source 1..1473: mol_type = other DNA
atgaaaaggatggtgtcctggtcgtttcacaaactgaaaactatgaagcatcttttgcttctgcttctctgtgtgtttctcgtgaagagccagggcgtgaacgataacgaagagggctttttctcagcaagaggtcacagaccattggataagaagcgcgaggaggctccttcgttgaggcccgcacctccacctatctccggaggtggttaccgtgcacggcctgcaaaggccgcagcaactcagaaaaaggtggaaagaaaggcccctgatgcagggggatgtctgcatgctgatcctgacctcggggtgctttgccctactgggtgtcagctccaggaagcattgcttcaacaggagcgaccgattcggaactcagtcgacgagcttaacaacaacgtggaagcagtctcccagacttcatcgtcgagcttccagtatatgtacctgttgaaggacctttggcagaaaagacaaaaacaagtgaaggataatgaaaatgtggtcaatgaatactcgtcggaactggaaaaacaccaactgtacattgatgaaactgtcaatagcaacatacccaccaacctccgagtgcttcgctcaatcctggagaaccttcggtctaaaatccaaaagctcgagagcgacgtgtcagctcaaatggaatactgtcggacgccttgcaccgtctcttgcaacattcctgtcgtgtcgggaaaagaatgtgaagagataatccgcaaggggggcgaaacctcggagatgtacttgatccaacctgattcctcggtgaaaccgtaccgggtgtactgcgatatgaataccgaaaatgggggatggacggttattcagaacagacaagacggctcggtggatttcggccggaagtgggacccctacaaacaaggttttggtaacgtggccactaacactgatggtaagaactactgtggtttgccaggtgaatactggcttgggaatgataagatttcccaacttaccagaatggggccaaccgaactgctcattgagatggaagattggaagggtgacaaagtgaaggcccattacgggggatttaccgtccaaaacgaggcaaataagtatcaaatctcggtcaataagtacagaggtaccgcaggaaatgcacttatggacggagcatcgcagctgatgggggaaaaccgcaccatgactattcacaacgggatgttcttctccacctatgaccgagacaatgacggctggcttacttcggaccctcggaaacagtgttccaaggaagatggaggggggtggtggtacaatcgctgtcatgcagctaatccaaacggtcggtactactggggtggacaatacacgtgggacatggcaaagcatggaaccgatgacggagtggtgtggatgaattggaaaggatcctggtacagcatgcgcaagatgtcgatgaagattcgaccgtttttcccacaacag

SEQ ID NO: 11201 - DNA, 1473 bp, synthetic construct
  misc_feature 1..1473: note = source = /note="Description of Artificial Sequence: Synthetic coding sequence"
  source 1..1473: mol_type = other DNA
atgaaaagaatggttagctggagcttccacaagttaaagaccatgaaacatcttttgctgcttttgctgtgcgtgtttttggtcaagtctcaaggtgtgaacgacaacgaagagggcttttttagtgctcgggggcaccggcctttagataaaaagagggaagaggcgccttcactaagaccagcacctcctccgatctctggcggaggctatcgtgcgcggccagctaaggctgcagccactcagaaaaaagtcgagaggaaggcccccgatgccggaggatgcctgcacgctgaccccgacctgggtgtgttatgcccgaccgggtgccagctccaggaagcgttgctgcagcaggaacggcctatcaggaatagtgtggacgaattaaacaacaatgtcgaggccgtgtcccagacttcctcatcctcatttcagtacatgtacctcttgaaggatctgtggcagaagaggcaaaaacaagtgaaggataacgaaaacgtggtcaacgagtactccagtgaactcgagaagcatcagctgtatattgatgaaactgtcaactcgaatataccaaccaatttgcgtgtgctgaggagcatcctggagaacctgcgctcaaaaatccagaagttggaatcggacgtcagcgcccagatggagtactgtcgcacaccttgcactgtctcatgcaacatccctgtagtgtcgggaaaagagtgtgaagagattattcggaaaggaggggagacttctgaaatgtacctcatccagcccgacagctccgtgaaaccatacagagtatattgtgacatgaatacagagaatgggggttggactgtgatccagaaccgacaggatgggtccgtggacttcgggcgcaaatgggatccttataaacaaggtttcggcaatgtcgctactaacacagacggaaagaactattgtgggctcccgggagaatactggctgggaaatgataagatcagtcagcttacccggatgggtccaaccgagctgctcattgaaatggaggactggaagggagacaaagtgaaggcccactacggtgggttcactgtgcaaaacgaggcgaataaataccagatttcggtaaacaaataccgggggaccgccgggaatgccctcatggacggggccagtcagctcatgggagagaatcgcacaatgacgattcacaatggtatgttcttctccacttacgaccgggacaatgacgggtggctcacctcagacccaagaaagcagtgcagcaaggaagacggcggcggctggtggtataacagatgccatgcagctaatccaaatgggcggtattactgggggggacagtatacttgggacatggctaagcatggcacagacgacggcgttgtgtggatgaattggaagggttcttggtatagtatgagaaagatgagcatgaagatcaggcctttttttcctcagcag

SEQ ID NO: 11202 - DNA, 1473 bp, synthetic construct
  misc_feature 1..1473: note = source = /note="Description of Artificial Sequence: Synthetic coding sequence"
  source 1..1473: mol_type = other DNA
atgaagcgtatggtgtcatggtcatttcataaacttaagactatgaagcatctcctcctccttcttctttgcgtgttcctggtgaagagccaaggggtcaacgataacgaagaagggttcttttccgccaggggccaccgccctctcgacaagaaaagagaggaagcgccaagcctgcgacctgcaccaccacctatctcaggcggtgggtaccgcgcaagacctgcaaaggccgcggcaactcagaagaaggtggaacgtaaagcacctgacgcaggcgggtgtctgcacgcggaccctgatctcggtgtgctctgtcctactggttgccaactccaggaagcgcttctgcagcaggagcgtccaattaggaactcggtagacgagctgaacaataacgtggaggccgttagccaaacttcgtcctcctcgtttcaatacatgtatcttttgaaggatttgtggcaaaagagacagaagcaggtgaaggataatgaaaatgtggtgaatgaatactcgtcagaactggaaaagcaccagctttacatcgatgagactgtcaattcaaacatacctaccaaccttcgggtcttgcgctcaattcttgaaaacctcaggtcgaaaatccaaaagctggagtccgatgtgtctgcccaaatggaatactgtagaaccccctgtactgtgtcgtgcaacatccctgtggtgtcgggtaaggaatgtgaagagattatcagaaaaggaggtgaaacctctgagatgtacctgattcagccagattcctcagtgaagccataccgagtgtactgtgatatgaacactgagaatgggggttggactgtcattcagaacagacaagatggttccgtggattttggtagaaaatgggacccgtataaacaaggatttggcaatgtggccactaacacggacggaaaaaactactgtgggctccctggagaatactggctcggcaacgataagatttcgcagcttacccgaatgggaccgactgaactgctcatcgaaatggaagattggaagggagataaggtgaaagcacattacggaggtttcactgtgcaaaatgaggcgaacaagtatcagatttcggtgaacaaatacagaggtaccgcaggaaacgcccttatggatggtgccagccaactcatgggagagaacagaaccatgacgattcataacggaatgttcttctcgacctacgacagagataacgacggatggctcacctcggatccaaggaagcagtgctcaaaagaagatggcggaggctggtggtacaaccgatgtcatgcggccaaccctaatggaagatattactggggcggtcagtacacctgggacatggcaaagcatggcactgatgacggggtcgtgtggatgaactggaagggatcgtggtactccatgcggaagatgagcatgaaaatccgccctttctttccacagcaa

SEQ ID NO: 11203 - DNA, 1473 bp, synthetic construct
  misc_feature 1..1473: note = source = /note="Description of Artificial Sequence: Synthetic coding sequence"
  source 1..1473: mol_type = other DNA
atgaagcgtatggtgagctggagcttccataagctcaagacaatgaaacatttgctgctcttactgctctgcgtgttcttggtaaagtctcagggtgtgaacgacaacgaagagggattcttttctgccagaggccatcgccctcttgacaagaagagggaggaggcaccatcactgaggccagcaccaccacctatctcaggtgggggctatcgcgcccggcctgcaaaagccgccgccacccagaagaaagtcgagaggaaagcccctgacgcaggaggatgtctacatgccgacccggatctcggcgtgttgtgccccacagggtgtcaactccaggaggctctcctccaacaggagcgaccaattcgaaactctgtagacgagttgaacaataacgtggaggccgttagccagaccagcagctcttctttccaatacatgtacctgctaaaagatttgtggcaaaagcggcagaaacaggtgaaagataacgaaaacgtggtgaatgaatattcctccgaactggaaaaacaccagctatacatagacgagaccgtgaacagtaatatcccaacaaatctccgggtgctgagatccatactggaaaacttacggtctaagattcaaaaactggaatccgacgtgagtgcccagatggagtattgccgaaccccctgcaccgtctcttgcaatattcccgttgtgagcggcaaggagtgcgaagaaataatccgaaagggtggggagacttctgagatgtacttaatccagccggacagcagcgttaaaccttaccgagtgtattgtgatatgaatactgaaaatggaggctggactgttatccagaataggcaagacggaagcgtagacttcggcaggaagtgggatccgtataaacaagggttcgggaacgtggccaccaacactgacggaaagaattactgcgggctgcctggcgagtattggcttggcaacgacaagatttcccagctaacaaggatgggcccaactgaactgctcattgagatggaagactggaaaggggataaagtaaaggcccactatggcggcttcactgtgcaaaacgaggcaaataagtaccaaattagcgtgaataaatatcgtggcactgccggcaatgccttgatggacggcgcctctcagctgatgggcgagaaccggaccatgactattcacaatggtatgtttttcagtacatatgatagggataacgacgggtggctcaccagtgatccacggaagcagtgctcaaaagaggatggcggtggctggtggtataaccgatgtcatgccgccaatcctaacggtcgatactactggggcggtcagtacacctgggacatggccaaacacggcactgatgacggcgtggtatggatgaactggaagggctcctggtacagcatgagaaagatgtccatgaaaatcaggcccttttttccccagcag

SEQ ID NO: 11204 - DNA, 1473 bp, synthetic construct; identical to SEQ ID NO: 11196
  misc_feature 1..1473: note = source = /note="Description of Artificial Sequence: Synthetic coding sequence"
  source 1..1473: mol_type = other DNA

SEQ ID NO: 11205 - DNA, 1473 bp, synthetic construct
  misc_feature 1..1473: note = source = /note="Description of Artificial Sequence: Synthetic coding sequence"
  source 1..1473: mol_type = other DNA
atgaaacgcatggtatcttggtcctttcataaactaaaaactatgaaacacttgctgttgctcttgctttgtgttttcttagtgaaatctcaaggggttaacgataatgaggaggggtttttttctgcacgagggcacaggccactggacaaaaagcgggaagaagctcctagcctgagacctgcccccccccccatttccggcggagggtaccgcgccagaccagccaaggcggcagcaactcaaaaaaaagtagagcgcaaggcccctgatgctgggggctgtcttcatgctgatcctgatctgggagtcctgtgccctacaggctgtcagctccaggaggcccttctgcagcaagaacgcccgatccgcaatagtgtcgacgaactcaataataatgtggaagccgtgtctcaaaccagttcgtcgtccttccagtatatgtacctgctcaaggatctgtggcagaagcgtcagaaacaggtgaaggataatgagaacgtcgtcaatgagtattcatccgaactggagaagcatcagctttacatcgacgaaaccgtgaattcaaacataccaacaaatctgcgcgtgctgcgctccattctggagaatctacgctccaaaattcagaaactagagagcgatgtatctgcccagatggagtactgccgaaccccctgtactgtgagttgtaatattcctgtggtctctggaaaggaatgcgaggagatcattcgaaaaggaggggaaacgtctgagatgtacttgatacagcctgactcatccgtgaaaccctaccgcgtctattgtgatatgaataccgagaacgggggctggaccgtcatacagaataggcaggatgggtcggtagacttcggccgaaaatgggatccatacaagcaaggcttcggaaatgtcgccaccaatacagacggaaagaactattgtggactacctggtgagtactggctagggaacgataaaatctctcagctgacccgaatgggccccacagaactgctgatcgagatggaggactggaaaggcgataaagtgaaggctcattacgggggattcaccgtgcagaacgaagccaacaagtaccagatctcggtaaacaaatatagagggaccgccggtaacgctcttatggatggcgcatcccaactaatgggcgagaatcggactatgaccatccacaatggcatgttcttttccacgtacgatcgagacaacgatggatggctgacttctgaccctcgcaaacagtgtagtaaagaagacggtgggggatggtggtacaataggtgccatgccgccaatcccaacggtcgttactattggggtgggcaatatacttgggacatggcgaaacatgggaccgacgatggggttgtctggatgaactggaaagggtcgtggtatagcatgcgaaaaatgagtatgaagataagacctttctttccccagcag

SEQ ID NO: 11206 - DNA, 1473 bp, synthetic construct
  misc_feature 1..1473: note = source = /note="Description of Artificial Sequence: Synthetic coding sequence"
  source 1..1473: mol_type = other DNA
atgaagcgcatggtgtcttggagttttcacaaactaaaaacgatgaaacatttgctccttctcttattgtgtgttttcttggttaaatcgcaaggagtgaatgacaatgaggaaggattcttctcagcacgaggtcatagaccgttagataagaaaagagaagaagcaccgtcgctacgtccagcaccaccacccatatccggaggtggatatagagctagaccagctaaagcagccgcaacgcagaaaaaggtcgagcgtaaagcaccagacgccggaggttgtcttcatgcggatccggatctcggagttctgtgcccaaccggatgccaactgcaggaagctttgctacaacaagaacgaccaatacggaactccgttgatgaacttaacaacaacgttgaggccgtatctcagacctcgtcgtcatcgtttcaatatatgtacctgttgaaggatttgtggcagaaaagacaaaagcaagtgaaggataatgagaatgtggtgaacgagtactcctcggaattggagaagcatcagttatacattgatgaaacagtgaactctaatatcccaaccaatctcagagttctccgatccatacttgaaaatctcagatcgaagatacaaaagctggagtctgacgtatcagcccagatggaatattgccgaacaccgtgcacagttagttgcaacatcccagtcgtttctggtaaagaatgtgaagagatcattcggaaaggaggagagacctcagaaatgtaccttatccaaccagactcatcggtcaagccatacagggtttattgcgacatgaatacagaaaacggaggatggactgttatccaaaatcgacaagatggatctgttgacttcggccgtaaatgggatccatataaacagggattcggaaatgtggcaacaaatactgatggaaaaaactattgcggattgccaggggagtattggttgggaaatgataaaatttcccaactcacgcggatgggtccaaccgaattgcttattgagatggaggactggaaaggagataaggttaaagctcattatggcggatttactgttcaaaatgaagcaaataaataccagatatcagttaataaatacaggggaacggccggaaatgcgttgatggatggcgcttctcagctcatgggagaaaatagaactatgacaatacacaatggaatgtttttcagtacttatgatcgggataacgatggatggctgacgagtgacccgagaaagcaatgctcaaaagaagatggaggaggatggtggtataatcgctgtcacgctgccaacccaaatggtcgatattattggggaggacaatatacgtgggatatggctaaacacggaacagatgatggagttgtttggatgaattggaagggttcgtggtattctatgcgtaagatgtcgatgaaaattaggccattcttcccccaacag

SEQ ID NO: 11207 - DNA, 1473 bp, synthetic construct
  misc_feature 1..1473: note = source = /note="Description of Artificial Sequence: Synthetic coding sequence"
  source 1..1473: mol_type = other DNA
atgaagcggatggtgtcatggtcgttccataagctcaagacgatgaagcacctcctcctcctgcttctctgcgtctttctcgttaagtcacagggagtcaacgacaacgaggagggcttcttttcagctagaggccatcgcccactggataagaaaagagaggaagccccatctctccggccggctccgccgccgatcagcggaggaggctaccgcgcacgcccggccaaggccgcggctacccaaaagaaagtggaacgaaaggcaccggacgccggtggatgcctgcacgccgaccctgacttgggagtgctctgtccgaccggttgtcagctgcaggaagccctgctccagcaggagcggccgatcaggaactcagtggatgaactcaacaacaacgtcgaagcagtgagccagacttcctcctccagcttccagtacatgtacctgctgaaagacctttggcaaaaacgccaaaagcaggtgaaggacaacgagaatgtcgtgaacgaatactcctctgaactggagaaacaccagctgtacatcgacgaaactgtcaactcgaatatcccgacgaatctgagagtgctccgctcgatcctcgaaaacctccggtcgaagattcagaagttggaatcggacgtgtcggcgcagatggagtactgtcggacgccatgcaccgtgtcatgcaacatcccggtggtgtcaggaaaagaatgcgaggagattattcgcaagggcggagaaacgtccgagatgtacctcatccagccagacagctccgttaaaccgtaccgtgtgtactgcgatatgaacactgaaaacggaggatggaccgtgatccagaaccggcaggatggatcagtggacttcgggaggaaatgggatccatataagcaggggttcggcaacgtcgcgactaacacggacggaaagaactattgcggcctccctggcgaatactggctgggaaacgacaagatctcccagttgactcgcatgggccctaccgaactgttgatcgagatggaggactggaaaggagataaggtgaaggcacactacggcggcttcaccgtgcaaaacgaggctaacaagtaccaaatctccgtgaacaaatatcggggcactgccgggaacgctctgatggacggggcaagccagctcatgggagaaaatcgaactatgaccatccacaatggaatgttcttctcaacctacgatcgcgacaacgacggatggctgacctcagacccgagaaaacaatgctcaaaggaagatgggggcggctggtggtacaacagatgtcatgccgcgaacccaaacgggcggtactattggggaggtcaatacacctgggatatggccaagcacggaaccgacgacggcgttgtctggatgaactggaagggatcgtggtactccatgcggaagatgtcgatgaaaatcagaccgttcttcccgcaacag

SEQ ID NO: 11208 - DNA, 1473 bp, synthetic construct
  misc_feature 1..1473: note = source = /note="Description of Artificial Sequence: Synthetic coding sequence"
  source 1..1473: mol_type = other DNA
atgaagcgtatggtcagctggtccttccacaagttgaagaccatgaagcacttgttgcttctgctgctgtgcgtttttttggtcaagtcgcaaggtgtcaatgacaatgaggagggattcttctccgcacgtggacaccgcccgttggacaagaagcgtgaagaggccccctccttgcgtccagcccctccccccatctccggaggtggttaccgtgcccggcccgcgaaagccgccgccacccaaaagaaggttgaacgaaaggcacctgacgctggcggttgtctacatgcggaccctgatttaggtgtcctgtgcccgacaggctgccagctccaggaggccctgctccagcaggagcgacccatccgcaactccgttgatgagctcaacaacaacgtagaggcggtctcccagacatctagcagcagctttcagtacatgtacctcctaaaggacctttggcaaaagcgacagaagcaggttaaggacaacgaaaacgtagtcaatgagtattcaagcgaactggagaagcaccagctctacattgacgagaccgtcaactctaacatccctacaaacctacgcgtgctccggtcgatactggagaacctgcggtccaaaatccaaaagcttgagagcgacgtgagcgcccagatggagtactgtcggaccccttgcaccgtctcctgtaacatcccggtcgtctccggcaaggagtgcgaagagatcatccgcaagggcggtgagacctctgagatgtatctgatccagcccgattcctctgttaaaccttaccgggtgtactgcgacatgaacaccgaaaatggaggatggacagtgatccagaatcgccaggatgggtccgtcgacttcggccgtaagtgggacccttataagcaggggttcggcaacgtcgccactaacaccgacggtaaaaactattgtggactcccgggtgaatactggctcgggaacgacaaaattagccaactcaccagaatgggaccaacggaactgttgattgaaatggaggactggaagggagacaaggtcaaggctcactacggcggcttcacagttcaaaatgaagcaaacaaatatcagataagtgtcaacaagtaccgtggaactgctggtaacgccttgatggatggtgcttcccagttgatgggcgagaaccgcacaatgaccatccacaacggtatgttttttagtacatacgaccgcgacaacgatggttggttgactagtgacccgcggaagcagtgctcgaaggaagatggaggcggatggtggtacaaccgatgccacgctgcgaacccaaacggacgctattactggggcggccagtacacttgggatatggcgaagcatggtactgacgatggggttgtttggatgaactggaagggttcgtggtactcgatgcggaagatgtcgatgaagatcaggccctttttccctcagcag

SEQ ID NO: 11209 - DNA, 1473 bp, synthetic construct
  misc_feature 1..1473: note = source = /note="Description of Artificial Sequence: Synthetic coding sequence"
  source 1..1473: mol_type = other DNA
atgaaacggatggtttcgtggagctttcacaagctcaagactatgaagcacctgctcctgttgctgttgtgcgtctttctggtgaagagccagggggtgaacgacaacgaagagggattcttcagcgcgcggggccatagaccgctggacaaaaagagagaggaggctccatccctcagacctgccccgcccccgatctcgggagggggctaccgcgcacgtccagcaaaagcagccgccacccagaagaaagtggagaggaaggccccggacgccggcggatgcctgcatgcggaccctgacctcggcgtgctgtgtcccaccggttgccagcttcaggaagccctcctgcagcaagagcggccaatccggaattctgtcgacgagctcaataacaacgtggaagcagtgtcgcagacgtcatcctccagcttccaatacatgtacctgctgaaggatctgtggcagaagcgccaaaagcaggtgaaggacaacgaaaatgtcgtgaacgaatactcatcagaacttgaaaaacaccagctgtatatcgatgagactgtgaattccaacatcccgaccaacctgcgagtgctcagatccatcctcgaaaatctgcgctctaagatccagaaacttgagagcgatgtgtccgctcaaatggagtactgccgcactccttgcactgtctcatgcaatattcctgtcgtgtccgggaaggagtgtgaagaaattatccgcaagggcggcgaaacctcggaaatgtacctgatccaaccggattcatcagtgaagccgtaccgcgtctactgcgacatgaatactgagaatggaggatggactgtcatccagaaccgccaggacggatcggtggacttcggacgcaagtgggacccgtataagcagggatttggaaatgtcgcaactaacaccgatggaaaaaattactgcgggttgccaggagagtattggcttggaaacgataagatctcgcaactgacgcggatggggccgaccgagctcctgatcgaaatggaagattggaaaggagacaaggtgaaggcccactacggaggtttcaccgtgcagaatgaagcgaacaaataccaaatctccgtgaacaagtacagaggcaccgccgggaacgcgttgatggacggcgcgagccagctgatgggtgaaaatcggaccatgactatccataacggcatgttcttcagcacctacgatagggacaacgacggatggctcacctccgatccccggaaacaatgctcgaaggaggacggaggaggttggtggtacaaccggtgtcatgctgctaacccaaacggtcgctactactggggtggccaatacacttgggatatggccaaacacggaacggatgacggagtcgtttggatgaactggaagggatcgtggtactcgatgagaaagatgagtatgaagattaggccattcttcccgcagcaa

SEQ ID NO: 11210 - DNA, 1473 bp, synthetic construct
  misc_feature 1..1473: note = source = /note="Description of Artificial Sequence: Synthetic coding sequence"
  source 1..1473: mol_type = other DNA
atgaaacgtatggtgtcctggtcattccataaactgaagacgatgaaacacctgctgctgcttctgctgtgcgtatttttggtgaaaagccaaggagttaacgacaacgaagaaggtttcttttcagctcgcggtcatcgtccactggataagaaacgcgaggaagcgccgtctctgcgccctgcgcctcctcctatcagcggtggtggctatcgagcacgcccggccaaggccgcggccacccaaaaaaaggtcgagcgcaaagcgcctgatgctggtggttgtctgcatgcagaccccgatctgggcgttctgtgtcctaccggatgccagctgcaagaggccttactgcagcaggagcgccctattcgtaatagcgtggacgagctgaataacaacgtggaggcggtgagccagacttccagctcatcttttcaatatatgtatttgctgaaagacctgtggcagaagcgccagaaacaggttaaggataacgaaaacgttgtgaacgagtactcttctgaactggagaagcatcaactgtacattgacgagactgtcaactcaaacattccaacaaatctgcgcgtcctgcgctccatactggaaaatctgcgcagcaaaattcaaaaattggaaagcgacgtgagtgcccaaatggaatattgtcgcaccccctgcacggtcagctgcaatattccggttgtcagcggcaaggagtgtgaggagattatccgcaaaggtggcgaaacctctgaaatgtatctcatccagccggacagcagcgtgaaaccataccgcgtgtactgcgacatgaacaccgagaatggcggttggacagtgattcaaaaccgccaggacggctcagtggactttggacgcaagtgggatccgtataaacagggtttcgggaatgtagcgacgaacaccgacggtaagaactactgcggtttgcctggcgagtattggcttggtaatgacaagatttctcaactgacccgaatgggtccgaccgaactgctgatcgagatggaggattggaagggtgacaaggtcaaggcccattacggtggtttcaccgtccaaaacgaggcaaacaagtaccaaatcagcgtcaataagtatcgcggcacggctggtaatgccctgatggatggtgcaagccagctaatgggtgagaaccgcacaatgactatccataacggcatgttcttttcgacctatgaccgcgataacgatggatggttgaccagcgatccgcgcaaacagtgtagcaaggaggacggcggaggctggtggtacaatcgatgtcacgcggccaaccccaacgggcgctactactggggtggccagtatacctgggatatggcgaaacatgggaccgatgacggcgtcgtctggatgaattggaagggcagctggtactcaatgcgcaaaatgagcatgaagattcgcccattcttcccccagcaa

SEQ ID NO: 11211 - DNA, 1473 bp, synthetic construct
  misc_feature 1..1473: note = source = /note="Description of Artificial Sequence: Synthetic coding sequence"
  source 1..1473: mol_type = other DNA
atgaagcgtatggtgagttggtcatttcataaactaaaaaccatgaaacacctcttactgttgttgctatgcgtgttcctggtaaagtcccagggggtgaatgataatgaggagggcttcttctctgcgcggggccataggccattggataagaaacgcgaagaagctccatccctgaggccagcccctccacccatctctgggggcggttaccgggccagacctgccaaagcagcggccacccagaagaaagtggaacggaaagctccagatgctggcggctgtcttcacgcagaccctgacttgggtgtgctctgccccaccggttgccagctccaggaggctcttctgcagcaggagagacccatcaggaattcagtcgacgagctgaataataatgtggaggcagtatcacagacttcctcatcaagtttccagtatatgtacttgttgaaggatctctggcagaagaggcagaaacaggtgaaggataacgaaaacgtcgtcaatgaatattcatcagaacttgagaagcatcagctctacattgacgagaccgtcaatagtaacatccctactaacctgagagtcctgagaagcattttggaaaatctccggagcaaaatacaaaagttagagtccgacgtttctgctcagatggagtactgtcggacaccctgcaccgtgtcctgtaacattccagtggtgtccggaaaagagtgcgaagagataatcaggaagggcggcgaaacgagcgaaatgtatctgattcaaccagacagttctgtgaaaccctatcgagtctactgtgatatgaacacagagaatggcggatggaccgtgatccagaatcggcaggatggcagtgtggacttcggaaggaagtgggatccttataagcagggattcggcaacgtcgcaacaaatactgacgggaaaaattattgtggcttgcccggggagtattggttggggaacgacaagatctcacagttaactcgcatgggtccaaccgagcttctgatcgagatggaggactggaaaggcgacaaggtcaaggctcactacggaggctttactgtccaaaacgaggcaaacaaataccagatcagcgttaataagtacagggggaccgcaggaaatgctctgatggacggcgcttctcagctgatgggagagaaccgcacaatgactattcataacgggatgtttttcagcacatacgaccgggacaacgacggttggcttacctccgatcctcggaaacagtgctcaaaagaggacgggggaggctggtggtataacaggtgccatgccgccaaccctaatgggcgctactattggggcgggcagtatacttgggatatggcgaagcacggcaccgatgacggtgtagtatggatgaattggaaagggtcttggtacagcatgcggaagatgtccatgaagataaggcccttttttccccagcag

SEQ ID NO: 11212 - DNA, 1473 bp, synthetic construct
  misc_feature 1..1473: note = source = /note="Description of Artificial Sequence: Synthetic coding sequence"
  source 1..1473: mol_type = other DNA
atgaaacgcatggtgtcctggagcttccacaagctgaaaactatgaaacatctgttgctgctgcttctctgcgtgttcctggtgaaaagccagggggtcaatgataacgaagaaggatttttctcagcgaggggacacagaccactggataagaagcgggaagaggccccgtcacttcggccagcaccgccacctatctcgggtggaggataccgggctaggcccgctaaggcggcagcgactcagaagaaggtcgaacgcaaagctccggacgccggaggatgtctgcatgccgaccccgaccttggggtgctgtgtcctaccggatgccagctgcaggaggcactgcttcagcaggaacgaccaatccgcaactccgtcgacgagcttaacaacaatgtcgaagcagtgtcccagacctcctcctcatcgttccaatacatgtacctgttgaaagatctgtggcagaagcggcagaaacaggtgaaagataacgagaacgtggtgaatgaatactcctccgaacttgagaaacaccagctgtatatcgacgaaactgtgaacagcaacatcccgaccaacttgcgtgtgctccgctcgatcctggaaaatctgcgatctaagatccagaagctcgagagcgacgtgagcgcacagatggaatactgcaggactccgtgtaccgtgtcttgtaacattccggtcgtgtcaggaaaggagtgcgaggaaatcattcgcaaaggcggcgaaacctccgaaatgtacctgatccaaccagactcatcagtgaaaccgtatcgcgtctactgcgatatgaatactgaaaatggaggatggaccgtgatccagaaccgccaagacggctcagtggacttcggccggaagtgggacccgtacaaacaaggattcggaaacgtggccaccaacaccgatggcaagaattactgtggactcccaggcgaatactggctgggcaatgacaagatctcccaactgactcgcatgggcccaaccgaactgctcatcgaaatggaggactggaagggtgacaaagtgaaggctcattatggaggattcactgtccagaatgaagcgaataagtaccagatcagcgttaacaagtaccggggcaccgcgggcaatgccctgatggatggggcctcgcagctgatgggagaaaaccgcaccatgacgatccacaacggaatgttcttcagcacctacgacagggataacgatggctggttgacttcggatcctagaaaacagtgttccaaggaggacggaggaggttggtggtataaccgctgccatgccgctaatccaaacggaagatactactggggaggccaatacacctgggacatggcaaagcacggcaccgatgacggagtggtgtggatgaactggaagggatcatggtacagcatgaggaagatgtcgatgaagatccgcccattctttccgcagcag

SEQ ID NO: 11213 - DNA, 1473 bp, synthetic construct
  misc_feature 1..1473: note = source = /note="Description of Artificial Sequence: Synthetic coding sequence"
  source 1..1473: mol_type = other DNA
atgaagcggatggtgtcatggtcatttcacaagttgaaaacaatgaaacacctactgctgctgctgctttgtgtattcttggttaagtctcaaggtgtgaatgacaatgaggaagggttcttctccgcacgaggccatcggcccctggataagaagagagaggaagccccctcgcttcggcccgccccccctcccatctctggcggcgggtaccgggcacgcccggctaaggccgcagcgacccagaagaaagttgagaggaaagcgcctgacgcagggggctgtcttcacgctgaccctgatctcggcgtgttgtgccccactggatgccagctgcaggaggccttgctgcagcaggagcgccccatcagaaattcagtggacgaattgaataacaacgttgaagctgtgagtcagacatcatcctcttcgtttcagtacatgtatctgcttaaggatctgtggcagaaacgacagaaacaagtaaaggacaacgagaacgtggtgaacgaatacagctcagaattagaaaaacaccagctgtatatcgacgagactgtgaacagtaacatcccaaccaatttacgagtgctccgctccatcctggaaaacttgcggtctaaaatccagaaacttgagtcagatgtcagcgcacaaatggagtattgtaggacaccgtgtaccgtatcatgcaatatccctgtcgtatccgggaaggaatgcgaggaaatcatccgaaagggcggggagacatctgaaatgtacctgatccaaccagacagttccgtcaaaccctatagggtgtattgcgacatgaataccgaaaatggggggtggacagtcatacagaatcgacaggatgggagcgttgacttcggacgtaaatgggacccctataagcaaggattcggaaatgtggctacaaataccgacggcaagaattattgtggcttgcctggggagtactggctgggcaacgacaagatatctcagctgacccgcatgggacctactgaattactgatcgagatggaggattggaagggcgataaagtgaaagcccattacggtggtttcacagtacagaacgaagccaataaatatcagatttcagttaataaataccgtggcacagcaggcaacgcactcatggacggggcctctcagctgatgggtgagaatcgcactatgacgatacataacggcatgttcttttctacatatgacagagacaatgacgggtggctgactagcgaccctaggaagcagtgtagcaaagaggacggcggtgggtggtggtataaccgctgccacgcggcgaaccccaatggacgctattactggggggggcagtacacatgggacatggccaaacacggcacagatgacggggtggtttggatgaattggaagggttcttggtactcaatgcgaaaaatgtctatgaagattcgtcccttctttccacagcag

SEQ ID NO: 11214 - DNA, 1473 bp, synthetic construct
  misc_feature 1..1473: note = source = /note="Description of Artificial Sequence: Synthetic coding sequence"
  source 1..1473: mol_type = other DNA
atgaaacgaatggtgtcatggtccttccacaaactgaagaccatgaaacacctgttactattgttgttgtgcgtgtttttggtgaagtcgcagggggtaaacgacaacgaagaaggtttcttctcagccagaggtcatagaccactagataagaaacgcgaggaggctccgtcattgcggcctgcaccccccccaatatctggagggggctaccgggccagacccgcaaaagctgctgctacccagaagaaggtggaaagaaaggcgccagacgctgggggttgcctgcacgcagaccctgatcttggcgtgctgtgtcccacagggtgtcagctccaggaggcgctcctgcagcaggagaggcctattcggaacagtgttgatgaattgaacaacaacgtggaggcagtaagccaaacgtcatcatctagctttcagtacatgtacctgcttaaagatttgtggcagaagcgtcagaagcaggtaaaggataacgaaaacgtggtgaatgaatatagcagtgaattggagaagcaccagctatacatcgacgagacagtgaacagtaacattcccacaaatttacgggtgctgaggtccatcctggaaaacctgcggagtaaaattcagaagttagaatccgatgtatctgcgcagatggaatattgtcggaccccttgcacggtaagttgcaatattcccgtcgtgagcggcaaggagtgcgaggagatcatacgcaaaggcggcgagacaagcgagatgtatctaattcaaccagattcctcagttaaaccttaccgggtatattgtgacatgaacaccgaaaacgggggctggacagtgattcagaaccgccaggacggctctgttgatttcggtcgcaagtgggatccttataagcagggatttgggaatgtagccacaaacacagatggcaagaactattgtggactgccgggtgaatactggctcggcaacgataaaatttcccaacttactcggatggggcccaccgagctgctgatcgaaatggaagattggaaaggagacaaggtcaaggcccactacggcggcttcacagtgcaaaatgaagccaataagtaccagattagcgtaaacaagtaccgtggaactgctgggaacgccctcatggacggcgcctctcagttaatgggcgaaaataggacaatgacgatccacaatggcatgttctttagcacctatgatcgtgataatgatgggtggctgaccagcgacccacggaagcagtgttcgaaagaggatggaggcggctggtggtacaatcggtgccacgcggctaatcccaatggcaggtattactggggcgggcagtatacttgggacatggccaagcacggcactgatgatggtgtggtgtggatgaattggaaaggcagctggtattctatgcggaaaatgagcatgaagatccggcctttcttcccacagcag

SEQ ID NO: 11215 - DNA, 1473 bp, synthetic construct
  misc_feature 1..1473: note = source = /note="Description of Artificial Sequence: Synthetic coding sequence"
  source 1..1473: mol_type = other DNA
atgaaaaggatggtatcctggtcttttcataaattaaaaactatgaaacatttattattattattactttgtgtttttttagttaaatcacagggggtaaatgataatgaagaaggatttttttctgcaagaggtcatagaccattagataagaaaagagaagaagcaccaagtttaagaccagcaccaccaccaatatcaggaggaggttatagagctagaccagctaaagctgcagctactcaaaaaaaggttgaaagaaaagctccagacgctggtggatgtcttcatgcagatcctgatttaggagtactttgtccaacaggatgtcaattacaagaagcattacttcaacaagaaagacctattaggaattcagttgatgaattaaacaacaatgttgaagctgtttcacaaacatcttcctcaagtttccaatatatgtatttattaaaggatctttggcaaaaaagacaaaaacaagttaaagataatgaaaatgtagttaatgaatattcatcagaattagaaaaacatcaactttatattgacgaaacagttaattcaaacattccaactaatcttagagtattaagatctattcttgaaaatttaagatctaagatacaaaagttagaatctgatgtttcagctcaaatggaatattgtagaactccatgtacagtctcttgtaatattccagttgttagtggaaaagaatgtgaagaaattattagaaaaggtggagaaacatctgaaatgtatttgattcaacctgattcttcagttaaaccatatcgagtttattgtgacatgaatactgaaaatggtggttggactgttattcaaaatagacaagatggaagtgttgatttcggaagaaaatgggatccttataaacaaggattcggaaatgtagcaacaaatactgatggtaagaattattgtggacttccaggagaatattggttaggaaatgataaaattagtcaattaacaagaatgggtccaactgaacttttaattgaaatggaagattggaagggagataaagttaaagcacattatggagggtttacagttcaaaatgaagcaaataaatatcaaatctctgttaataagtatagaggtacagccggaaatgcacttatggatggtgcatcacaattgatgggagaaaaccgtacaatgactattcataatggtatgtttttcagtacttatgatagagataatgatgggtggttaacttctgatccaaggaaacaatgttcaaaggaagatggtggaggatggtggtataatagatgtcatgctgctaacccaaatggtagatattactggggaggacaatatacttgggatatggctaaacatggaacagatgatggtgttgtttggatgaattggaaaggatcttggtattctatgcgaaaaatgtcaatgaaaataagaccattttttccacaacaa

SEQ ID NO: 11216 - DNA, 1473 bp, synthetic construct
  misc_feature 1..1473: note = source = /note="Description of Artificial Sequence: Synthetic coding sequence"
  source 1..1473: mol_type = other DNA
atgaagcgtatggtgagctggagctttcataagctcaaaacgatgaagcaccttctgcttcttctgctttgtgtgtttttggtgaagtcgcaaggagtcaacgacaacgaagaaggctttttctctgcacggggtcacaggccccttgataagaaacgagaagaagcaccatcccttcgacctgcacccccacctatctctggtggtggctacagagctaggccagctaaagcagcagcaacccagaaaaaggtggagagaaaagcgccagatgcaggtggttgtctgcacgcggatccagatcttggagtgctgtgcccaaccggatgtcagctgcaagaggcactgctgcagcaagagcgcccaattcgaaattctgtggatgaactcaacaacaacgtcgaagcggtgtcgcaaaccagctcctcctcgtttcaatacatgtaccttctcaaagacctgtggcagaagcgccaaaaacaagtgaaagataacgaaaacgtggtcaatgaatactcctcagaacttgagaaacaccaactttacatcgacgaaactgtcaactcgaacatcccgactaatctgcgcgtgctccggtcgatccttgagaacttgcggagcaagattcagaaacttgaatcggacgtgtcagcacagatggagtactgtaggactccttgcactgtgtcctgtaatatccctgtcgtgtccggtaaagaatgtgaggaaatcataagaaagggtggagaaactagcgaaatgtaccttattcaaccagacagctccgtcaagccttaccgggtgtattgtgacatgaatactgaaaatggaggctggactgtgatccagaacagacaggatggaagtgtggatttcggtcggaaatgggatccatacaaacagggctttggaaacgtggcaactaacactgatgggaagaattactgtggactgccaggagaatactggctggggaatgacaagatttcacaactgacccgaatgggtccaacggagcttctgattgagatggaagattggaaaggggacaaggtcaaagcacactacggaggctttaccgtccagaacgaggctaacaaataccaaattagcgtcaacaagtacagaggtaccgcgggaaatgcccttatggatggagcatcccaacttatgggcgaaaatcgtaccatgactattcataatggtatgttcttctcaacctacgaccgcgacaatgacgggtggctcacctccgatcctaggaagcaatgtagcaaggaagatggaggaggctggtggtataatcggtgtcacgcagctaatcctaatggtcgttattactggggcggacaatatacctgggacatggcaaagcacggtacggatgatggggttgtctggatgaactggaaggggtcatggtactccatgagaaagatgtcaatgaagattcggcccttttttcctcaacaa

SEQ ID NO: 11217 - DNA, 1473 bp, synthetic construct
  misc_feature 1..1473: note = source = /note="Description of Artificial Sequence: Synthetic coding sequence"
  source 1..1473: mol_type = other DNA
atgaagcgcatggtctcatggtcctttcacaaactcaaaacaatgaagcacctgctcctgcttctgttatgcgtctttctggtgaaaagtcaaggggtgaacgataatgaagaaggattttttagtgcccgcgggcacagaccactcgataaaaagagggaagaggcaccatccttaaggcccgctccccctcctatctcaggcgggggatacagggctcggcccgcaaaagcagccgctacccaaaaaaaagtagaacgcaaagccccagacgcaggaggctgccttcatgctgatccagaccttggagtgctttgccccactggctgccagctgcaagaggcccttctgcagcaggaaagaccaatcagaaactctgtcgatgaacttaacaataatgtggaagccgtaagccagaccagctcgagctcgtttcagtacatgtacctgctcaaggatctgtggcaaaaacggcagaagcaggttaaggacaacgagaacgtagtaaatgagtactcgagtgagctcgaaaagcaccaactgtacattgacgaaactgtcaacagtaatatccctaccaatctacgtgtgttacgcagcatccttgagaacctccgctcgaagatccaaaagctcgaaagtgacgtcagcgctcagatggaatactgtagaactccatgcactgtcagttgcaacatcccagtagtgagtggtaaagagtgtgaagagatcatccgcaaagggggcgaaacatctgaaatgtatctgattcagcccgatagcagcgtcaagccatacagggtgtactgtgacatgaataccgagaacggcggatggaccgttatacagaatagacaggatggtagtgtggactttgggagaaagtgggacccgtataaacagggattcgggaatgtggctacaaacactgatggcaagaactactgcggcctgcccggagaatattggttgggaaacgataagatctcccagttgaccaggatgggaccaaccgagctgctcatcgagatggaagattggaaaggagataaagtgaaagctcattacggcggcttcacagtgcaaaacgaggctaacaaatatcaaatctcagtgaacaaatatagaggtactgcgggcaatgcgctgatggacggggctagccagctgatgggagaaaacagaacaatgaccatccacaacggaatgtttttcagcacctacgaccgggacaatgatggatggcttacttctgatcccaggaagcaatgtagtaaagaggacggtggcggttggtggtataataggtgtcacgccgccaacccgaatggcaggtattactgggggggacaatacacttgggacatggctaagcacggaaccgacgatggagtggtgtggatgaattggaagggaagctggtactccatgcgtaagatgtcaatgaagatccgccctttcttcccccagcag

SEQ ID NO: 11218 - DNA, 1473 bp, synthetic construct
  misc_feature 1..1473: note = source = /note="Description of Artificial Sequence: Synthetic coding sequence"
  source 1..1473: mol_type = other DNA
atgaagagaatggtgagctggtcttttcataaacttaagaccatgaaacacttactgctgctgctgctttgcgtcttcctcgtcaagagccaaggcgtgaatgataacgaagaaggtttcttttctgcaaggggccatcgacctctggacaaaaagcgagaagaggcaccatccttgcgacccgccccaccacccatctccggcggcggctaccgagcacgtcccgccaaggcggccgctacacagaagaaggtcgaaaggaaagctcccgacgctgggggctgccttcatgctgaccctgacctcggagttttgtgccctaccggctgccaacttcaggaggcactcctgcaacaggaaagacccattagaaatagcgtagacgagctgaacaataatgtcgaggcggtctcgcagaccagtagttcctcatttcagtatatgtatcttctaaaggatctctggcagaagcgccagaagcaagtgaaagacaatgagaacgtagtgaatgaatacagctctgaactggagaagcaccagctctatatcgacgagactgtcaactcgaacatccctaccaacttgagagtgctacgaagcattcttgagaaccttaggagtaagattcagaaactggagagcgacgtgagtgctcaaatggaatattgcaggaccccttgtacggtgtcctgcaacatccccgttgtcagtggtaaggaatgtgaggaaatcattcgtaaagggggtgaaacttccgagatgtatctgatacagcccgattcttccgtgaagccatacagagtttattgcgacatgaacaccgaaaacggcgggtggaccgtgatacagaacaggcaggacggcagcgtagattttggacgaaagtgggatccatacaagcagggcttcggcaacgtcgccaccaatactgacgggaaaaactattgcggacttcccggtgagtattggcttggcaacgacaagattagccaattaacgcgaatgggcccaaccgagcttctgatcgaaatggaagactggaagggcgacaaagtgaaggcgcactatggcggatttacagtgcaaaacgaagccaataagtatcagatctccgtcaacaaatatagagggactgcgggcaatgcgctgatggacggggctagtcagttgatgggggagaatcgtacaatgacgatacacaacggcatgtttttctccacgtatgaccgagataatgatggatggctgacttcggacccaaggaaacagtgctcaaaggaggatggggggggctggtggtacaacaggtgccatgcggctaatccaaatggcagatactattggggcggccaatatacctgggatatggctaaacatggtactgacgatggcgttgtgtggatgaattggaagggctcctggtacagcatgaggaagatgagcatgaagataaggccattttttcctcaacaa

SEQ ID NO: 11219 - DNA, 1473 bp, synthetic construct
  misc_feature 1..1473: note = source = /note="Description of Artificial Sequence: Synthetic coding sequence"
  source 1..1473: mol_type = other DNA
atgaagaggatggtgtcctggtctttccacaaactgaaaacgatgaagcatctgctgctcctcctcctctgtgtgtttctggtcaagtctcaaggggtgaatgacaacgaagagggattcttcagcgccaggggacaccgccccttggacaagaagcgcgaggaagcgcctagcttgcggccggccccgcccccgatctccggaggaggataccgcgcgcggccagctaaggcggccgctactcagaaaaaggtggaaagaaaggctccagacgccgggggctgtctgcatgcggatccggacctgggtgtgctctgtccaactggctgtcagctccaagaggccctgctccagcaggaaagaccaatccggaactccgttgacgaactgaacaacaatgtggaagccgtgtcccaaacttcatcgtcatcctttcagtacatgtacctgcttaaggacctgtggcagaagcggcagaagcaggtgaaggataacgagaacgtggtgaacgagtacagcagcgagttggaaaagcatcagctttacatagacgaaaccgttaactccaatattccgactaatctgcgagtgctgcggtccatcttggagaacctgcggagcaagatccagaagctcgaatccgatgtgtccgcccagatggaatactgtcgtaccccatgcacggtgagttgtaatatcccggtggtgtcaggaaaggaatgcgaggagattatccggaaaggcggagaaacctccgaaatgtacttgatccagccagattcatcagtgaagccgtatcgggtctactgcgatatgaatactgagaatggaggatggaccgtgattcagaacagacaggacggatcggtggactttgggcgaaagtgggacccttacaagcagggatttggaaacgtggcgaccaacaccgatggtaaaaactactgcgggctgcccggagaatactggctgggcaatgacaagatctctcagcttactaggatgggtcctaccgaactgttgatcgagatggaagattggaagggagataaggtgaaggcacactacggtgggttcactgtccagaacgaggcaaacaaataccagatcagcgtgaacaagtaccggggcaccgcgggcaatgccctgatggacggagcctcgcagctcatgggagagaacagaaccatgaccatccataacggcatgttctttagcacttacgatcgcgataacgacgggtggctgacttcagaccccagaaagcagtgctcgaaggaggacgggggaggatggtggtacaaccgctgccacgctgccaacccaaatggacgctactactggggcggacagtacacttgggacatggccaaacacggaaccgacgacggagtggtgtggatgaattggaaaggatcctggtactccatgcggaaaatgagcatgaagatccgcccgttcttcccgcagcag

SEQ ID NO: 11220 - DNA, 1473 bp, synthetic construct
  misc_feature 1..1473: note = source = /note="Description of Artificial Sequence: Synthetic coding sequence"
  source 1..1473: mol_type = other DNA
atgaagcgaatggtgtcttggtcttttcacaaattgaaaaccatgaagcaccttctccttctcctgctctgcgttttcctggtgaagagtcagggagtgaacgacaacgaggagggcttcttctctgcccggggccacagacccctcgacaagaagagggaagaggcaccgtcactgcgaccggcgcccccaccaattagtggaggcggctatagggcccgccctgccaaggccgccgccacacagaagaaggtcgagcgcaaagcccccgatgctggcggttgcctgcatgcggatccagatttgggtgtactctgcccaactggctgtcaactgcaggaggccctcctgcagcaggaacgacctattcgcaattcggtcgatgaactgaacaacaacgtggaagcagtgagccagaccagtagttcgagcttccaatatatgtatcttctaaaggatctctggcaaaagcggcagaagcaggtgaaggacaacgagaacgtggtcaacgagtacagttccgaactggagaaacaccagctttacattgatgaaaccgttaactccaacatacccaccaatctgcgcgtactccggtccatactggagaatctacgaagcaagattcagaaactggagtctgatgtgtccgcacagatggaatattgtagaacaccatgtactgtctcatgcaatatacccgtggtcagtggaaaggagtgtgaggaaatcattcgcaagggtggagagacgtctgagatgtatctaattcagcctgactccagtgtgaagccttaccgggtatattgtgatatgaacaccgaaaacggagggtggacagtgatccaaaataggcaggatgggagcgtcgatttcggacggaaatgggatccgtataagcaggggtttgggaatgttgccacaaacaccgatgggaaaaactactgcggcctccctggcgaatactggttaggcaacgacaaaatatcacagctaacgcggatgggtcctacagagctgctgattgaaatggaggattggaaaggggacaaggtgaaagcccactacggcgggttcaccgtgcagaatgaggctaataaatatcagatatccgtgaataagtacagaggtacagccggaaatgcactgatggatggtgcttcacaactgatgggcgagaataggacaatgacaattcataacggcatgttcttctcaacatatgatcgtgataacgacggctggcttaccagtgatccacggaagcaatgtagtaaagaagacggcgggggctggtggtataacagatgccacgccgctaatccaaacggacgttattactggggtggacaatatacttgggatatggccaagcatggaaccgatgatggggttgtatggatgaattggaagggttcttggtatagtatgcgaaagatgagcatgaagatcagacccttttttccacaacag

SEQ ID NO: 11221 - DNA, 1473 bp, synthetic construct
  misc_feature 1..1473: note = source = /note="Description of Artificial Sequence: Synthetic coding sequence"
  source 1..1473: mol_type = other DNA
atgaaacggatggtgtcttggtcatttcataaactcaagaccatgaagcatctcctgctgctcctcttgtgtgtttttctcgttaagagccagggggtaaatgataatgaagaagggttcttttccgcacgcggtcacaggccacttgataagaaacgagaagaagctccttcacttagacctgcccctccgccaatatcgggcggtggttacagagcgcgtccagcaaaggccgcagcgactcagaagaaagtggaacgcaaggcacctgacgcaggcggatgtctgcacgcagaccccgatctgggggtgttgtgtcctactggatgtcaactccaggaggccctgctccaacaggaaagaccgattagaaactccgtcgatgagctgaacaataacgtcgaggcggtgtcacagacctcgtcctctagctttcagtacatgtaccttcttaaggatctttggcaaaagcgacaaaagcaagtgaaagacaatgagaacgtagtgaatgagtactctagcgaattggagaagcatcaactgtacatcgacgagactgtcaatagcaatatcccgaccaaccttagggtgcttagatcaatcctcgaaaacttgcgctcgaagattcagaaactggaatccgatgtgtcggcacaaatggaatattgtaggactccttgcaccgtgtcgtgtaacattcccgtcgtgtccggtaaggagtgtgaagaaatcattcgcaaaggaggcgaaacctccgaaatgtaccttattcaacctgacagcagcgtgaagccttaccgcgtttactgcgatatgaacactgagaacgggggatggactgtaattcaaaatagacaagacggttccgtggatttcggaagaaagtgggatccatacaagcagggctttggtaacgtggcaaccaataccgacggcaaaaactactgcggactgcctggagaatactggcttggaaacgataagattagtcagctgacccggatggggccaaccgagcttttgatagaaatggaagattggaagggagataaggtcaaggcacattacggcggatttaccgtccagaacgaggctaataagtaccaaatctcagtgaacaaatatcgcggaactgcgggtaacgccctgatggatggtgcttcgcaactgatgggagaaaacaggactatgacgatccataatggcatgttctttagcacctatgaccgagataacgatggttggttgacttcggacccccgtaagcagtgctcgaaagaagatgggggaggttggtggtacaatcgttgccacgccgcaaacccaaatgggagatactactggggcggacagtacacctgggatatggcaaaacatggaacggatgacggggttgtgtggatgaactggaagggttcgtggtactctatgcggaagatgtccatgaaaattcggccgttcttcccccaacaa

SEQ ID NO: 11222 - DNA, 1473 bp, synthetic construct
  misc_feature 1..1473: note = source = /note="Description of Artificial Sequence: Synthetic coding sequence"
  source 1..1473: mol_type = other DNA
atgaagcgcatggtgagctggtccttccacaaacttaagaccatgaagcaccttttgctgttgttgctctgcgttttcctcgtcaagtcgcaaggggtgaacgacaatgaggaaggattcttttcggccagagggcaccggccgctggacaagaagagggaagaagccccgtcactgcgcccggccccaccgcccatcagtggaggaggataccgggcaagacccgccaaggccgcggctacccagaagaaggtggaacggaaagctccggatgcaggaggatgccttcacgcggacccagatctcggggtgctgtgtcctaccggctgccaactgcaagaagcactcttgcagcaggaacggcctatccgaaatagcgtggatgagctgaacaacaacgtggaggctgtgtcgcagacttccagctcgtccttccaatacatgtacctgctcaaagacctctggcagaagagacaaaagcaggtgaaagataatgaaaacgtggtgaatgaatactcctctgagcttgagaagcatcaactgtacattgacgaaaccgtgaactccaatatcccaactaacctgcgcgtcctgcgcagcatactggaaaacctgcggtcgaaaatccagaaactggaatcagacgtgtccgcacaaatggagtactgcaggacgccgtgcactgtgtcgtgcaacatcccggtggtgtcaggcaaggagtgcgaagaaatcatccgcaaggggggagaaacctctgagatgtacctcatccagccggacagcagcgtcaaaccgtaccgcgtatactgtgatatgaacacggagaacggagggtggacggttatccagaatcggcaggacggttctgtggatttcggacggaagtgggatccctacaagcagggatttggcaacgtggccactaatacggacggaaagaattactgcgggctcccgggtgaatattggcttggaaacgacaaaatctcccaactcactcgcatgggccctaccgaattgctgatcgaaatggaggactggaaaggggacaaagtgaaggcccactatggggggttcactgtgcagaacgaagcgaataagtaccaaatcagcgtgaacaagtaccggggcaccgctgggaatgccctgatggacggagcttcccagttgatgggagagaatcggaccatgactatccacaacggaatgttcttctccacttacgaccgggacaacgatggctggttgacttcagacccgcggaagcagtgtagtaaggaagatggagggggctggtggtacaaccgctgccacgccgccaacccaaacggacgttattactggggaggacagtacacctgggatatggccaaacacggtaccgacgacggagttgtctggatgaattggaagggttcgtggtactcaatgagaaaaatgtccatgaaaattcggccattctttccacagcag

SEQ ID NO: 11223 - DNA, 1473 bp, synthetic construct
  misc_feature 1..1473: note = source = /note="Description of Artificial Sequence: Synthetic coding sequence"
  source 1..1473: mol_type = other DNA
atgaagcggatggtgtcctggtcatttcataagctgaaaacgatgaaacatctgctcctgcttctcttgtgcgtgtttctggtcaagagccagggcgttaatgataacgaagaaggatttttctcggccaggggtcaccgcccgcttgataagaaacgtgaagaagcaccttcgctgcggcccgcaccaccaccgatatcgggaggtggctaccgcgcacggcctgccaaggcagcagcaacccaaaagaaggtcgaacgcaaggcgcctgatgcaggtggctgtctgcatgctgaccccgacctcggggtgctctgtcctacgggctgtcaactgcaagaggccctcttgcaacaggagaggcctattaggaacagcgtggatgagctgaacaataatgtcgaagcggtgagccagacctcatcatcctcctttcaatacatgtatctgctgaaagatctgtggcagaagaggcagaagcaagtgaaggacaatgagaacgtggtcaatgagtacagttcggagctggaaaagcatcagctttacattgatgaaacggtgaacagcaatatccctaccaaccttcgagtgctgagatcaatcctcgagaacctgagatctaagattcagaaacttgaatcggatgtgtcagcgcaaatggagtactgtcgaactccatgcactgtgagctgtaacatacccgtggtgtctggaaaagaatgtgaagagattatcagaaaagggggcgaaacctcggagatgtacctgatacagccggattcgagcgtgaagccataccgggtgtactgtgatatgaatactgaaaacggaggatggaccgtcatccaaaatcggcaagacgggtccgtcgattttggaagaaagtgggatccttacaagcaaggattcggaaacgtggctacgaacaccgacgggaaaaactactgcggccttcctggagaatactggctgggaaacgacaagattagccaacttactcggatgggtcccactgaacttcttatagaaatggaagattggaagggcgataaggtgaaagcgcattacggcggatttaccgtgcaaaacgaagcaaataagtaccagatctcggtcaacaaataccggggaaccgcaggtaacgcactgatggatggggcttcgcagttgatgggtgagaacagaaccatgaccattcataacggtatgttcttttccacctacgatagagataatgatggatggctgacctctgatccccgaaaacaatgttcgaaagaggacgggggtggatggtggtacaacagatgccatgccgcaaatccgaacggccggtactattggggtggacagtacacgtgggacatggctaagcacggaactgatgatggcgtggtgtggatgaactggaaaggatcctggtactccatgagaaagatgagcatgaagattcgaccgttttttccacagcaa

SEQ ID NO: 11224 - DNA, 1473 bp, synthetic construct
  misc_feature 1..1473: note = source = /note="Description of Artificial Sequence: Synthetic coding sequence"
  source 1..1473: mol_type = other DNA
atgaaaaggatggttagctggtcttttcacaaattaaaaacgatgaaacatcttcttttattattactgtgcgtgtttttggttaagagccaaggagtaaacgataatgaagaaggctttttttccgcccgcggtcatcgaccgcttgataaaaaacgggaagaggcaccttcgttgagacctgctccgcctcccatctcaggaggaggttaccgcgcaagaccagcaaaggctgccgcgacgcaaaaaaaagtggaaagaaaagcgccagatgcgggcggctgcctgcatgctgatccagatttaggcgtcctatgtcctactggctgtcagctacaagaagccctgctccagcaagaaagaccgattagaaactcagttgacgaactcaataataacgtagaagctgtcagccaaacatctagttctagttttcagtacatgtatcttctcaaagacctgtggcagaaacgacaaaaacaggtgaaagataatgaaaacgttgtaaacgagtattcatctgagttagaaaagcaccaactatatattgacgaaaccgtaaattctaacattcctacgaatttacgggtgctgcgaagcattttggaaaatctgagatccaaaattcagaaactcgagagcgatgtttcggctcaaatggagtactgtcgtacaccttgtaccgtcagctgtaacattcccgtggtcagcggcaaggaatgtgaagaaattatccgtaaaggaggcgagacgagcgaaatgtatctgattcaaccggactcttcggtaaagccgtatagggtctattgcgatatgaacacggaaaacggtggatggacggtcattcaaaatagacaggacggatcagtcgactttggacgaaaatgggatccgtataaacagggctttggtaacgtcgccaccaatacagatggcaaaaactattgcgggctacctggagaatactggctaggaaatgacaaaatctcacagttgacacgtatggggcctactgaattgttaattgaaatggaggactggaagggtgataaagtgaaagcacattacggtggtttcacggtgcaaaatgaagccaacaaatatcagatctcagtgaacaaatatcgtggaacagcgggcaatgcgttgatggacggcgcctctcaacttatgggcgaaaatagaactatgaccatccataacgggatgtttttttcaacatatgatagagacaatgacggatggcttacgtcggatcctcgcaagcagtgttccaaggaagatggaggagggtggtggtataatagatgccacgccgccaacccgaacggcagatattattggggtggacagtatacatgggatatggccaaacatggtacagatgacggcgtagtttggatgaactggaaaggctcatggtattccatgcgcaaaatgtctatgaagatccgcccttttttcccgcaacag

SEQ ID NO: 11225 - DNA, 1473 bp, synthetic construct
  misc_feature 1..1473: note = source = /note="Description of Artificial Sequence: Synthetic coding sequence"
  source 1..1473: mol_type = other DNA
atgaagaggatggtcagttggtccttccataagctgaaaactatgaagcaccttctcctgctcctgctgtgcgtgtttctcgtcaagtcacaaggggtgaacgacaacgaggaaggctttttctctgccaggggacataggccccttgacaaaaagcgagaagaggcacccagcttgcgtccggcccctccaccaatttcaggcggaggataccgcgcccgcccggcaaaggccgcggcaacccagaaaaaagtggaaagaaaagctcccgatgctggaggctgcctgcacgccgacccggacctgggagtgctgtgccctacgggatgccagctgcaagaagcgctcctgcaacaggagcggccgatccgcaactccgtggatgagctcaacaacaatgtggaggcggtgtcgcagacctcctcgtcctccttccagtacatgtacctcctgaaggatctctggcaaaaacgccagaagcaggtgaaggacaacgagaatgtcgtcaacgagtactcttcagaactggaaaagcaccaactgtacatcgacgaaactgtcaactctaacattccgaccaatctgcgcgtcctcagatcaatcctcgagaatctcagaagcaaaatccagaagctggaatctgatgtctccgcccaaatggagtattgcagaacgccttgcactgtgtcatgcaacatcccagtggtgtcgggaaaggaatgcgaagaaatcatcaggaagggaggtgaaacctcagagatgtacttgatacaaccagactccagtgttaagccgtaccgggtgtactgcgatatgaataccgagaacggtggatggaccgttattcagaaccggcaagacggttcagttgatttcgggcggaagtgggacccttacaaacaaggattcgggaacgtcgcgactaataccgatggaaagaattactgtggattgccgggagaatactggctcggaaatgacaagatctcgcagctcacgcggatgggccctaccgagttgctgatcgagatggaggactggaaaggagataaggtcaaggctcactacggcggatttactgtgcagaacgaagccaacaagtaccagatttcggtcaacaaataccgcggaactgcaggaaatgcactgatggacggagcctcacagctgatgggcgaaaatagaactatgaccatccataacggcatgttcttttcaacttacgacagggacaatgatggatggttgacttctgatccacgcaagcagtgtagcaaggaggacgggggtggctggtggtacaacaggtgtcatgcggcgaacccgaacgggagatactattggggtggacagtacacgtgggatatggctaaacacgggactgatgacggcgtggtgtggatgaactggaagggttcgtggtacagcatgcggaagatgtccatgaagatcagaccgtttttcccgcaacaa

SEQ ID NO: 11226 - DNA, 1473 bp, synthetic construct
  misc_feature 1..1473: note = source = /note="Description of Artificial Sequence: Synthetic coding sequence"
  source 1..1473: mol_type = other DNA
atgaagcgcatggtcagttggtctttccataaactaaagaccatgaagcacttgctactgctcctgttgtgcgtgtttctggttaagagccaaggggtaaacgataatgaagagggcttctttagcgctcgtggccaccggcctctggacaaaaaacgggaggaggcaccgagcctacggccagctccccctccaatttccggcggaggatatcgggcacgacctgcaaaagctgccgcaacacagaagaaagtagagcgcaaagctcctgacgctgggggctgcctgcatgcagatccagatttgggggtcctgtgccctactggttgccagctccaggaagccctgcttcagcaggagcgacccattcgtaattctgtggacgagttgaataataacgtggaggcagtaagtcagacaagtagctcctcttttcagtacatgtatctgctcaaggatttgtggcagaaacggcagaagcaggtcaaggacaacgagaatgttgtgaatgagtattctagtgaactggaaaaacaccaattgtatatcgacgagactgtaaacagcaacatccctacaaatttacgagtcctacgatctatccttgagaacctacgcagcaaaatccagaaactggagtcagacgtctccgcacagatggaatactgtaggaccccgtgcacagtgtcctgcaatatccctgtcgtgagtgggaaggaatgcgaggaaatcatcagaaagggtggggaaacctccgaaatgtatcttatccaacctgattcgtctgtgaaaccttatcgggtctactgcgacatgaatacagagaatggtggatggactgtgatccagaacaggcaggatggatcagtcgacttcgggagaaagtgggacccatacaagcagggttttggcaatgtggctaccaacaccgacggcaagaactattgcggcttgcccggggagtattggcttggtaacgacaaaattagccagttgactagaatggggcccacggaattattaattgaaatggaagattggaaaggggacaaggtcaaagctcactacggtggatttactgtgcaaaatgaagcgaacaagtaccagattagtgttaataaataccgcggtactgcgggaaatgccctgatggacggcgcaagtcaactaatgggggagaatcgtaccatgactatccacaacggcatgttctttagcacatatgacagagataatgatgggtggctgacctccgaccccaggaagcagtgtagtaaagaggatgggggaggctggtggtataatcgctgccatgcggctaatcctaatggcagatactactggggcggacagtatacctgggatatggccaagcatggcaccgatgacggcgtcgtgtggatgaattggaaaggaagttggtactccatgcggaagatgagtatgaagattaggccctttttcccgcaacaa

SEQ ID NO: 11227 - DNA, 1473 bp, synthetic construct
  misc_feature 1..1473: note = source = /note="Description of Artificial Sequence: Synthetic coding sequence"
  source 1..1473: mol_type = other DNA
atgaagagaatggtgtcctggtcctttcacaaactcaaaacaatgaagcacctgctgcttttgctcctctgtgtgtttctcgtcaagtcacagggtgtcaacgacaacgaagagggcttcttctcagcccgcggtcaccgccctctcgacaaaaagcgcgaggaggctccatctctccgccccgcgccccctcctatctccggcggtggctatagagctcgcccagctaaagcggctgctacacagaaaaaggtggaaaggaaggctcctgacgctggtggatgccttcacgctgacccagatctcggtgttctgtgccccactggatgtcagctgcaggaagcgctgctgcagcaggaaaggccgatcaggaactcagtggacgaattgaataataacgtggaagcggttagccaaacgagctcatcatcctttcagtacatgtacctgctcaaagatttgtggcagaagagacagaaacaggtgaaggacaacgaaaatgtagtgaacgaatactcctctgagctggaaaagcaccagttgtacatcgacgagaccgtgaacagtaacattccaacaaatctgagggtcttgagaagcatcctcgagaatctcaggagtaagattcaaaaactggaaagcgacgtcagtgcgcagatggaatattgtagaaccccttgcaccgtaagttgtaatatccccgtcgtgagtggcaaggagtgtgaggagattatacgcaagggtggtgagaccagcgaaatgtatctgatacaacccgattcctccgttaaaccatatagggtctactgcgacatgaacacggagaacggcggttggactgtaatacaaaacaggcaggatggctccgtagatttcggcaggaaatgggatccatataaacaaggattcggaaatgttgctactaacaccgacggcaagaactactgtggtctcccaggagaatactggctcggcaatgacaaaattagccagctgaccaggatgggccctaccgagctgctgatcgagatggaagattggaaaggcgacaaggtaaaagctcattatggcggatttaccgtacagaatgaggctaataagtaccagatctctgttaacaagtaccgcggaacagccggtaatgctttgatggatggtgcctcacagttgatgggcgagaacagaactatgactatccataatggcatgttctttagcacttatgatagggacaatgatggatggctgacgtccgaccctcgcaagcaatgctctaaagaagacggaggaggatggtggtacaaccgctgccatgccgctaatcctaacggtcgctactactggggtggccagtatacttgggacatggcgaagcatggcacagacgacggcgtggtgtggatgaactggaagggatcctggtactcaatgaggaaaatgtcaatgaagatcagaccttttttcccccaacag

SEQ ID NO: 11228 - DNA, 1473 bp, synthetic construct
  misc_feature 1..1473: note = source = /note="Description of Artificial Sequence: Synthetic coding sequence"
  source 1..1473: mol_type = other DNA
atgaagaggatggtgagctggtcgtttcataagctgaaaactatgaagcacctgctgctgttgttgctttgcgtgttcctggtgaagtcccaaggagtgaatgataacgaagaaggtttcttttcagcccgtggtcatcggcctctggataagaaacgagaagaagcccctagcctccgccctgcaccacctccaatttcgggaggcggataccgcgcgcgaccagccaaggcagccgcaacccagaagaaagtggaacgtaaggcacccgatgccggaggctgtctccatgctgatccagatctgggagtcctttgcccaaccggctgccagcttcaagaagcactgctgcaacaggagcgccccataagaaacagcgtcgatgaactcaataacaacgtggaagcagtctcacagacctcctcgtcatcctttcagtatatgtacctcctgaaggatctgtggcaaaaaaggcaaaagcaagtaaaagataacgagaacgtggtgaacgaatacagctcggaactggaaaagcatcagctctacattgatgaaaccgttaattccaacattccaaccaacctgagagtgctccgctcaattctggaaaacctgcggtccaagattcagaaactggagtcagatgtgagcgcacaaatggagtactgtagaactccatgtaccgtgtcgtgtaacatccctgtggtgtcgggaaaggaatgtgaggagatcattaggaagggaggagaaacctcggaaatgtacctcatccaacctgattcctcagtcaagccttacagggtttattgcgatatgaacaccgagaatgggggatggacggtgattcaaaatagacaagatggttctgtggatttcggtcggaaatgggacccatacaagcaaggatttgggaatgtcgcaactaacaccgatggtaagaattactgtgggctgccaggggaatactggcttggaaatgacaagatttcacaacttacgcgaatgggtcctactgaacttctgatcgaaatggaggactggaagggtgataaggtgaaggcccattacggtggctttactgttcaaaatgaagcaaacaagtaccaaatatcggtgaataagtacagagggaccgcaggaaacgctcttatggatggtgcatcacagcttatgggcgaaaatcgaaccatgactatccacaacggaatgttcttctcgacctacgatagggataatgacgggtggctgacttcggatcctaggaagcaatgtagcaaagaagatggtgggggttggtggtacaaccggtgtcacgcagcgaatccaaatggcagatactactggggcggacaatacacctgggatatggccaagcatggtactgatgatggagtggtgtggatgaattggaaaggatcctggtactccatgaggaagatgtcgatgaagattcgccctttcttccctcagcaa

SEQ ID NO: 11229 - DNA, 1473 bp, synthetic construct
  misc_feature 1..1473: note = source = /note="Description of Artificial Sequence: Synthetic coding sequence"
  source 1..1473: mol_type = other DNA
atgaaacgcatggtgagctggtcgtttcacaaactcaaaaccatgaaacatctcctgctcctgctgctgtgcgtgtttctggtgaagagccaaggagtgaatgacaacgaagagggcttcttctcggcacgcggacatcggccactcgacaaaaaacgggaggaagcgccgtctctgcgccccgcaccgcctccaatctccggcgggggatacagggcccggcccgcaaaagccgcggcaactcagaagaaggtcgaacgcaaggcccccgatgctgggggatgtctgcacgccgacccggatctgggtgtgctgtgtccgaccggttgccagctccaggaagccctcctgcagcaggaacgcccaatccgcaactcggtggacgagctgaataacaatgtggaagcggtttcccagacctcctcttcctcatttcaatacatgtaccttcttaaggacctgtggcaaaagcgccaaaaacaagtgaaggacaatgagaatgtcgtgaacgaatactcctcagaactcgagaagcaccagctctacatcgacgaaactgtgaattcaaacatcccgactaaccttagggtcttgagaagcatccttgagaacctgcgctcaaagatacagaaactggaatcggatgtgtcagctcagatggagtactgccgcactccatgcactgtgtcgtgcaatattcccgtcgtgtccggaaaggaatgcgaggaaatcatccggaagggcggggagacgagcgagatgtacctgatccagccggactcttccgttaagccgtacagagtgtattgtgacatgaatactgaaaacggtgggtggaccgtgattcagaatcggcaagacggctcggtggacttcggcagaaagtgggatccttacaagcaagggtttggaaatgttgcgaccaacaccgacggcaagaactattgcggtttgccaggcgaatactggctgggaaacgacaaaatctcgcagcttacccggatgggtccgaccgagttgctgatcgaaatggaggattggaaaggtgataaggtgaaggctcactacggcggattcactgtgcaaaacgaagccaacaagtaccaaatcagcgtgaacaagtaccgcggaactgcgggaaacgcactgatggacggagcgtcacagttgatgggagaaaaccgcactatgactatacacaacggaatgttcttctcgacgtatgatcgggacaatgatggatggctgactagcgacccgaggaagcagtgttcaaaggaagatggaggtggatggtggtacaatagatgccatgcagcgaatccaaatgggcggtactactggggaggtcagtacacctgggatatggctaagcatggaacggatgacggagtggtgtggatgaattggaaaggctcgtggtactccatgcggaaaatgtcgatgaagatcaggcctttcttcccacaacaa

SEQ ID NO: 11230 - DNA, 1473 bp, synthetic construct
  misc_feature 1..1473: note = source = /note="Description of Artificial Sequence: Synthetic coding sequence"
  source 1..1473: mol_type = other DNA
atgaaacgcatggtctcctggtcatttcacaagttgaagacaatgaagcatctcttgcttctcttgctgtgtgttttcctcgtcaagtcccaaggagtcaacgacaatgaggagggcttcttctccgcaaggggacataggcccctggataaaaaacgtgaagaagccccctctctcaggcctgccccaccccccatctctggcggaggataccgcgctcgccccgcaaaggctgcagcaacccagaagaaggttgaaagaaaggctcctgacgctggaggctgccttcatgccgacccagacctcggcgtgctgtgccccactggatgtcagctccaggaggccctgcttcagcaggaacgccctatccgcaactctgtggatgaactgaataataacgtagaggctgtaagtcaaacctcttcttcctccttccagtatatgtatctcctcaaagatctttggcagaaacgtcaaaagcaggtgaaggacaatgagaacgtggtcaacgagtacagcagtgaacttgagaagcatcagctttatattgacgagaccgtgaattctaacatacccaccaatctcagggtgctccgttccatactcgagaacctgaggtctaagatccaaaagctggaaagcgacgtgtctgcccaaatggagtactgtcgcacaccttgcaccgtgtcctgcaatattccagttgtgtccggaaaagaatgtgaggaaattatcaggaaaggtggtgagacatctgagatgtaccttatccagccagattcctctgtcaagccctacagggtttactgtgatatgaatactgaaaacggaggctggactgtgattcaaaaccgccaggacggttcagttgatttcggacgcaagtgggacccttacaagcagggtttcggaaacgtggccaccaacaccgacggaaagaactactgtggtctgcccggagagtactggttgggcaatgacaaaataagtcagttgactagaatgggacctaccgagctgttgattgagatggaagactggaagggtgacaaggtaaaagcccactatggtggattcactgtccaaaacgaggctaacaagtatcagatatccgtgaataagtaccgtggcactgccggcaacgctttgatggatggcgcttcccaactcatgggcgagaaccgtaccatgacaatccataatggtatgttttttagcacctacgaccgtgacaacgacggttggctgacaagcgaccccagaaagcagtgctccaaggaagacggaggaggctggtggtacaaccgctgccacgccgcaaacccaaacggtcgttattattggggtggccagtacacttgggacatggctaagcacggaaccgacgatggtgtcgtctggatgaactggaagggttcctggtacagcatgcgtaagatgtccatgaagattcgtcccttcttcccacaacaa

SEQ ID NO: 11231 - DNA, 1473 bp, synthetic construct
  misc_feature 1..1473: note = source = /note="Description of Artificial Sequence: Synthetic coding sequence"
  source 1..1473: mol_type = other DNA
atgaaacggatggtgtcatggtcttttcacaagcttaagactatgaagcacctcctcctgttgctcctgtgcgtctttttggtcaaatcacaaggcgtgaacgacaacgaagagggtttcttctccgcgagaggtcatagaccgctcgacaagaagcgggaagaggctccttccttacgtccggcccctccgcccatatcaggagggggataccgtgcccgacccgcaaaagccgctgcaactcagaaaaaggtcgagaggaaagcccccgatgcaggagggtgtctgcatgccgatccagatctgggtgttctctgtccaaccggctgtcagctgcaggaggcactgctgcagcaggagagacccatacggaattccgtcgacgaactgaacaataacgtagaagctgtgtcccagacgagcagcagcagcttccaatatatgtatctgctgaaggacttgtggcaaaagcggcaaaagcaggtgaaggataacgagaacgtggttaacgaatattcttcagaacttgagaagcatcagctgtacatcgatgaaacggtcaactctaatatccccaccaatcttagggttctgaggtctatcctggagaacctccgatccaaaattcagaaactggaatctgatgtgtccgcccagatggagtactgccggaccccctgcacggtgtcctgcaatatcccagtcgtcagtgggaaagaatgcgaagagatcatccgcaagggcggagagacttccgagatgtacctcatccagcctgactcctctgttaaaccgtatcgcgtttattgtgacatgaacacagaaaatggggggtggacagtgatacagaatcggcaagacggatcagtggatttcggccgtaaatgggacccatacaaacagggattcggcaatgtggcgactaacactgacggcaagaattactgcggcctccccggagagtactggctcggaaacgacaaaatcagtcagctcacccggatggggccaacagaacttctgatagaaatggaagactggaagggtgacaaggtgaaggcccactacggaggcttcacagtgcaaaacgaagctaacaagtaccagatttccgtaaataaataccggggaactgccggaaatgccctgatggacggcgcctcccagttaatgggggagaatcgaacgatgaccatccataacggaatgttcttctccacgtacgacagggacaacgacgggtggctcacttccgatccacggaagcagtgttctaaggaagacggaggggggtggtggtacaaccgatgccacgccgccaaccctaatgggcgctattactggggcggccagtacacttgggacatggccaagcatgggacggacgacggagtggtgtggatgaactggaagggcagctggtattcaatgcggaagatgagcatgaagatccggccattttttcctcaacag

SEQ ID NO: 11232 - DNA, 1473 bp, synthetic construct
  misc_feature 1..1473: note = source = /note="Description of Artificial Sequence: Synthetic coding sequence"
  source 1..1473: mol_type = other DNA
atgaaaagaatggtcagctggtctttccataaactgaagaccatgaaacacctgttgctgcttcttttatgtgtgtttctggtcaaaagccagggagtgaacgacaacgaggagggatttttctccgcacgggggcatcgacctctggataagaaaagggaggaagcacctagcctcagacccgctcctccacccatcagcggaggagggtaccgggccaggccagccaaggctgcggctacacagaaaaaagtcgagaggaaggctcctgacgccggcggatgtttgcacgcagaccccgatcttggcgtgctgtgtcctacaggatgccagctccaagaagcactgctccagcaggagaggcctattcgcaactccgttgatgagttaaacaataacgttgaggctgtaagtcaaaccagttcatctagctttcagtatatgtacctcctgaaagacttatggcagaaacggcagaaacaggtgaaagacaacgagaacgtggtgaacgaatacagcagcgaattggagaaacatcagctgtacatagatgagacagtcaatagcaacatccccacaaaccttagggtgctgaggagtatccttgagaatttacggtcaaaaatccagaagctcgaatccgacgtatctgctcagatggagtattgtcggacaccatgtaccgtgtcatgcaatatacctgtggtgtccggcaaggagtgtgaggagataattcggaagggcggtgagaccagcgagatgtatctcattcagcccgatagcagcgtcaagccttatcgcgtttactgcgatatgaataccgaaaatggcggctggaccgtgatccagaacagacaggatggctccgtagatttcggtcggaagtgggatccttataagcaggggtttggcaacgtggctaccaacacggatggtaaaaattattgtggattgccaggtgagtactggctcgggaacgacaagatcagccagctcacgcggatgggcccaactgagctgctgattgagatggaagactggaaaggagacaaggtcaaggctcactatgggggttttaccgtgcagaatgaggctaataagtaccagattagcgtgaataaatacagggggaccgctgggaatgccttgatggatggcgccagtcagctgatgggtgaaaatcgcacaatgacaatacataacggaatgttcttttccacatatgatagggataacgatggatggttgacgtcagatccgaggaagcaatgttcaaaggaagatggtgggggttggtggtacaaccggtgtcatgccgcaaacccaaacggtcgttattattggggggggcagtatacttgggacatggcaaagcatggaacagatgatggcgtggtgtggatgaattggaaagggtcgtggtactccatgaggaagatgtcgatgaagattaggccctttttcccccagcag

SEQ ID NO: 11233 - DNA, 1473 bp, synthetic construct
  misc_feature 1..1473: note = source = /note="Description of Artificial Sequence: Synthetic coding sequence"
  source 1..1473: mol_type = other DNA
atgaagcgcatggtgagctggtctttccataaattaaagaccatgaagcatttgttgctattactcctctgcgtctttcttgttaagtctcagggagtgaatgataatgaggagggcttcttttctgctaggggtcacagaccgttggataagaaacgagaagaagcaccttcattacgtccagcgcccccacccatctccggcggcggttatcgagcccgtcccgccaaagccgcagctacacagaagaaggtagaacgcaaagcacccgatgctggcggatgcttacacgctgaccctgatctcggtgttttgtgtccaacgggttgtcaactgcaggaggctcttttgcagcaggaacggccaataagaaactcggtcgacgagttgaataacaatgtcgaggcggtgtctcagaccagctcatcctcctttcagtacatgtacctgctgaaggacctttggcagaagcgtcagaaacaggtgaaggacaatgagaacgttgtcaacgagtactctagcgagcttgaaaaacaccaattatatattgatgaaaccgtaaattctaacatcccaacaaacctgcgggtcctccgttctatcttggaaaacttacgaagtaagatccaaaagttggagtcagatgttagcgctcagatggaatactgccgaaccccctgcaccgtgtcttgtaacatcccagtcgtaagtggaaaagagtgcgaggaaattatcagaaagggtggtgagacctcagagatgtatttgatccagccggattcctcagtgaagccgtaccgggtttattgcgatatgaacacggaaaacggtggctggacggtcatccagaaccgtcaggatggatcggttgattttgggagaaagtgggatccctacaagcagggcttcggaaacgtagccaccaacactgacggcaagaactattgcggcttgcctggagagtattggctaggtaacgataagatctctcaactcacacggatgggcccgacagagctgttgatcgaaatggaggactggaagggcgataaggtcaaggcgcattatggtggttttaccgtgcagaacgaggcgaacaagtatcagatttccgtcaataagtacaggggaaccgctggtaatgcattgatggacggagcatcacagttgatgggagaaaatagaactatgaccattcacaacggaatgtttttttctacctatgatcgggataatgacggttggctgacatcggatccccggaagcaatgctctaaggaagatggcggcggttggtggtataaccgatgtcatgcggccaacccgaatggacgttactactggggtggtcagtacacctgggatatggcaaagcatgggaccgacgacggcgttgtgtggatgaattggaaaggttcgtggtattcaatgcgaaagatgtcaatgaagattcgcccgttcttccctcagcag

SEQ ID NO: 11234 - DNA, 1473 bp, synthetic construct
  misc_feature 1..1473: note = source = /note="Description of Artificial Sequence: Synthetic coding sequence"
  source 1..1473: mol_type = other DNA
atgaaacggatggtgtcctggagcttccataagctgaaaactatgaagcacctcctgcttctgctgctgtgcgtgttccttgtgaagtcccaaggcgtgaatgacaatgaggaaggattcttctccgcacggggacatagaccactcgacaagaaacgagaagaggccccatccctgcgccctgcaccgcctcctatctccggtgggggatacagagccagacctgcgaaggcagcggccacccagaaaaaggtggagagaaaagctcccgacgccgggggatgcctgcatgctgatcctgatctgggtgtgctgtgtccaaccgggtgtcagctccaggaggcgctgcttcagcaggaacgccctattcgtaactcggtggacgaacttaacaataatgtggaagcagtttcacagacctcgtcgtcctcgtttcagtacatgtaccttctcaaagacctttggcagaaaagacagaagcaggtcaaggataacgagaacgtggtgaacgaatactcgagcgaacttgaaaagcaccaattgtacatcgacgaaaccgtgaactccaacattcccactaacttgagagtgctgcgttcgattcttgaaaatcttcgctccaagattcagaagctcgagtcggatgtgagtgcccaaatggaatactgtcgcacgccctgcactgtgtcgtgcaatattcctgtggtgtcaggaaaggaatgtgaagagattattcgaaagggcggtgaaacctctgaaatgtacctgatccagcctgattcgtccgtgaaaccttacagggtctactgcgacatgaacactgagaacggaggatggactgtcattcagaatcggcaagacggtagcgtggattttggccgcaaatgggacccttacaaacaaggtttcggtaacgttgcaacgaatactgacggaaagaactactgtggacttcctggtgaatactggttgggcaacgataagatttcgcagctgacccgaatgggccccaccgaacttctcattgaaatggaagattggaagggtgacaaggttaaggcacactacggaggttttaccgttcaaaatgaagccaacaaataccaaatttcggtcaacaagtatagaggtaccgcggggaacgccttgatggacggagcatcccaacttatgggcgaaaatagaacgatgaccattcacaatggcatgtttttctcaacttatgacagggataatgatggatggctcacctcggatcctaggaagcaatgttccaaggaggacggtggtgggtggtggtacaacagatgtcatgcagctaaccctaacggcaggtactactggggtgggcaatacacttgggatatggcaaagcacggaactgatgatggagtggtgtggatgaactggaagggctcctggtactcgatgagaaagatgtccatgaagatcaggccgttttttcctcagcaa

SEQ ID NO: 11235 - DNA, 1473 bp, synthetic construct
  misc_feature 1..1473: note = source = /note="Description of Artificial Sequence: Synthetic coding sequence"
  source 1..1473: mol_type = other DNA
atgaagcggatggtgtcatggtcctttcacaaacttaagactatgaaacatctcctgcttctcctcctctgtgttttcctcgtgaaatcccagggtgtcaacgataacgaggaaggatttttctcagcgaggggacaccggccgctcgataagaagcgggaggaagctccgtcccttcgcccggctccaccaccaatctcgggcggcggataccgggcccgcccggcgaaggcagccgcaacccagaagaaggtcgaaaggaaggccccagacgctggtggctgcctgcacgctgatcctgacctcggggtgctctgccccacgggttgccaactgcaggaggcgctgttgcaacaagaacgcccaatccgcaactcagtggatgagctgaacaataacgtcgaggctgtcagccaaacttcctcgagctcattccagtacatgtacctgctcaaagacctgtggcagaagcggcagaagcaggtcaaggacaacgagaatgtcgtgaacgaatactcttccgaacttgagaagcaccaactttacatcgacgaaactgtgaactcaaacatccctacgaatctgcgcgtgctgcgctccatcctggagaacttgcgctcaaagatccaaaaactggaatcagacgtgagcgcacagatggaatactgccgcactccgtgcaccgtcagctgcaatatcccagtggtgtcaggtaaggagtgtgaggaaatcattaggaagggtggcgaaactagcgaaatgtaccttatccagcctgatagctcagtgaaaccgtacagagtgtactgcgacatgaatactgaaaacggaggatggaccgtcatccaaaaccgccaggatggatcggtggacttcggtcggaagtgggacccatacaagcagggattcggcaatgtcgcgaccaacactgacggcaagaactactgcggactgccgggagagtattggttgggtaacgacaaaatcagccagctgactcgcatgggcccaactgaattgctgatcgaaatggaggactggaagggtgataaagtcaaggcgcactatgggggatttaccgtccagaatgaggcgaataagtatcagatctccgtcaataagtacagaggtaccgccggaaacgccctgatggatggagcctcccagctcatgggtgagaataggaccatgaccatccacaatgggatgttcttctctacctacgacagggacaacgacggatggctgacttccgatccccggaagcagtgttccaaggaggacggaggcggatggtggtataacagatgccatgcagccaacccaaacggccgctactactggggaggacaatacacgtgggatatggccaagcatggaaccgatgacggtgtcgtgtggatgaactggaaaggatcgtggtactccatgaggaaaatgtcaatgaagatccggccgttctttccgcaacaa

SEQ ID NO: 11236 - DNA, 1473 bp, synthetic construct
  misc_feature 1..1473: note = source = /note="Description of Artificial Sequence: Synthetic coding sequence"
  source 1..1473: mol_type = other DNA
atgaagcggatggtgtcatggagtttccacaagctaaagacgatgaagcatctcctgttattgctgttgtgcgtctttctggtcaagagccagggggtgaatgacaacgaggaggggttttttagcgcgagaggtcacaggcccctggataaaaaacgcgaggaagccccctctctgaggccggcccccccaccaatcagcggcgggggctatagggctaggcccgccaaggccgcggctacccagaagaaagttgaacgcaaagctcccgacgctggcggatgccttcatgccgacccggacctgggggtactgtgtccaacgggctgtcagttacaggaggccctgctccagcaggagaggcccattagaaatagcgtcgacgaattaaacaacaatgttgaagccgtgagccagaccagtagtagtagcttccagtacatgtatctgctgaaggatctatggcagaagagacagaagcaggtaaaggataacgagaatgtggtcaacgagtatagttcagagctggagaaacatcagctttacattgacgagacagttaattccaatatacccacaaatctgcgagtgcttagatcgatcctcgaaaaccttaggtccaagatccagaagctcgaatccgatgttagcgctcagatggaatactgtagaactccttgcacggttagctgtaatattccagtggtgtcgggcaaggagtgtgaggagatcatcaggaagggtggagagacctccgagatgtacctcatccagcccgactcatctgtgaagccttaccgcgtgtattgcgacatgaacacggaaaacgggggctggaccgtgatccaaaaccggcaggatggctctgtcgactttggccgcaagtgggacccatataagcagggattcggtaacgtcgctactaacacggacggaaagaactattgtgggcttcccggcgaatactggctcggaaatgataagatcagccagctgacacggatggggcctactgaacttctgatcgaaatggaagattggaagggggacaaagtgaaggcccactacggcggttttaccgttcagaatgaagccaacaaataccagatctctgtcaataaatatcgtggaaccgccggaaatgcacttatggatggagcttcacagttaatgggagagaatcgcaccatgactatccacaacggaatgtttttcagcacatacgatcgtgacaacgacgggtggctgacttccgacccccgtaagcagtgcagcaaggaggatgggggtgggtggtggtataaccggtgccatgcagcaaacccaaacggcagatattactgggggggacagtatacctgggatatggctaaacacggaacagacgatggggtagtttggatgaattggaagggtagctggtatagcatgcgcaagatgtccatgaagattcgccctttctttccgcagcaa

SEQ ID NO: 11237 - DNA, 1473 bp, synthetic construct
  misc_feature 1..1473: note = source = /note="Description of Artificial Sequence: Synthetic coding sequence"
  source 1..1473: mol_type = other DNA
atgaaaagaatggtcagttggagctttcacaagctcaagacaatgaagcatctgctcctactgttgctgtgcgtctttttggtgaaatcgcagggtgttaacgataacgaagagggtttcttttctgcccgcgggcacagacccctggataaaaaacgagaggaagcaccatctttacgccctgcccctccacccatcagtggaggtggctatagggcaagacctgctaaagcagctgctacacagaaaaaagtggagagaaaggcacctgacgccggaggctgcctccacgccgaccccgatttgggcgtcctgtgtccaaccggctgccaactgcaagaagctttgctgcagcaggagagacctataaggaactccgttgacgaactcaataacaacgtggaagcagttagccagacgtcctcatcctctttccagtacatgtacctgctcaaggatctctggcagaagagacagaaacaggtgaaagacaacgaaaacgttgtgaatgagtacagctctgagctagaaaagcaccagctgtatattgacgaaacagttaattcaaatattccaacgaatctgagggtgttgcggtcaatcttggagaatctcaggtcgaagatacaaaagctggaatctgatgtaagtgcccaaatggagtactgcagaactccttgcaccgtgtcttgcaatattccagtagtgtccggcaaagagtgcgaggagataattagaaagggcggcgaaacttctgagatgtacctgatccagccggattctagcgtgaagccgtatcgagtctactgtgatatgaacaccgaaaatggtggctggaccgtaatccagaacaggcaggacgggtcagtggatttcgggagaaagtgggacccatacaaacagggatttggcaacgtcgccacgaacaccgacggaaaaaactattgcggcctgccgggcgagtactggctaggaaatgacaaaatttcccagttgacgagaatgggtcccactgagttgctcattgagatggaggattggaagggggacaaagttaaggcacactacggaggatttactgtgcaaaacgaagctaataagtatcagatttcagtgaataaataccgtggtactgctggcaacgctctcatggacggtgcgtcccagctcatgggcgagaatagaacaatgacaatacataatggaatgttcttttccacctacgacagggataatgacggctggttgacttctgatccccgaaagcaatgctctaaagaggatgggggtggctggtggtacaaccgctgccacgccgccaatcctaatggcaggtattactggggcggccaatacacctgggacatggctaagcatggcacagacgacggcgttgtctggatgaactggaaggggtcttggtactccatgcgtaagatgtctatgaagatccggcctttctttcctcagcag

SEQ ID NO: 11238 - DNA, 1473 bp, synthetic construct
  misc_feature 1..1473: note = source = /note="Description of Artificial Sequence: Synthetic coding sequence"
  source 1..1473: mol_type = other DNA
atgaaacgtatggtgtcctggtcattccataagctgaagactatgaaacatttactgttgttgctgttgtgcgtcttcctggttaagtcccagggagtgaatgacaacgaagagggcttcttttctgccaggggccatcgtccactggacaaaaagcgcgaggaggccccctcattaaggcctgcccctccgccaattagtggaggaggatacagagctagaccagctaaagccgcagctacacagaaaaaggtggaacggaaagcacccgatgccggtggttgcctccatgccgatccagaccttggggtactttgcccaacaggatgccagctgcaggaggctctgctgcagcaagaaaggccaatcagaaactctgtggacgagctgaacaataacgtggaggccgtgtcccagacctccagttcatcattccagtacatgtaccttctcaaggatctctggcagaaaaggcaaaagcaggtgaaggataatgagaatgtggttaatgaatatagttccgaactggagaagcaccagctctacattgatgagaccgtgaactctaatattccaaccaatctgcgcgtgcttcgatcaatattggagaatttgaggtctaagattcagaagctggaatcagacgtgtcagctcagatggagtattgcagaaccccctgcaccgtgagctgcaatataccagtggtcagtggaaaggaatgtgaagagattatccgtaaggggggagaaacatctgagatgtatctcatccagccagattcttctgtgaagccatatagggtgtattgcgacatgaataccgaaaacggaggctggactgtaattcagaaccgccaggacggaagcgtggattttggacgaaagtgggacccctacaaacagggcttcgggaacgtcgccacaaatacagatggcaagaactattgtggcctgcccggcgaatactggctgggcaatgataagatttctcagctgacgcggatggggccaacggaactcctaattgagatggaggactggaaaggagataaggtcaaggcacattacggaggcttcaccgttcagaatgaagcaaacaagtaccagatatccgtaaataagtaccgtggtactgccggaaatgcccttatggatggggccagccaactcatgggcgagaatagaaccatgacaattcataacggcatgttctttagcacatatgaccgagacaacgacggctggctcacttctgaccctagaaagcaatgttcgaaggaagatggcgggggttggtggtacaaccggtgtcatgctgccaaccctaacggacgctactattggggtggtcaatacacatgggacatggcgaagcatggaacagacgatggagttgtttggatgaactggaaaggctcttggtattcaatgcgtaagatgagcatgaagattcggccttttttcccccaacag

SEQ ID NO: 11239 - DNA, 1473 bp, synthetic construct
  misc_feature 1..1473: note = source = /note="Description of Artificial Sequence: Synthetic coding sequence"
  source 1..1473: mol_type = other DNA
atgaagagaatggtgtcgtggtcgtttcataagctgaaaactatgaagcatctgcttcttcttctgctgtgcgtgttcttggtcaaatctcagggggtcaacgataacgaggaaggattcttctcagccagaggacacaggcctctcgacaagaagcgggaagaagctccatcactcagaccggcgcccccgcctatctcgggaggaggctacagagcccgcccagcgaaggccgcggcgactcagaagaaggtcgaacggaaggctcctgacgcaggcggatgtttgcacgcagatccggacctgggcgtgctctgcccgactggatgccaactccaagaggccttgctccaacaagaaagaccgatccgcaattcagtggatgagctgaacaataatgttgaggcagtgtcgcaaacttcctcctcgtccttccagtacatgtatcttctgaaggacctgtggcagaagcgccaaaagcaggtcaaggataacgagaacgtggttaacgaatactcatccgaactggaaaagcaccagctgtatatcgacgaaacggtgaattcgaacatcccgaccaatcttagggtgctgcgctcaatcctggagaatctgcgctccaaaatccagaaactggagagcgacgtgtcagcccagatggagtactgtcgcactccttgcaccgtctcatgcaatatcccggtggtttcgggaaaggagtgcgaagaaatcatacggaagggaggagaaactagcgaaatgtacctgatccagcccgatagcagcgtcaagccataccgcgtctactgcgacatgaacactgaaaatggaggatggactgtcattcaaaacaggcaagacggatcggtggattttgggcgcaagtgggacccatacaaacagggcttcggaaatgtggccaccaataccgatggaaaaaactactgcggattgccaggcgaatactggttgggtaatgataagatcagccaactgactcggatgggacccaccgagctgctgatcgagatggaggattggaaaggagacaaggtcaaggcccactacggaggattcaccgtccaaaacgaagctaacaaataccagatcagcgtaaacaagtatcgggggactgccggaaacgctcttatggacggcgcatcacagctgatgggagaaaatcgcactatgactatccataatggaatgttcttttcgacttacgatcgcgataacgacggttggctgacctcggaccctcgcaaacaatgttcaaaggaggacggaggcggatggtggtacaatagatgccacgccgccaaccctaatggtaggtactactggggaggccaatacacctgggacatggcgaaacatgggaccgatgatggggtggtgtggatgaactggaagggatcgtggtactcaatgcggaagatgtcgatgaagattagacctttctttcctcaacaa

SEQ ID NO: 11240 - DNA, 1473 bp, synthetic construct
  misc_feature 1..1473: note = source = /note="Description of Artificial Sequence: Synthetic coding sequence"
  source 1..1473: mol_type = other DNA
atgaaaaggatggtatcttggtcttttcacaaactcaaaacaatgaagcacctccttctgctgctgctgtgtgtattcttagtaaaatctcagggggttaatgacaacgaagaaggatttttctccgcaagaggacacaggccactggataaaaaaagagaggaagccccatctctgcgcccagcccctccccccatttctgggggaggatatagagctcggcccgccaaagctgctgccacacaaaaaaaagtcgagcgcaaggcacccgatgctggggggtgtttacatgccgaccccgacctaggagtcctgtgtcccacagggtgccagctccaggaagcactgctacagcaggaacggcccattcggaatagtgtggatgaattaaataacaacgttgaagctgtcagtcagacttcttcatcatccttccagtatatgtatcttctcaaagacctctggcagaaacgacagaaacaggtgaaagataatgagaatgtggtcaacgaatactcttcagaattggaaaaacaccagctctatatcgatgaaacagtcaattctaatatacccacaaatctacgagtactaaggagtattctcgagaatctcagatcaaaaattcagaagctagaatctgatgtctccgcacagatggaatattgcaggacgccttgtactgtgagttgtaacattcctgtagtgtctgggaaagagtgcgaggagatcatccgaaaagggggagaaacgtcagagatgtacctaatacagccagatagtagtgtgaaaccatatcgcgtgtattgtgatatgaacacagaaaacggaggatggacagtaatacagaatagacaggacggatcagtggatttcggaaggaaatgggatccttacaaacaggggtttgggaatgtagccacaaacacagacgggaaaaattattgtgggctccctggggaatactggttagggaacgataaaatctcccagctcacacgcatgggaccaactgaattacttatcgaaatggaggattggaaaggggataaggtgaaagctcattatggggggtttacagttcagaacgaagctaacaaatatcagattagtgttaataaatatcggggaactgccgggaatgctctgatggatggggcctcccagctcatgggagagaataggacaatgactatacataatgggatgtttttctccacatatgatagggataacgatggatggcttacatccgatcccaggaaacagtgctcaaaagaagatgggggagggtggtggtacaacaggtgtcacgcagccaaccctaatggacggtattattggggggggcagtatacttgggatatggctaagcatgggacagatgatggagtggtgtggatgaattggaaagggtcgtggtactccatgcgaaaaatgagtatgaaaatacgaccctttttcccccagcaa

SEQ ID NO: 11241 - DNA, 1473 bp, synthetic construct
  misc_feature 1..1473: note = source = /note="Description of Artificial Sequence: Synthetic coding sequence"
  source 1..1473: mol_type = other DNA
atgaaacggatggtatcctggtcatttcacaagttaaaaacaatgaaacatctgttgttactgttactttgtgtgtttttggtaaaatctcagggagtgaacgataatgaggaaggattctttagtgctaggggacaccgcccgcttgataaaaaaagggaagaagctccatcccttcgacctgcccccccacccatctctggagggggatacagggctcggccagccaaagccgcagctacacagaaaaaagtggaaagaaaggccccagatgccgggggatgtctgcacgccgatccagatctcggggtgctgtgtccaacagggtgtcagctccaggaagcattactccagcaggaaagacctataaggaactcagtggatgaactaaataacaacgtggaggctgtgtcccaaacttctagttcttcttttcagtatatgtatcttcttaaagatctatggcagaaacggcagaagcaggtaaaagacaatgaaaatgtggttaatgaatacagttccgaactcgaaaaacatcagttatatatcgatgaaacagtaaactccaacataccaacaaacctgcgggtactccgttctattcttgaaaatttgagaagtaagatccagaaactagaatcagatgtgtctgcccagatggaatactgcaggacaccttgtactgtttcatgtaacatccccgtagtgagtgggaaagagtgtgaggaaattatacggaaagggggggaaacttccgagatgtaccttatacagcctgatagttcagtgaaaccttatagagtgtactgtgatatgaatactgaaaatgggggatggactgtgatccagaatcggcaggatggaagtgtggactttgggcgaaaatgggatccatataaacaggggttcgggaacgttgccacaaatacagatggaaaaaactattgtgggcttcctggagaatattggctgggaaatgataaaatttcccagctcacacgcatggggcccactgagcttcttatagaaatggaagattggaaaggagataaagtgaaagcccactatggggggtttacagttcagaacgaagccaataaatatcagatatcagtgaataaataccggggaactgctggaaatgctttaatggatggggcatctcagcttatgggagaaaataggacgatgactatccacaacggaatgttcttcagtacatacgatcgagataatgatggatggcttacttccgaccctcgcaaacagtgttccaaagaggatgggggaggatggtggtacaaccggtgtcacgccgctaatcccaacgggcgctactattgggggggacagtatacttgggatatggcaaaacatggaacagatgatggagtggtctggatgaattggaaaggatcttggtattctatgcgcaaaatgtccatgaaaattcggcctttttttccccagcaa

SEQ ID NO: 11242 - DNA, 1473 bp, synthetic construct
  misc_feature 1..1473: note = source = /note="Description of Artificial Sequence: Synthetic coding sequence"
  source 1..1473: mol_type = other DNA
atgaagcgaatggtgagctggtcgtttcataagctgaaaactatgaagcacctcctgcttctcctactgtgcgtcttcctagtgaagtcccagggggttaacgataacgaagaaggtttcttctccgcccggggtcataggccactggacaagaaacgcgaagaggccccaagcttgagaccagctcccccacccatttccggaggcggatatcgggccaggcctgccaaggccgcagctacccagaaaaaagtggaacggaaagcccccgacgctgggggttgcctacatgcagacccagatttgggcgtgctgtgcccaacagggtgccagttgcaagaggccctcttgcagcaggaaaggcccatacggaattcagtggacgaactgaacaataacgtggaggcagtcagtcagacatcgtcttcttccttccagtacatgtatctgcttaaggacctgtggcagaaaaggcagaagcaggtcaaggataatgaaaacgtggtcaacgagtactcttccgaactggagaagcaccagctgtatatcgatgaaacagtcaactcaaacatccctaccaacctgcgagtgctgcgttctatcttggagaacctgaggagcaagatccagaagttggagagcgatgtgagtgcccagatggagtactgtagaacaccatgcacggtcagctgcaatatccctgtggttagcggcaaggagtgcgaagaaatcattaggaaggggggggaaacctcagaaatgtacctcatccaacccgactcttccgtcaagccataccgagtctactgtgatatgaacacagaaaatggcggatggaccgtcatccagaataggcaggatggctcggtagactttggtaggaagtgggacccatacaaacagggctttggtaacgtcgccactaataccgatggcaaaaactactgtggcttgcctggggaatattggttggggaacgacaagatttcacaactgacccgcatgggaccaactgaactcctgatcgaaatggaagattggaagggagacaaagtaaaggcccattatggtggatttactgtacagaatgaagcgaacaagtaccagataagcgtgaacaagtacagaggaaccgccgggaatgcactcatggatggggcctcccagctcatgggagaaaaccgcaccatgacaatccacaacggcatgttcttttccacttacgatcgagataacgacggatggctgacttcagatcccagaaaacagtgcagtaaggaagacggcggcggttggtggtataaccggtgccacgccgcgaacccaaacggccgttattactggggtggtcagtacacctgggacatggccaaacacggcactgacgacggcgttgtgtggatgaattggaaagggtcttggtactctatgcgcaagatgtcaatgaaaattcggccttttttcccacagcag

SEQ ID NO: 11243 - DNA, 1473 bp, synthetic construct
  misc_feature 1..1473: note = source = /note="Description of Artificial Sequence: Synthetic coding sequence"
  source 1..1473: mol_type = other DNA
atgaaaagaatggtctcgtggagttttcacaaactcaaaacaatgaaacatttactcctgttattgctgtgtgttttcctcgttaagtcacaaggagtaaatgataacgaagaaggcttcttctccgctagagggcataggccacttgataagaagagagaggaagctccgtctttgcgtcccgcaccaccacccatttcaggtggaggatatcgtgctcgaccggctaaggctgctgcaactcaaaagaaagttgaacgcaaagcacctgatgccggagggtgcttgcacgctgaccctgacctgggagtcctctgtccgactggttgccagctccaggaagcattgcttcaacaggagaggccgattaggaactccgttgatgaattgaacaacaacgtcgaagctgtttcccaaacgtccagctctagttttcagtacatgtatctattgaaagatctttggcaaaagcgtcagaagcaggttaaggacaacgaaaatgtcgtgaatgaatattcctctgaattggaaaaacatcaattgtatattgatgaaacagtcaactcaaatattcctaccaacctaagggtacttcgaagcattttagaaaatcttcgatccaagatacaaaagctagagagcgatgtgagtgcacaaatggagtattgtaggactccctgcacagtatcatgtaatatacctgttgtgagtggtaaagaatgcgaagagattatccgaaaagggggggagacctcagaaatgtatttgatccaaccagatagtagcgttaaaccatatagggtgtactgtgatatgaatactgaaaacgggggatggaccgttatacaaaacagacaggatggctctgtggatttcgggagaaagtgggatccatacaaacagggcttcggaaatgtcgctacaaatacagatggtaagaactactgcggactccctggagagtattggttaggaaacgataaaatctctcagttgaccagaatgggaccgaccgagcttttgattgaaatggaagattggaaaggcgacaaggttaaagcacactatggggggttcacagtgcagaatgaggctaacaagtatcagattagtgtcaataaatacaggggaacagcaggaaacgcattgatggacggggcttcacagttaatgggggaaaatcgtactatgaccattcacaatggtatgttctttagcacctatgacagggataatgatgggtggttgacatctgatccaaggaagcaatgctcaaaggaagacggaggaggctggtggtacaacagatgtcacgctgccaaccccaatggacgttattattgggggggacaatacacttgggatatggctaaacatgggacagatgatggagtagtttggatgaattggaagggctcatggtattcaatgcgaaaaatgtcaatgaagattcgtccatttttccctcagcaa

SEQ ID NO: 11244 - DNA, 1473 bp, synthetic construct
  misc_feature 1..1473: note = source = /note="Description of Artificial Sequence: Synthetic coding sequence"
  source 1..1473: mol_type = other DNA
atgaaaagaatggtttcctggtcgtttcataagctgaaaaccatgaaacatttgctcttgttgcttctgtgtgtctttctggtgaagtcgcaaggagtcaacgataacgaggaaggatttttctcggcaagaggacaccgccctctcgataagaagcgcgaagaggcgccttcactgcggcctgcccctccacctattagcgggggaggttaccgtgcaagacctgcaaaagccgcagctacgcaaaagaaggttgagagaaaagcgcccgatgccggaggatgtctccatgcagatccagaccttggagtgctctgtcccaccggctgccagctgcaggaagcacttcttcagcaagaaagacctattagaaattctgtcgatgaactgaataacaacgtcgaggccgtctcacagacctcaagctcgtcctttcagtacatgtacctcctcaaagacctttggcagaagaggcagaagcaggtcaaggataatgaaaacgtggtcaacgaatactcctcggaactggagaagcaccaactctacatagacgaaaccgtgaactccaatattcccactaatcttcgagtgttgagatcgatcctggagaaccttcgaagcaagattcagaaacttgagtcagatgtttcagcccaaatggagtattgtaggaccccttgcacggtatcatgtaacattcctgtcgtctcgggaaaggagtgtgaagaaatcattcgcaagggaggagaaacctccgagatgtacttgattcaacctgatagctcggtcaagccctaccgcgtgtactgtgatatgaatactgaaaatgggggatggaccgtcatccaaaacagacaagacggcagcgtggattttggtagaaagtgggacccgtacaagcaaggatttggtaacgtcgcgaccaatactgatggtaagaattactgtggcctgccaggagagtactggcttggtaatgataagatttcgcagcttacgcggatgggccctaccgaactccttatcgaaatggaggattggaaaggtgataaggtgaaggcacactacggtggcttcaccgtgcagaatgaagcaaataagtaccaaatttcggtgaacaagtatcgcggtactgctgggaatgcactcatggacggtgcatcgcaacttatgggtgaaaaccggaccatgacgattcataatggcatgtttttcagcacctacgaccgagataacgatggatggctgacctccgacccaagaaaacagtgctcgaaggaggatggcggaggatggtggtacaacagatgtcatgcagccaatccaaacggtagatactactggggaggccagtacacttgggatatggcgaaacatggaactgacgatggagtcgtgtggatgaattggaagggctcctggtacagcatgcgcaagatgtcaatgaagattcgacccttcttcccacagcaa

SEQ ID NO: 11245 - DNA, 1473 bp, synthetic construct
  misc_feature 1..1473: note = source = /note="Description of Artificial Sequence: Synthetic coding sequence"
  source 1..1473: mol_type = other DNA
atgaaacgtatggtttcgtggtcgttccataaactgaaaaccatgaagcaccttctcctccttcttctttgcgtatttctcgttaaatcgcaaggcgtgaacgataatgaggaaggtttctttagcgcacggggtcaccgacctctcgacaaaaagcgagaagaagccccctccctgaggccagcacctcctccaatctctgggggagggtacagagcgcggcccgcgaaggcagcagctacccaaaagaaggtggaacgcaaggctccagatgcaggaggctgtctccatgcagacccagacctgggtgtgctttgcccaaccggatgtcagctgcaggaagcgcttctgcaacaagaaagacctattcggaactcggtcgatgaacttaacaataatgtcgaggccgtgtcccagacttcatcatcatccttccagtacatgtatctgctgaaagatctctggcagaagaggcaaaagcaggtgaaggataacgagaacgtggtgaatgagtattcgtccgaactcgaaaagcaccaactgtatattgacgaaactgttaactccaacatcccaacgaacctgcgggtgcttagatcaatcctggagaaccttagaagcaaaattcaaaagctcgaatcggacgtgtcagcgcagatggaatactgcagaaccccttgtaccgtctcgtgtaatatccctgtcgtgtccggaaaggaatgtgaagagatcattagaaagggaggggaaaccagcgaaatgtaccttattcaacccgatagctccgtgaaaccttaccgagtctactgcgacatgaacaccgagaacggaggttggaccgtgattcaaaataggcaagatggttctgtcgatttcggtcgcaagtgggatccatacaaacaaggatttgggaacgtggccactaatacggatggaaagaactattgtggtctgccaggagagtactggcttggaaatgacaagataagtcagcttactagaatgggcccaaccgagctgcttattgaaatggaggattggaagggagataaggtgaaggcacattatggagggtttaccgtgcaaaatgaagcaaacaaataccaaatatcggtgaacaaataccgggggacggcaggaaatgcactgatggatggggccagccagctcatgggggagaacagaactatgaccattcataatgggatgtttttctccacttacgaccgcgataacgacggttggttgacttccgacccgcgaaaacagtgttcgaaggaagatggaggggggtggtggtacaacagatgtcatgcagctaaccctaacggccggtactactggggtggccagtacacttgggacatggccaaacacggcactgatgatggtgtcgtgtggatgaattggaaaggcagttggtactcgatgagaaagatgagtatgaaaatcaggccttttttcccccagcag

SEQ ID NO: 11246 - DNA, 1473 bp, synthetic construct
  misc_feature 1..1473: note = source = /note="Description of Artificial Sequence: Synthetic coding sequence"
  source 1..1473: mol_type = other DNA
atgaagcgcatggtgtcatggtcgttccataagctgaagacgatgaagcacctgctgttactattgctttgcgtgttcctggttaagtcccaaggcgtaaatgataatgaagagggcttcttcagtgctaggggccaccgaccgttggacaagaagcgtgaagaggctccaagcttgaggccggccccgccgccgatcagtggcggcggctatcgggcccgaccggctaaagcggccgcaactcagaagaaagtcgaacgtaaggccccggacgctggcggctgcctgcacgcagaccccgacttgggagtgctatgcccgacaggatgtcagctgcaagaggcgctgcttcagcaagaacgtccgatacgcaatagtgttgacgaattgaataacaatgtcgaagccgtcagccaaacctcttcctcttcctttcagtacatgtacctgctgaaagatctctggcaaaaaaggcagaagcaggttaaggacaatgagaatgtggttaatgagtatagttcggagctggaaaagcatcaattgtacatagacgagacagtaaacagcaacatacccacaaacctacgcgtgttgcgatctatattggagaatttgcgttcgaagatacagaagttggaaagcgatgtgtctgctcagatggagtattgtcgcacgccctgcacagtaagctgcaatataccggtcgtttcgggaaaggagtgtgaagagatcattcgtaaaggcggagaaacgagcgagatgtacctgatccagcccgacagtagcgttaaaccatatcgcgtgtactgcgacatgaacacagagaatggaggctggaccgtgatccaaaatcgtcaggacggaagtgtcgatttcggccgtaaatgggacccctacaagcagggcttcggcaatgtagccaccaacacggacggaaagaactactgcggtctaccgggcgaatactggctgggcaacgataagatctcacaactcacccggatggggccaacagagctactcatcgagatggaagactggaagggtgataaggttaaagctcattatggtggcttcacagtccaaaacgaggctaacaagtaccagatttcagtaaacaagtatcgaggtacagccggtaacgccttaatggatggcgcgagtcagctgatgggcgagaaccgaacgatgacaattcacaatggaatgttctttagcacctatgacagagataacgacggctggttaaccagcgacccgcgtaagcagtgctctaaggaagatggaggtggatggtggtataaccgctgccacgcggctaatcctaatggacggtattactggggcggacagtatacatgggatatggcgaagcacggtacggatgacggtgttgtttggatgaattggaagggaagctggtactcgatgaggaagatgagcatgaagatccggccctttttcccacagcag

SEQ ID NO: 11247 - DNA, 1473 bp, synthetic construct
  misc_feature 1..1473: note = source = /note="Description of Artificial Sequence: Synthetic coding sequence"
  source 1..1473: mol_type = other DNA
atgaagcgcatggtgtcttggtccttccacaaactaaagaccatgaagcaccttctgctcttgttgctgtgcgtgttcttagttaagagccagggagtaaatgataatgaagagggattcttcagcgctaggggccaccggcccctggataagaagagagaggaggcgcccagcctgaggccggcgccacccccaatttctggtggggggtaccgtgcacgcccagctaaagccgccgcgacccagaaaaaggtggagaggaaggctcccgatgccggtggttgtctacacgctgatcccgacctgggtgtactctgcccaacaggttgtcagctgcaggaagctttacttcaacaggaaaggcctatacgcaacagcgttgacgagcttaataataacgttgaggccgtgagccagacctcctcaagttccttccaatacatgtacctgctgaaggacctgtggcaaaaaaggcagaagcaggtgaaagacaacgagaacgttgttaatgaatactcctctgaactggagaagcatcagctgtacatcgatgagacggtaaactccaacattcctactaacctccgcgtactccgctctattctggaaaacctgaggtcaaagattcagaagctcgaaagtgatgtcagtgctcagatggaatattgtcgaacgccttgtacagtgtcatgcaacatacccgtggtgtccggcaaagaatgcgaggagattattcgcaagggcggagagacatctgaaatgtacttaatccagccggattcctcggtgaagccatacagggtctattgtgacatgaacactgagaacggggggtggacagttatccagaatcggcaggatggctccgtcgacttcggtaggaagtgggatccctacaaacaaggcttcggaaatgtcgccacaaacactgatggaaagaattactgtggcctccccggcgagtactggctgggcaatgacaagatatcccagctcacgaggatgggtcctaccgaactgctgatcgagatggaggactggaagggggacaaagtcaaggcccactacggaggatttaccgtccagaacgaagctaacaagtaccagataagtgttaataagtatcgcggcacggccggaaacgcattgatggacggagcgtcacagctgatgggggaaaaccgtacaatgactattcataacgggatgttctttagcacctatgacagggataacgatggatggctgacttctgaccctaggaagcagtgcagcaaggaagacggaggcggctggtggtacaatcgctgccacgccgccaatccaaacgggaggtactactggggaggccagtacacctgggatatggcaaaacacgggaccgatgatggagtagtgtggatgaattggaaaggaagttggtattcaatgaggaagatgagcatgaagataagaccattttttccccagcaa

SEQ ID NO: 11248 - DNA, 1473 bp, synthetic construct
  misc_feature 1..1473: note = source = /note="Description of Artificial Sequence: Synthetic coding sequence"
  source 1..1473: mol_type = other DNA
atgaaacgcatggtcagctggagcttccataaactgaaaaccatgaaacacctccttttgctgctgctttgtgtatttctggtgaaaagtcagggagtcaatgataacgaggagggctttttctccgccagaggtcaccggcctctggacaaaaagcgcgaggaggccccgagtctgcggcccgccccccctccaatatcaggggggggctatcgcgccagacccgccaaggccgcagctacccaaaaaaaagtcgagcggaaagctcccgacgccggcggatgtttgcacgcagacccagaccttggcgtgctgtgtcctacaggatgtcaactccaggaagccctgcttcagcaggagcggcccattcggaactctgtggatgaactcaacaacaatgtggaagccgtgtctcagacatcatccagcagcttccagtacatgtatctgctgaaggatttgtggcagaagcgccaaaaacaggtgaaagacaacgagaatgtggttaatgaatactcaagcgaactcgagaaacatcagctgtacatcgatgagactgttaattctaacatcccaacaaacctcagagttctgagaagtatactggaaaacttgaggtcaaagattcagaaactcgaatcagacgtatctgcacagatggaatactgccggacgccttgtacagtttcatgcaatatccccgtcgtgagcggtaaggagtgtgaggagatcattcgcaaaggaggtgaaacgtccgagatgtacctgatccaacccgattcttctgtgaaaccttaccgcgtgtactgtgatatgaataccgagaatggcggctggacagtgattcagaaccggcaggacggaagcgtggatttcggacggaagtgggatccctacaaacaggggtttggaaatgtcgccacgaataccgatgggaagaactactgcggtctgcctggcgagtattggttgggtaatgataagatcagtcagttgaccaggatgggccctacagaactgttgatcgaaatggaagactggaagggcgataaggtcaaggctcactacggtggctttacagtgcagaacgaggccaataagtatcagatttcagtaaataagtaccgaggaactgccggaaatgcactgatggacggcgctagccaactgatgggagagaaccggaccatgacgattcataatggaatgttctttagcacatatgaccgggacaacgatggctggttgaccagtgatcctaggaagcagtgttcaaaagaggatggcggcggctggtggtacaatcggtgtcacgctgctaacccgaatggaaggtattattggggaggccaatatacttgggacatggctaagcatggtactgatgacggcgtcgtctggatgaattggaaggggtcctggtactccatgagaaagatgagtatgaagattagaccgttttttccccaacaa

SEQ ID NO: 11249 - DNA, 1473 bp, synthetic construct
  misc_feature 1..1473: note = source = /note="Description of Artificial Sequence: Synthetic coding sequence"
  source 1..1473: mol_type = other DNA
atgaagaggatggtgtcttggtcatttcacaaactgaagacaatgaagcacctgctgctgctgcttctgtgcgtgtttttggtcaagtctcagggcgtgaacgacaatgaggagggcttctttagtgcgcggggtcacaggccactggacaagaaacgcgaagaggcgccaagtttgagaccggcaccaccgccaatatccggtggaggatatagggcccggccagccaaagccgccgctacccagaaaaaggtagagagaaaagcccccgacgcaggtggatgtctccatgcagacccggatcttggcgtgctgtgccccactggatgccaactccaggaggccctgctccagcaagagaggccaatcaggaactcagtggatgagctgaataataacgtggaggcagtctctcagacctcaagttcctctttccagtacatgtatctgctcaaggacctgtggcagaagcgacagaaacaggtgaaggataatgaaaacgtggttaatgaatattcctccgaactggagaagcaccagctgtacatcgacgagactgtgaactccaacatccctacaaacctccgggtattgagatctatcctcgagaatctgcgctcaaaaattcagaaactggagtccgacgtttccgctcagatggagtattgcagaaccccctgcacggtgtcttgtaacattcctgtggtctctgggaaagagtgcgaagaaattatcaggaaaggaggagagacaagtgaaatgtatctcattcagcctgatagctccgtcaaaccttatagggtatactgtgatatgaatactgaaaatggaggctggaccgtgatccaaaatcgccaggacggctcagtcgacttcggtcggaaatgggatccatacaaacagggctttggaaacgtggcaacaaataccgacggaaagaattactgcggcctgcccggggaatactggctgggtaatgataaaatctcccagctgacacggatgggcccaactgagctccttattgaaatggaagattggaaaggagacaaggtgaaggcacactatggtgggttcacagttcaaaacgaggcaaacaagtaccagattagtgtgaacaaatataggggcaccgctgggaatgctctgatggacggggcaagtcagctgatgggtgagaataggacgatgaccattcacaatggcatgttcttctcaacctatgatcgggacaacgatggctggctgacttctgatcctaggaagcagtgctctaaggaggatgggggagggtggtggtacaaccgctgccacgcagccaacccaaatgggcggtattactggggcggccagtatacttgggatatggccaaacacggtacggacgatggcgtggtctggatgaattggaaggggtcctggtattctatgcgcaaaatgtccatgaagatccggccctttttcccgcagcaa

SEQ ID NO: 11250 - DNA, 1473 bp, synthetic construct
  misc_feature 1..1473: note = source = /note="Description of Artificial Sequence: Synthetic coding sequence"
  source 1..1473: mol_type = other DNA
atgaaaaggatggtgagttggtcttttcataaactgaagactatgaagcatcttctgctgctgctactttgtgtgtttttggtcaaatctcagggagttaacgacaacgaggagggcttcttctccgcacgtgggcacagacctctggacaagaagcgtgaggaggcgccaagtctgcggcccgctccccctcccatatcaggaggcggataccgggctaggcccgccaaagctgccgctacacagaagaaggtggagaggaaggctccagacgcaggagggtgcctgcacgccgaccccgaccttggggtgctttgtcccaccgggtgccagcttcaagaagcattgctccagcaggaaagaccaataaggaacagcgtggatgagctgaataataacgtggaggcagtaagtcaaacatcttctagctcatttcaatacatgtacctgctgaaggatctctggcagaaaaggcaaaaacaagtcaaggataacgaaaatgtagtgaacgaatacagctccgagctggagaagcatcagctatacatcgatgaaaccgtcaattctaacatacccacaaacctccgggtgctccgcagcatcctcgaaaacctgaggagcaaaatccaaaaactggagtcagacgtatcagcacagatggaatattgtcgcacgccttgcactgtgagctgcaacattccggtggttagcggaaaagagtgcgaagagataatccggaaagggggtgagaccagcgaaatgtacctgatccagccagacagttctgtcaaaccctaccgggtgtactgcgacatgaatacagaaaacggaggatggacagtcatccagaacagacaagatggatccgtggacttcgggcgcaaatgggatccttataaacagggattcgggaacgtcgcgacaaacactgatggaaagaactattgcggtctgcccggagagtactggctgggaaatgataagatcagtcagctgaccaggatgggacctactgaattactgatcgaaatggaagattggaagggtgataaagtaaaggcacactacggcggctttacagtgcagaacgaggcaaacaaataccagatcagcgtgaacaagtacagaggaaccgccggcaacgctcttatggatggcgcgagccaactgatgggagagaaccgcaccatgaccatccacaacggaatgttctttagtacatacgatagggataacgacggctggctgacaagcgatcctaggaagcagtgctcaaaggaggacggcggaggctggtggtacaacaggtgccacgcggcaaacccaaatggaaggtactactgggggggccaatatacttgggacatggccaagcacgggacagacgatggcgtcgtgtggatgaattggaagggttcatggtactctatgaggaagatgagcatgaaaattcggccgttttttcctcagcaa

SEQ ID NO: 11251 - DNA, 1473 bp, synthetic construct
  misc_feature 1..1473: note = source = /note="Description of Artificial Sequence: Synthetic coding sequence"
  source 1..1473: mol_type = other DNA
atgaaacgaatggtttcgtggtcgtttcataaactaaaaacgatgaaacatctactattactattattatgtgtatttctagtaaaatcgcaaggtgttaatgataatgaagaaggttttttttcggcgcgtggtcatcgtccgttagataaaaaacgagaagaagcgccgtcgttacgaccggcgccgccgccgatatcgggtggtggttatcgtgcgcgtccggcgaaagcggcggcgacgcaaaaaaaagtagaacgtaaagcgccggatgcgggtggttgtttacatgcggatccggatttaggtgtactatgtccgacgggttgtcaattacaagaagcgctactacaacaagaacgaccgatacgaaattcggttgatgaattaaataataatgtagaagcggtatcgcaaacgtcgtcgtcgtcgtttcaatatatgtatctactaaaagatctatggcaaaaacgtcaaaaacaagtaaaagataatgaaaatgttgttaatgaatattcgtcggaactagaaaaacatcaattatatatagatgaaacggtaaattcgaatataccgacgaatttacgtgtactacgatcgatattagaaaatttacgatcgaaaatacaaaaactagaatcggatgtttcggcgcaaatggaatattgtcgtacgccgtgtacggtatcgtgtaatataccggtagtatcgggtaaagaatgtgaagaaataatacgaaaaggtggtgaaacgtcggaaatgtatctaatacaaccggattcgtcggttaaaccgtatcgagtatattgtgatatgaatacggaaaatggtggttggacggttatacaaaatcgtcaagatggttcggttgattttggtcgtaaatgggatccgtataaacaaggttttggtaatgttgcgacgaatacggatggtaaaaattattgtggtctaccgggtgaatattggctaggtaatgataaaatatcgcaactaacgcgtatgggtccgacggaactattaatagaaatggaagattggaaaggtgataaagttaaagcgcattatggtggttttacggtacaaaatgaagcgaataaatatcaaatatcggttaataaatatcgtggtacggcgggtaatgcgttaatggatggtgcgtcgcaattaatgggtgaaaatcgtacgatgacgatacataatggtatgtttttttcgacgtatgatcgtgataatgatggttggttaacgtcggatccgcgtaaacaatgttcgaaagaagatggtggtggttggtggtataatcgatgtcatgcggcgaatccgaatggtcgatattattggggtggtcaatatacgtgggatatggcgaaacatggtacggatgatggtgttgtatggatgaattggaaaggttcgtggtattcgatgcgaaaaatgtcgatgaaaatacgtccgttttttccgcaacaa

SEQ ID NO: 11252 - DNA, 1473 bp, synthetic construct
  misc_feature 1..1473: note = source = /note="Description of Artificial Sequence: Synthetic coding sequence"
  source 1..1473: mol_type = other DNA
atgaagcgcatggtttcgtggtctttccacaagttgaaaaccatgaaacacttgctcctcctgttgctgtgcgtctttctggtcaagagccagggggttaacgataatgaggaaggcttcttttcagccaggggccaccgtcccttggacaaaaagcgggaggaggctccaagcttgcgcccggctccgcctccgatttcaggtgggggatatcgtgctcgcccagcgaaggctgcagcaacccagaagaaagttgagcgcaaggcacctgatgccggagggtgtttacacgcagatcccgacctgggcgttctgtgtccaactggttgccagctccaggaggcactactgcaacaagagcgccccattcggaactcagtcgatgaactcaacaacaacgtggaagctgtttcacaaacttcatcatcctcttttcagtacatgtacctgctgaaggatttatggcagaaacgacagaagcaggtgaaggacaatgagaatgtcgtgaatgagtattccagtgagttggaaaagcatcagttatacattgacgaaacagttaacagtaacatcccgaccaacctgagggtcctgcgcagcatcctcgagaacttgcggtcaaagattcagaagctcgaatccgacgtgagtgcccagatggagtattgtcggaccccgtgtacagtgagctgcaacattcccgttgtctccggcaaagaatgtgaggaaatcatacggaaaggaggtgagacctccgaaatgtatctgatacagccagattcctccgtgaagccttatagggtttattgcgacatgaacaccgaaaatggagggtggaccgtcatacagaacagacaggatggttccgtggattttggaaggaagtgggatccgtataaacagggattcgggaacgtggctaccaacaccgacggaaagaactattgcggactcccgggcgaatactggctgggtaatgataaaatatctcagctcaccaggatggggccaactgagctgctgattgaaatggaagattggaaaggcgacaaagtcaaagctcattacggtggcttcacagtccaaaatgaagccaataagtatcaaatttctgtgaacaaataccgaggcacagctggcaacgctctgatggacggtgctagccaacttatgggtgagaatcgcaccatgacaatccataatggcatgttcttttctacctacgaccgggataatgacgggtggctgacttccgatccacgaaagcagtgtagcaaagaggacggcggtggatggtggtacaatcgttgtcatgctgccaaccctaacggccgatactactggggaggacaatatacctgggacatggccaagcatggaactgatgatggagtggtctggatgaactggaaggggtcctggtatagtatgcggaagatgagtatgaaaattcgtccattctttccacagcag

SEQ ID NO: 11253 - DNA, 1473 bp, synthetic construct
  misc_feature 1..1473: note = source = /note="Description of Artificial Sequence: Synthetic coding sequence"
  source 1..1473: mol_type = other DNA
atgaagcgcatggtgtcatggtcatttcataagctgaaaaccatgaaacacctgctgctcctcctgctctgcgtctttctggtcaaatcccagggagtcaacgacaatgaggaaggattcttcagcgcccgcggccacagaccgctggacaaaaagcgcgaggaggcgccaagcctgcggcctgctccaccgccgatctcaggtggcgggtaccgagcccgcccggctaaggccgccgctacccagaagaaagtggagcggaaggcgcctgatgccggaggatgcctgcatgcagacccggacctgggggtgctgtgtcccaccggatgtcagctgcaggaggcactgctgcagcaagagcgtcctatccggaattccgtggacgaattgaataacaacgtcgaggcagtgagccagacttcgtcctcctcttttcagtacatgtatttgcttaaggacctgtggcagaagcgccaaaaacaggtgaaggataatgaaaacgtcgtgaatgaatactcctccgaactggagaaacaccagctctacattgatgagactgtcaactctaacattccaaccaacctgagggtgctgcgctcaatcctggaaaacctgcggagtaaaatccaaaagttggaatcagatgtctcggcacaaatggagtactgtcggactccatgcaccgtgagttgcaatatccccgtcgtgtcgggaaaggaatgcgaagaaatcatcaggaaaggcggcgaaacttcagagatgtacttgatccaaccagacagctcagtcaagccgtatagagtgtactgcgacatgaacacggagaatggggggtggactgtcatccagaatcggcaagacggaagcgtggactttggaagaaagtgggacccgtacaagcaggggtttgggaatgtcgcgactaacaccgatggcaagaactactgcggcctccccggagaatactggctggggaacgacaaaatctcccagctgaccagaatgggaccaacggagctcctgatcgaaatggaggattggaagggagataaagtgaaagcgcactacggcggatttactgtccagaatgaggcaaacaagtaccaaatctcggtgaataagtaccgcggaaccgcgggcaatgctctgatggatggagcatcacaactgatgggagaaaaccgaactatgactatccacaacgggatgtttttctccacttacgacagggacaacgatggttggctcacctccgacccgcgcaagcagtgtagcaaggaggacggtggagggtggtggtacaatcggtgccatgcggccaacccgaacggtcgctactactggggagggcagtacacctgggatatggccaagcacggaaccgacgacggcgtcgtctggatgaattggaaaggctcgtggtactcgatgaggaagatgtccatgaagatcaggcctttcttccctcaacaa

SEQ ID NO: 11254 - DNA, 1473 bp, synthetic construct
  misc_feature 1..1473: note = source = /note="Description of Artificial Sequence: Synthetic coding sequence"
  source 1..1473: mol_type = other DNA
atgaagcgaatggtgagttggtcctttcataagctgaagacaatgaagcatttgctgctgcttctgctgtgcgtatttcttgttaaatcacagggcgttaacgacaatgaggaaggcttctttagtgccagaggtcaccgccccctggacaagaaacgcgaagaggcgccttctctgcgccccgcaccacctcccatttctggtggaggctaccgggcgagacccgccaaagccgctgcgactcagaaaaaagtcgagcggaaagcccctgatgcaggtgggtgcctgcatgcagatccagatcttggcgtcctttgcccgaccgggtgtcagctgcaggaggcccttctgcagcaggagcggccgatcaggaactccgttgacgagttgaataacaacgtggaggctgtaagccagacatcaagcagcagcttccagtatatgtatctgttaaaggacctgtggcagaagcggcagaagcaagtgaaagacaatgaaaacgtggttaacgaatattcctccgaattggagaaacaccaactgtacatcgatgagacagtcaacagcaacataccgacaaacctgcgggtgctcaggagtatactggaaaatttgcgctcgaagatccagaagttggagtctgatgtgagtgcccagatggagtattgcaggacaccatgcaccgtctcttgcaacattcctgtggtatccggcaaagaatgcgaagagatcattaggaaggggggagaaacttccgagatgtacttaatccagcccgacagctcggtgaaaccctacagagtctactgcgatatgaataccgagaacggcgggtggaccgtgatccagaataggcaggacgggtcagtggatttcgggcgaaagtgggacccctataaacaagggttcggcaacgtggctactaatactgatggaaagaactattgtggtttgcccggcgaatactggctcggaaacgacaaaatctcccagcttactcggatggggcccactgagctgctgatcgaaatggaagattggaagggggacaaagtgaaggcccattacggtggtttcaccgtgcagaacgaggccaacaagtatcagatatccgtgaacaaatataggggaactgcaggcaatgccctgatggacggggcatcacaattaatgggcgagaacagaactatgaccatccacaatggtatgtttttcagtacgtacgatcgcgacaatgatgggtggttgacctctgatcctaggaagcagtgctccaaggaagatggcggcggttggtggtacaatcgctgtcacgcagcaaatcctaacgggaggtattattggggtggccagtatacatgggatatggccaaacacggcactgacgacggggtcgtgtggatgaattggaaaggctcctggtacagcatgcgaaagatgagcatgaagatcagacctttttttccacagcag

SEQ ID NO: 11255 - DNA, 1473 bp, synthetic construct
  misc_feature 1..1473: note = source = /note="Description of Artificial Sequence: Synthetic coding sequence"
  source 1..1473: mol_type = other DNA
atgaagaggatggtgtcgtggtcctttcataaactgaagactatgaagcacctcttactgctgttattgtgcgtgttcctggtgaagtcacagggggtgaatgacaacgaggaggggtttttcagtgcacgtggacatcgcccgctggataagaaaagagaggaagcgccctccctaagacctgccccacccccgatctctggggggggctatcgcgcaagacccgccaaagctgccgccactcaaaagaaggtggaaagaaaggcccctgacgccggcgggtgtctgcatgcggatccagatctaggtgttctctgccccactggttgccagttgcaagaggcattattgcagcaggagcggcctattcgcaacagcgtagatgagctaaacaataatgtggaggctgtgtctcaaacctccagctccagttttcagtatatgtatctcttgaaagacttgtggcagaaacgacagaagcaggtcaaggacaatgagaacgttgtaaacgagtacagttccgagcttgagaaacaccagctctatatcgatgagacagtgaattcaaacatccctactaatctgagagtgctccgttcaattctggagaacttgcgttccaagatccagaagttagagtccgacgtgtctgctcagatggagtactgtcgcaccccgtgtactgtctcatgcaacatccccgtggtgtctggcaaggaatgcgaggagatcatcagaaagggtggggaaactagcgagatgtacctgattcagcctgactctagcgttaagccctaccgcgtgtactgcgatatgaatactgaaaacggcgggtggacagtcattcaaaaccggcaagatggaagtgtggattttggaaggaaatgggacccttataagcaaggattcggcaatgtggcgaccaatacagatgggaaaaactattgcggactgcccggggaatactggctgggcaacgataagatctctcagctcacccgaatgggtcctactgaactactgatagagatggaggactggaagggtgacaaggtgaaggcgcactacggtggattcactgtccagaacgaggcaaataagtatcagatctccgtcaacaaatacagaggtaccgcaggaaacgcactcatggatggagctagccagcttatgggtgaaaacagaaccatgactattcataatgggatgttcttctctacctacgatcgtgataatgatggttggcttactagtgatcccagaaagcaatgttctaaggaagatggtggaggatggtggtacaatcgctgccatgcagctaatcctaacggtagatattactgggggggtcagtacacatgggacatggccaagcatggaacggatgacggcgtggtgtggatgaattggaagggaagctggtacagcatgaggaagatgtcgatgaagattaggccatttttcccccagcaa

SEQ ID NO: 11256 - DNA, 1473 bp, synthetic construct
  misc_feature 1..1473: note = source = /note="Description of Artificial Sequence: Synthetic coding sequence"
  source 1..1473: mol_type = other DNA
atgaagaggatggtgagctggtcgttccacaaactcaaaacgatgaagcacctactactgctcctgctgtgcgtattcctcgttaagtcacagggcgtgaatgacaacgaggaaggtttcttcagcgcaagggggcatcgccctcttgataagaaaagagaggaggcgcctagtctaagacctgccccgcctcccattagcggggggggctaccgggcaagacccgctaaggccgccgcgacgcagaaaaaggtagagcgcaaggcccctgacgctggaggatgtttgcatgccgacccagacttgggtgttttatgcccgactgggtgtcagctccaggaggcattgctacagcaggagcgaccaatacggaacagcgtggacgaactgaataataacgtggaggcagtctctcaaaccagctctagcagctttcagtacatgtacctgctcaaagatctatggcagaagagacagaaacaggtgaaagataatgagaacgttgtaaatgagtattcctcggaactagagaagcaccagttgtatatagatgagaccgtcaactcgaatattcccacaaacctgagagtgctgcggtcgatcctggagaatcttcgttctaagatccaaaaactagaatcagacgtcagcgctcagatggaatactgcagaacgccctgtaccgtcagttgcaacatacccgtggtttctgggaaggaatgcgaagaaattatccgaaaaggcggcgagacttcagaaatgtatctgatacagcctgacagttccgtgaaaccataccgagtgtactgcgatatgaacacagaaaatggtggctggaccgtcatccagaatcgccaagacggaagcgtggatttcggccgaaagtgggatccctataaacaaggcttcggcaatgtggccacaaatacggacggcaaaaattactgcggactgcccggcgagtattggctgggaaacgataagattagtcagctgactcgtatggggccaaccgaactcctgatcgagatggaggactggaagggcgataaagtgaaggcacattatggcggctttaccgtgcagaacgaggctaacaagtaccagatctccgtgaataaataccggggaactgcgggaaacgctctaatggatggcgcatctcagcttatgggagagaatcggacaatgacaatccacaatggaatgttcttctcaacatatgatcgggacaatgatgggtggttgaccagtgatcctaggaaacaatgctcaaaggaagacggaggtgggtggtggtataacagatgccacgccgctaaccctaacggtcggtattactgggggggccaatatacatgggacatggccaagcatggcactgatgatggggtggtctggatgaactggaaaggctcttggtactcgatgcgcaagatgtccatgaagattagaccattctttccgcagcag

SEQ ID NO: 11257 - DNA, 1473 bp, synthetic construct
  misc_feature 1..1473: note = source = /note="Description of Artificial Sequence: Synthetic coding sequence"
  source 1..1473: mol_type = other DNA
atgaagaggatggtgagttggagcttccacaaactgaaaacaatgaaacacctgctcctactactcttgtgcgtcttcctcgtcaaatctcagggggtaaacgacaacgaagaaggttttttttctgcccgcggacaccgccctctggataagaagcgagaagaagcaccaagcctgcgcccagcccccccacccattagtggcggaggatatagagcccgtcccgctaaagccgctgctacacagaaaaaagtggaaagaaaggccccagacgctgggggatgcctgcatgcagatccagatcttggcgtcctgtgcccaaccggctgtcagctacaggaagccctcttgcagcaagagcggccaatacgcaatagtgtggatgagctaaataataacgtcgaggccgtatcccagacctcgtcctcatcattccaatatatgtacctcctgaaagatctctggcagaagcggcagaagcaagtcaaagataacgagaacgtggtgaacgagtatagttccgaattggagaagcaccaattatatattgacgagaccgtgaactcaaatatccctacaaacctccgggtactgcgctcaattcttgaaaatcttcggtctaagattcagaagttggagtctgatgtatcagcacaaatggaatactgtagaacaccctgtacagtcagttgtaatatccctgtggtaagtggcaaggagtgtgaggaaatcatccgcaaagggggcgaaaccagcgagatgtacctcatccaacccgacagttcagtcaaaccttaccgcgtgtactgcgatatgaacaccgagaatggaggctggaccgtcatccagaatagacaagacggatctgttgacttcggccggaagtgggatccttacaagcaaggcttcggaaacgttgccacaaacaccgacgggaaaaactactgcggccttccgggagagtactggctgggcaacgataagatttcacagctcacccggatgggacccactgagctcttgatcgagatggaagactggaagggtgacaaggtcaaggctcattatggagggttcaccgtgcagaacgaggccaataagtatcagatctccgtgaacaaataccgaggtacggctgggaatgccctgatggatggtgcgtcacaattaatgggagaaaacaggaccatgactattcacaatggaatgttttttagcacgtatgacagagataatgacggttggctcacctccgatcctaggaagcaatgctctaaggaagacgggggaggatggtggtacaaccgatgccacgcagcgaaccccaacggcaggtattactggggaggtcaatatacatgggatatggccaagcacggcactgatgacggggttgtgtggatgaactggaagggaagttggtactctatgagaaagatgagcatgaaaattcggccattctttcctcagcag

SEQ ID NO: 11258 - DNA, 1473 bp, synthetic construct
  misc_feature 1..1473: note = source = /note="Description of Artificial Sequence: Synthetic coding sequence"
  source 1..1473: mol_type = other DNA
atgaaaaggatggtgagctggtcttttcacaagctcaagactatgaagcacctccttctgctcctgctctgtgtgttcctggtgaagagccaaggagtgaatgacaacgaggaaggctttttctccgcacggggccatagacctctggataagaagcgggaagaggcaccaagcctgcgacctgcaccccctccaatctccggcggaggatacagagcacggcctgcaaaagcagcagcaacgcaaaagaaggtggaacgcaaagcaccagatgcgggaggttgtctccacgcagatccggaccttggagtgttgtgcccaaccggttgccaactccaagaagcgctcctccagcaggaaagaccaattaggaattccgtggatgagctgaataacaacgtcgaagccgtctcccaaacttcctcatcatcctttcagtacatgtacctcctgaaagatttgtggcagaagagacaaaaacaggtgaaggataacgagaatgtggtgaatgagtattccagtgaacttgaaaagcatcagctttacattgatgaaaccgtgaattcaaatatcccaactaacctccgtgtgcttcgtagcattctcgaaaaccttcgctcgaagattcagaagctcgaatcagacgtgtccgcccaaatggaatactgccgcaccccttgtaccgtgtcctgtaacatacctgtggtgtccggaaaggagtgcgaggagataatcagaaaaggaggcgaaactagcgagatgtacctgatccagcccgactccagcgtgaaaccatacagagtgtactgtgacatgaataccgaaaacggtggatggactgtgatacagaataggcaagatgggagcgtcgatttcggcaggaaatgggatccatacaagcaaggttttggtaacgtcgctactaacaccgatggtaagaactactgcggactgccaggtgaatactggttggggaatgacaagattagccagcttacgcgtatgggaccaacggaactgctgattgaaatggaggactggaaaggagataaggtgaaggcccattacggaggtttcactgtgcagaacgaggctaataagtaccaaatttcagtgaacaagtacagagggaccgccgggaacgcacttatggatggagcatcacaactgatgggagaaaaccgcactatgactatccataatggcatgttcttctccacctacgatcgcgataatgacggctggctgacttccgacccgcgcaagcagtgttcaaaggaggacggcggtggttggtggtataaccggtgccatgccgccaatcctaatggccgctactactggggcggtcagtacacttgggatatggcaaaacacggaactgacgatggagtggtgtggatgaactggaagggcagctggtactccatgcgtaaaatgtcgatgaagattagaccgttctttcctcaacaa

SEQ ID NO: 11259 - DNA, 1473 bp, synthetic construct
  misc_feature 1..1473: note = source = /note="Description of Artificial Sequence: Synthetic coding sequence"
  source 1..1473: mol_type = other DNA
atgaagcgaatggtgtcttggtccttccacaaactgaaaacaatgaagcaccttctcttgcttttgctctgtgtctttctggtcaagtctcagggagtcaacgacaacgaagaaggcttcttttccgcccgggggcaccggccactcgacaagaaacgagaggaagctccctcattacgaccggcccctccccctatttcaggcggaggctacagggcccgacctgcaaaggcagccgccactcaaaaaaaagttgagcgcaaagcccccgacgcgggcgggtgccttcatgccgacccagatctaggtgtcttgtgccctacagggtgccaacttcaggaagcactgctacaacaggagaggccaatacggaacagcgttgatgagctcaacaacaacgtggaggccgtaagccaaacaagtagttcatctttccagtacatgtatcttctgaaagacttatggcagaagagacagaaacaggtaaaagataacgagaatgtggttaacgagtactcaagtgagctggaaaaacatcagctctatatcgacgagacggtgaactccaacattccaaccaacctgcgagttctgagatcaatcctggagaacctgaggtccaaaattcaaaagcttgagtcagacgtatccgcccaaatggagtattgccgcactccttgtacagtcagttgcaatattcccgtcgtctctggtaaagagtgtgaagaaatcattaggaagggtggggagactagcgagatgtatcttatccagccggatagcagcgtaaagccctacagggtttactgcgacatgaacactgaaaacgggggatggactgtgatccaaaaccgccaggatggtagtgtagactttggtagaaaatgggacccatataagcaaggatttggcaacgtggcaactaataccgatgggaagaattattgcgggctgccaggtgagtattggcttggcaacgacaaaatatcccagctcactcgtatggggcctaccgaactgctgatcgaaatggaggactggaagggagataaggttaaagctcactacggcggttttactgtacagaacgaggcaaataagtaccagatctccgtcaataagtataggggcactgctggtaatgccctgatggatggagctagccaactgatgggtgagaatagaacaatgactattcataacggcatgttcttttccacgtatgaccgagataacgacggatggcttacctcagatccacgaaaacagtgctctaaagaagatgggggagggtggtggtacaaccgatgtcatgctgccaatccaaatgggcgttattattggggaggtcagtatacttgggatatggccaaacacggtaccgatgacggtgtggtgtggatgaattggaaagggtcttggtattccatgaggaaaatgtctatgaaaatccgaccattttttccacagcag

SEQ ID NO: 11260 - DNA, 1473 bp, synthetic construct
  misc_feature 1..1473: note = source = /note="Description of Artificial Sequence: Synthetic coding sequence"
  source 1..1473: mol_type = other DNA
atgaagcgcatggtgtcttggtcttttcacaaattaaagaccatgaagcacctgctgcttctgctcctgtgcgtgtttcttgtaaagtcacagggcgttaacgataatgaagaagggttcttctctgcacggggacatagacccctggataaaaaacgcgaagaggccccatcactaaggcctgccccccccccaatctcaggtggggggtatagggcccgcccggctaaagccgccgccactcagaaaaaagtggagcggaaagcgcccgatgccggaggctgcctgcacgccgatccagacttgggagttctttgtcctaccggatgccagttacaggaggcgctgttacagcaggagcggccgatcagaaactctgtcgatgaattaaacaataacgtggaagctgtgtcacagaccagctctagtagcttccagtacatgtatctgttaaaggacttgtggcagaaaagacaaaagcaggtaaaagataacgagaatgtggtcaatgaatatagttccgagctcgagaagcaccaattgtacatagacgaaactgtgaactccaacattccgacgaacctacgggtccttcgctctatcctggagaacctgagatccaaaatccagaagctggagtcagacgtgtccgcccaaatggaatattgtcggacgccatgtaccgtctcatgcaatattccagtcgtctcaggtaaggaatgtgaggaaattattcgaaaagggggggagacctccgagatgtacctaattcagcctgacagcagcgttaagccataccgcgtctattgtgacatgaataccgaaaacggggggtggacagtgatccagaaccggcaagacgggtctgtcgactttggccgcaaatgggatccctataagcagggctttgggaacgttgctactaacactgacgggaagaattattgtgggctcccaggggagtactggttggggaatgataagatctcgcagcttacacgcatgggcccaactgaactactgatcgaaatggaagattggaagggtgacaaagttaaagcacattatggagggtttacagttcagaacgaggctaataagtaccaaatctccgtgaacaagtacaggggtacggccggtaatgccctcatggatggtgcaagccagttaatgggagagaatagaacgatgacaattcataatggaatgttttttagtacgtatgatagagataatgacggatggctaacttctgatccacgaaaacagtgctctaaggaggacggcgggggttggtggtacaatagatgtcacgcagccaacccgaatgggcgctattactggggcggccagtatacctgggacatggccaagcacggcacagacgacggagtggtctggatgaactggaagggcagctggtacagcatgcgcaaaatgtctatgaagatacgaccatttttcccccagcaa

SEQ ID NO: 11261 - DNA, 1473 bp, synthetic construct
  misc_feature 1..1473: note = source = /note="Description of Artificial Sequence: Synthetic coding sequence"
  source 1..1473: mol_type = other DNA
atgaagagaatggtgagctggagttttcacaagcttaagactatgaagcatctgttgctgttgctgctgtgtgtcttcctggtgaaatcccagggcgtgaacgacaatgaagagggctttttttctgccagaggccacaggcccctggacaagaagcgggaggaggcgccaagcttgcggccagctccaccaccaatctctggggggggctatcgggcaaggccagctaaagccgctgccacccagaaaaaggtggaaagaaaggcaccagacgctggaggatgtcttcacgccgaccctgatcttggcgtgctctgtcctaccgggtgccaacttcaggaggctctgctgcagcaggagcgccccatacgaaacagcgtcgatgagctcaataacaacgtggaggctgtcagccagacatcctcctcctctttccagtacatgtatctgctcaaggatctctggcaaaagcgccagaagcaggtgaaggacaacgaaaatgtcgtgaacgaatattcaagtgagttggagaagcatcaactgtacatagacgaaactgtcaactctaacattccaaccaatctccgggtgctgcgcagtatcctcgagaaccttcggagcaaaatccagaaattggagtctgatgtgagcgcccagatggaatattgcagaaccccatgtactgtcagttgtaatatccccgtcgtgtccgggaaagaatgcgaggagattattaggaaagggggcgagactagtgagatgtacctgatccagcctgatagttccgtcaaaccttacagagtttactgcgacatgaacacggaaaacggcggctggactgtgattcaaaaccggcaggatgggtcagtggatttcggtcgcaagtgggacccctacaagcaaggatttggaaacgtcgctacaaatacggacggaaagaactattgtggtttgcccggcgagtactggctgggcaacgataagatctcacagttgacacggatgggccctactgagctgctcatcgaaatggaagactggaagggcgataaggtgaaagcccactatggagggtttaccgtgcagaacgaagcgaacaagtaccagataagcgtgaataagtacagaggaacagccgggaatgccctgatggatggggcatcccagctgatgggcgagaatagaacaatgacaattcataacggaatgtttttcagtacttatgatcgcgacaacgatggatggctgacgtcagacccccggaaacagtgctccaaagaggatgggggcggctggtggtacaatagatgccatgccgcaaacccaaatgggaggtactactggggggggcagtatacttgggatatggctaaacacggaaccgacgacggagtggtgtggatgaattggaaaggatcctggtacagtatgcgcaaaatgtccatgaagatacgacctttcttccctcagcaa

SEQ ID NO: 11262 - DNA, 1473 bp, synthetic construct
  misc_feature 1..1473: note = source = /note="Description of Artificial Sequence: Synthetic coding sequence"
  source 1..1473: mol_type = other DNA
atgaagagaatggtgtcctggtcattccataaacttaaaacgatgaagcacctcctcctgcttctgctttgtgtctttctggtgaagtcccaaggtgtcaatgacaatgaggaaggttttttctcggccagggggcatcgacctctggataagaagagagaagaagccccgtcactccgacccgctccacctcctatttccgggggaggatacagggcacgccctgccaaggcagcggcaactcagaaaaaggtggaaaggaaggcacctgacgcaggaggttgtctccacgcggatcccgaccttggagtgctttgtcccaccggatgtcaactccaagaagcactcctgcagcaggagcgccctattaggaattcggtggacgaacttaacaataatgtggaggcagtgtctcagacctcctcgtcatcgttccaatacatgtatctcctcaaggatttgtggcaaaagaggcagaaacaggtgaaggataacgaaaacgtcgtgaacgaatacagcagcgagcttgaaaagcaccaattgtacattgatgagactgtgaactcaaacataccaaccaatcttcgagtccttcgctcgattcttgaaaacttgagatcaaagatacaaaaacttgagtccgacgtgagcgcacaaatggaatattgtagaactccatgtactgtgtcgtgcaatattcccgtggtgtccgggaaggaatgcgaagagatcatccggaagggcggagaaacttccgaaatgtacttgattcaaccggattcatcagtgaagccataccgcgtgtactgtgacatgaacaccgagaacggcgggtggactgtgattcaaaaccggcaggatggcagcgtggattttgggcgaaagtgggatccgtataagcaaggctttggtaacgtggcaactaataccgacggtaagaactactgcggattgccaggcgagtactggcttgggaacgataagatctcgcagctcacccggatggggcctaccgagcttctgatcgagatggaggactggaaaggagacaaggtgaaagcccactacggggggtttaccgtgcagaacgaagcaaacaagtaccaaatctcggtcaacaaataccggggcaccgccggaaatgcacttatggatggagcatcgcaacttatgggtgaaaatcgaacgatgaccatccataacggcatgttcttttccacctacgacagggataacgatggttggctgacgtccgatccacgcaaacagtgttccaaggaagatgggggcgggtggtggtacaaccgttgtcatgccgccaatcccaatggccgttactactggggtggtcagtatacttgggacatggccaaacatggaaccgatgatggagtcgtttggatgaattggaagggtagctggtactccatgagaaagatgagcatgaagattcggcctttctttccacagcaa

SEQ ID NO: 11263 - DNA, 1473 bp, synthetic construct
  misc_feature 1..1473: note = source = /note="Description of Artificial Sequence: Synthetic coding sequence"
  source 1..1473: mol_type = other DNA
atgaagaggatggtttcctggtcgtttcataaactgaaaaccatgaagcatcttctgctgcttctcctgtgtgtgttcctcgtgaagagccaaggtgttaatgataacgaagaaggctttttcagcgcaagaggacaccggccccttgataagaaacgcgaggaagcaccctctcttcggcccgccccacccccaatatcaggaggcggttatagggcaaggcccgcaaaggcagccgccacccagaagaaagtggagcgaaaggcacctgatgcaggtggctgtctccacgccgatcctgatctgggagtgctttgtccaaccggttgccaactgcaagaggcactgctccagcaagagcgtcctatcagaaactcagtcgatgaactcaataacaatgtggaagcagtgtcacagacttcgtcatcgtccttccaatacatgtacctgctgaaggatctgtggcaaaaacgccaaaagcaggtgaaggataacgaaaacgtggtgaatgaatactcctcagagctggaaaagcaccaactttacattgacgagactgtgaatagcaatattcctaccaatcttcgcgtccttaggtcaattctggagaatctgcggtcaaaaatccagaaacttgagtccgacgtgtcagctcagatggagtactgtagaaccccatgtactgtgtcctgcaacatacctgtggtatcaggaaaggaatgtgaggaaatcattaggaaggggggtgaaacttctgaaatgtacctgatccaaccggatagctcagttaaaccatacagagtgtactgtgatatgaacaccgagaacggagggtggactgtcatccagaaccggcaagatgggagcgtggattttggacggaaatgggacccatacaagcaaggcttcggtaatgtcgccactaacaccgatggtaagaactactgtggtttgcccggtgaatactggcttggcaacgataagatttcgcaactgacccggatgggacccaccgagctgttgatcgagatggaagattggaagggggataaagtgaaggcgcattacggcggatttaccgtccaaaacgaggcaaacaagtaccaaatttcggtgaacaaataccggggaacggcgggcaatgcacttatggacggtgcatctcagctcatgggagagaaccgcaccatgaccattcataatggcatgttcttcagcacctacgatcgcgataacgatggatggcttactagcgaccctcgtaagcagtgttccaaggaggatgggggcggctggtggtacaacagatgtcacgccgcaaatccaaacggtcggtactactggggtggacaatacacctgggatatggcaaagcatggtactgacgatggagtggtgtggatgaattggaaagggtcctggtacagtatgcgcaagatgtcgatgaaaatcagaccattctttcctcagcag

SEQ ID NO: 11264 - DNA, 1473 bp, synthetic construct
  misc_feature 1..1473: note = source = /note="Description of Artificial Sequence: Synthetic coding sequence"
  source 1..1473: mol_type = other DNA
atgaagcggatggtcagctggtcgtttcacaagctgaaaactatgaaacacctcctgctcctgctgctgtgcgtatttctggtgaagtcccagggagtgaatgataacgaggagggttttttctcggcgcggggccaccggccgctggacaagaagagagaagaagctccaagcctgcggccagccccgccaccgatcagcggaggtggctacagagcgcgccccgctaaagccgccgccacgcagaaaaaggtcgagcgcaaggcgcctgacgcgggtggttgtctgcacgcagatcctgacctgggggtgctgtgtcccaccggctgccagctccaggaagccctcctgcagcaggagcggcctatcagaaatagcgtcgacgaacttaacaacaacgtcgaagcggtgtcacaaacctcctcgtcgtcgttccaatacatgtacttgctgaaggatctgtggcaaaagaggcaaaaacaggtgaaggataacgaaaacgtggtgaatgaatactcgtcagaactggaaaagcaccaactgtatatcgacgaaaccgtgaattcaaacatcccgaccaacctgagggtccttaggagcattcttgagaacctcagaagcaagatccagaagctggagtccgatgtctccgcgcaaatggagtactgtcgcaccccttgcaccgtgtcgtgcaatatcccggtggtgtccgggaaggagtgtgaagagattatacggaaaggcggagagacgtccgagatgtatctgattcaacctgatagctccgtcaagccttaccgcgtgtactgcgatatgaacactgaaaatgggggctggaccgtgatccagaatagacaggacggtagcgtggacttcggacggaagtgggatccatacaaacagggattcggtaatgtggcaactaacactgacggtaagaactactgcggactgcccggcgaatactggctgggtaacgataagatctcgcagttgactagaatgggcccaactgagctgctgattgaaatggaagattggaagggagacaaggtgaaagcccattatggaggatttacggtgcagaatgaggcgaataagtaccagatctctgtcaataagtatagaggaaccgcgggcaacgccctgatggacggcgcgtcccagctcatgggggagaacaggactatgaccatccacaacggtatgttcttcagcacctacgaccgggataacgacggctggctgacctcagacccgcgcaagcagtgctccaaggaagatggaggaggctggtggtacaatagatgccatgcagcaaatccaaacggacgctattactggggaggacaatacacgtgggacatggccaagcacggcacggacgacggagtcgtctggatgaattggaaaggttcatggtactcaatgcgaaagatgtctatgaagatccggccgtttttcccacagcag

SEQ ID NO: 11265 - DNA, 1473 bp, synthetic construct
  misc_feature 1..1473: note = source = /note="Description of Artificial Sequence: Synthetic coding sequence"
  source 1..1473: mol_type = other DNA
atgaagcgcatggtgtcatggtcgttccataagctgaaaaccatgaagcatttgctcctcctgctgctgtgcgtgttcctcgtgaagtcgcaaggagtgaatgacaacgaggagggctttttctcggcccgcggacaccgcccactggacaagaagcgggaagaagccccatcgctgcgcccagcaccgccaccgatcagcggaggaggataccgcgcaagaccagctaaagcggctgccactcagaagaaggtggaacgaaaagcacctgatgcgggaggctgcctgcatgccgacccggatctgggggtgctgtgcccgacgggctgccagctccaggaggcgctcctgcagcaggaaagaccgatccggaattcggtggatgagctcaacaataacgtggaagccgtgagccagacttcatcctcatcatttcagtacatgtacctgctcaaagacttgtggcagaagagacagaagcaggtgaaggacaacgaaaacgtcgtgaatgagtactcctcggagttggaaaagcaccaactctacatcgatgaaactgtcaacagcaacattcctactaatctccgagtcttgcgctcgatcctcgagaacctccggagcaagattcaaaagctggaatccgacgtctcagcacagatggagtactgcagaaccccttgcacggtttcctgcaacatcccggtcgttagcggaaaagaatgcgaagaaatcatccgcaagggcggagaaactagcgagatgtatcttatccaacctgattcttccgtcaaaccctaccgggtgtactgcgacatgaacacggagaacggtggatggaccgtgatccaaaaccgccaggacgggtccgtggatttcggaagaaagtgggacccatacaaacagggatttggaaacgtggcgaccaatactgacggaaagaactactgtggactcccaggcgaatactggttgggaaacgacaaaatctcgcaactgacgcgcatgggaccgacggaacttcttatcgagatggaagattggaaaggggacaaggtgaaagctcactacggaggcttcactgtgcaaaatgaagcgaataagtaccagatctcagtgaacaaataccggggcaccgccggaaatgcactgatggacggggcatcgcaactgatgggagagaatcggaccatgaccattcacaacggcatgttcttttcgacgtacgatcgcgataacgacggatggctgaccagcgatcctcgcaagcagtgctcgaaggaggacggaggcgggtggtggtacaaccgctgtcatgcggcgaatccaaatggaaggtactattggggaggccagtacacctgggacatggcaaagcatggaactgacgatggcgtggtctggatgaactggaagggaagctggtatagcatgcgcaagatgagcatgaaaatcaggccgttctttccgcaacag

SEQ ID NO: 11266 - DNA, 1473 bp, synthetic construct
  misc_feature 1..1473: note = source = /note="Description of Artificial Sequence: Synthetic coding sequence"
  source 1..1473: mol_type = other DNA
atgaagcgcatggtctcctggtcttttcataagcttaaaaccatgaagcacttattgctattgttactttgtgtttttttggtgaagagccagggtgtgaacgataatgaagaggggttcttcagtgcccggggccaccggccacttgataaaaaacgggaagaagccccttccctgcgtcctgcccccccaccaatctctggcggtggatatcgcgcccgacctgctaaagccgccgctacccagaagaaagttgaacggaaggcgcctgacgctggagggtgcctacatgccgatcccgaccttggagtgctttgtcctacagggtgtcagttgcaggaagcactgctccagcaggagcggcccattcgaaactccgtggatgaactcaataataacgtggaagccgtttcccaaacaagcagctcttctttccagtacatgtacctcctgaaggatttatggcagaagcgccagaaacaggttaaggataatgaaaatgtcgttaatgaatattccagtgaactcgagaagcatcagctgtatatagacgaaacagtgaacagcaatatacccaccaacctgcgcgtactgagaagcatactggaaaatctgcggtctaagatccagaagttagaaagtgacgttagcgcacagatggagtactgtcggacaccatgtaccgtatcctgcaatatccctgtcgtatctgggaaggaatgcgaggaaatcatacggaagggtggagagacttccgaaatgtatctgatacagccggactcatcagtgaaaccataccgcgtctactgcgatatgaatacagagaacggcgggtggacagtcatccagaataggcaagacgggtccgtggacttcggcagaaaatgggacccatacaagcagggcttcggcaatgtggctactaacactgacggtaagaactactgtgggctcccaggcgagtattggctcggaaacgacaagatttcccagctgacacggatgggacctactgagttgctcatcgagatggaggattggaagggcgacaaggtcaaagcccattatggaggcttcaccgtgcaaaatgaggccaacaagtaccagattagcgttaataagtatagaggaacagcgggcaatgccttgatggatggcgcttcccaactgatgggggagaatcgtacaatgaccattcataacgggatgtttttcagcacttatgaccgcgacaacgatggatggttgacatccgatcctcggaagcagtgcagtaaggaggacgggggcggatggtggtataatcggtgccatgcagccaacccaaatggccggtattattgggggggtcagtatacttgggatatggcgaagcatggtaccgacgatggggttgtgtggatgaactggaagggctcctggtactctatgcgcaagatgtccatgaagattcggccattctttccccagcag

SEQ ID NO: 11267 - DNA, 1473 bp, synthetic construct
  misc_feature 1..1473: note = source = /note="Description of Artificial Sequence: Synthetic coding sequence"
  source 1..1473: mol_type = other DNA
atgaagagaatggtgtcctggtcattccacaagctgaaaaccatgaaacatctgctcctgctgctattgtgcgtgtttctggttaaatctcagggcgtcaatgataatgaggagggctttttctcagctcgcggccatagacctcttgataagaaacgtgaggaagctccgtccctacgaccagcgcctccaccaatcagtgggggtgggtaccgggctcgtcccgcaaaggccgccgccactcagaagaaggtagagaggaaagccccagacgctggaggttgcctgcacgctgatcctgatcttggcgtcctgtgccccaccggttgccagctgcaggaggctttgctgcaacaggaacgtccaatccgtaattccgtagacgagctgaataacaatgttgaggcagtgtcccaaactagttctagttcctttcagtatatgtatctgctcaaggatctgtggcagaaacgtcaaaagcaggtcaaggataacgagaatgtggtcaatgagtacagtagtgagttggagaagcaccaattatacatagacgaaacagtgaactccaatatccctacaaacctcagagtgctacgaagtatccttgagaatctgcggagtaaaatacaaaagttggagtcagatgtcagcgctcaaatggagtattgtagaacaccatgcacagtttcttgtaatatccctgtagtgtccgggaaggagtgtgaagaaatcatccgcaagggcggagagacttctgagatgtatctgattcagcccgacagcagtgtcaagccgtatcgcgtctactgtgacatgaataccgagaatgggggatggactgtcattcagaatcgacaagacgggtccgtcgactttggccgcaaatgggatccctataagcagggattcgggaacgttgcaaccaacaccgatggcaagaattattgtggcctgcctggagaatactggctcggcaatgataaaatttcccaattgacccgcatgggccctaccgaactgttgatcgagatggaggattggaagggcgacaaggtcaaagcccactacggaggttttacggtgcaaaatgaggcaaacaaataccaaatttctgttaataaataccggggcactgctggaaatgccttaatggatggggctagtcaactgatgggggagaacagaactatgaccatccacaatggcatgtttttttcaacatacgatcgcgacaacgacggctggctcaccagtgacccacgcaaacagtgctccaaggaggacggaggtgggtggtggtacaatcggtgccatgcggctaacccaaacgggaggtactattggggcgggcagtatacttgggatatggctaaacacgggaccgatgatggagtggtgtggatgaattggaagggatcttggtattccatgcgcaaaatgtctatgaagatcagacctttcttccctcagcaa

SEQ ID NO: 11268 - DNA, 1473 bp, synthetic construct
  misc_feature 1..1473: note = source = /note="Description of Artificial Sequence: Synthetic coding sequence"
  source 1..1473: mol_type = other DNA
atgaaaaggatggtcagctggtccttccataaattgaagacaatgaagcaccttctgcttttgttactgtgtgtgttcttggttaagagtcaaggagtgaatgataacgaggagggctttttcagtgctcgtgggcaccgcccactcgataaaaagcgtgaggaagctccatccctgcgaccagcccccccaccgatctctggcgggggttatcgggccagacctgctaaagctgccgctacacagaaaaaagtggaacgaaaagcccctgacgcaggcgggtgcctgcacgctgatccggatttgggagtgctgtgcccaactgggtgtcaactgcaggaagccctgttgcagcaggagcgcccaattaggaattccgttgatgaacttaataacaatgttgaggctgtgtcacaaacgtcgtcttctagctttcagtatatgtatcttctgaaagatctttggcagaaaaggcagaaacaagtcaaggacaatgaaaatgtagtcaacgagtattcgagcgagctcgaaaaacatcagctttacatcgatgagaccgtcaactctaacattccaactaatctccgagtgttgaggagtattctcgagaacctgcggagtaaaatccagaagctcgaatccgatgtttctgcccagatggagtattgcaggaccccctgtacggtgagctgcaacatccccgtggtctcagggaaggagtgcgaggagataattaggaaaggcggagaaacatctgagatgtacctcatacagcctgattcatccgtgaagccttaccgtgtatattgcgacatgaatacggaaaatggaggctggaccgtgattcagaaccggcaggatggctctgtagattttggtaggaagtgggatccctataaacaggggtttggaaacgtggcaaccaacacagatggaaagaactattgcggattgccaggagaatattggctgggaaacgataagattagtcaactgacaagaatgggccccactgagctgttgatcgagatggaggactggaagggcgataaagtcaaggctcactacggtggattcaccgtgcagaatgaagcaaataaatatcaaattagcgtgaacaagtatcgcggaaccgcaggaaatgcccttatggacggcgcttcacagctcatgggcgagaatcggacaatgacgatacataatgggatgttctttagcacctatgatcgagataatgatgggtggctgaccagtgaccccagaaagcagtgtagtaaggaggacgggggtggctggtggtacaatcggtgccacgcagccaaccccaacggtagatactattggggcggtcaatatacatgggacatggctaaacacgggactgacgatggcgtcgtttggatgaattggaaagggtcatggtactctatgcgcaagatgtcgatgaagattagaccctttttcccgcaacaa

SEQ ID NO: 11269 - DNA, 1473 bp, synthetic construct
  misc_feature 1..1473: note = source = /note="Description of Artificial Sequence: Synthetic coding sequence"
  source 1..1473: mol_type = other DNA
atgaaacgcatggtttcgtggagcttccacaagctgaaaactatgaagcatctgctgttgctgctgctgtgcgtgttcctcgtgaagtcgcagggagtgaacgacaacgaggaaggatttttctcggcgcgcggccaccgccctctcgacaaaaagcgcgaagaagcgccgtcactgaggccagccccaccacctatctcgggaggtggataccgggcacgtccggcgaaggcggcggcgacccagaaaaaggtggaacggaaggctcctgacgccggaggttgcttgcacgccgacccggacctgggagtcctctgtccgaccggctgccagttgcaggaggcactgctccagcaagagcgcccgatccggaattcggtggacgaactcaataacaatgtggaggccgtgtcgcagacctcctcctcgtcattccagtacatgtacctgctgaaagatctctggcaaaagagacaaaagcaggtgaaggacaacgaaaacgtggtgaacgagtactcgagcgaacttgagaagcaccaactttacatcgatgaaactgtgaactcaaacattccaactaacctgagggtgctccgctcgatcctcgagaacctgcggtccaagatccagaagctggagagcgacgtgtcggctcagatggaatattgccgcactccatgcaccgtgagctgcaacatccctgtggtgtccggcaaggagtgcgaggaaatcattcgaaaaggaggggaaacctcggaaatgtacctgatccaacctgactcgtcggtgaagccataccgggtgtactgtgatatgaacactgaaaacggcggttggactgtcatccagaaccgccaggacggaagcgtggacttcggacggaagtgggacccctacaaacagggattcggcaatgtggctaccaatactgatggaaagaactactgtggcctgcctggtgagtactggctgggtaatgacaagatctcgcagttgacgcgcatggggccaactgaactcctgatcgagatggaggactggaagggggacaaagtcaaagcccattacggaggattcactgtccaaaatgaagccaataagtaccaaatctccgtcaataagtaccggggcaccgcaggaaacgcgctgatggacggcgcttcacagctgatgggagaaaaccggactatgacgatccacaacggaatgttcttctcgacttacgatcgcgacaacgacggatggctcacttccgatcctaggaagcagtgcagcaaggaggatggaggcggctggtggtacaatagatgtcacgctgccaaccccaatggacgctactactggggtgggcaatacacctgggatatggccaagcatgggactgacgacggagtggtgtggatgaactggaagggaagctggtactcgatgagaaagatgtcgatgaagatccgcccgtttttcccgcagcaa

SEQ ID NO: 11270 - DNA, 1473 bp, synthetic construct
  misc_feature 1..1473: note = source = /note="Description of Artificial Sequence: Synthetic coding sequence"
  source 1..1473: mol_type = other DNA
atgaaaaggatggtgtcctggtcgttccacaagttgaaaaccatgaagcacctgcttctgctcttgctgtgtgtgtttctggtgaagtcccagggggtgaatgacaacgaagaggggtttttctccgcacgcggacatcgcccactcgacaagaaacgggaagaggcacctagcctccgcccagcaccaccacctatcagcgggggaggctaccgagcaagaccggcgaaagcagctgccactcaaaagaaggtggaacggaaggcaccggatgcgggtggatgcctgcatgcagatcctgaccttggagtgctttgccctaccggttgccaactgcaggaagccctcctccagcaggagcggccaattagaaacagcgtcgatgaactcaataacaacgtggaagccgtttcccagacttcctcaagctcctttcagtatatgtaccttctcaaggatctgtggcagaaaaggcaaaagcaggtgaaggataatgagaacgtcgtcaacgagtactccagcgaacttgagaagcatcaactgtatatcgatgaaaccgtgaacagcaatattcctaccaacttgcgagtgcttagatccatactcgaaaaccttaggagcaaaatccagaagctggaatcagatgtgagcgcacaaatggaatactgtagaaccccctgcactgtgtcatgtaacattcccgtcgtgtcgggtaaagaatgtgaagaaatcattagaaagggaggtgagacttccgaaatgtacctgattcaacccgactcatcggttaagccttaccgagtgtattgtgatatgaataccgagaacggaggctggacggtcattcaaaacagacaggacggatcggtggattttgggagaaaatgggatccctacaaacaagggttcggtaatgttgccactaatacggacgggaagaattactgtgggctgccaggcgaatactggttgggcaatgataagatctcccagttgaccagaatgggacctaccgaactgctgatagaaatggaagattggaagggtgataaagtcaaagcacattacgggggatttaccgtgcagaacgaagccaacaagtaccaaatctcagtgaacaaataccgtggcactgcagggaacgcactgatggatggagcaagccaattgatgggagagaacagaaccatgactattcacaatggaatgttctttagcacgtatgaccgagataacgatggctggcttacttccgacccccgcaagcaatgttccaaggaagatggtggcgggtggtggtacaacagatgtcacgctgcaaatccaaacggtcggtactactggggtggtcaatacacttgggacatggcaaagcatggaactgatgatggtgttgtctggatgaactggaagggatcttggtattccatgcgcaagatgtctatgaagattcggcccttctttcctcaacag

SEQ ID NO: 11271 - DNA, 1473 bp, synthetic construct
  misc_feature 1..1473: note = source = /note="Description of Artificial Sequence: Synthetic coding sequence"
  source 1..1473: mol_type = other DNA
atgaaaagaatggtaagctggtcgttccataagctcaagactatgaagcatctgctgctcctgttgttgtgcgtttttctggtcaagtcgcagggcgtaaacgacaacgaggagggcttcttctcggcgagaggccaccggccactggacaagaagcgcgaggaagcccctagcctccgaccggctccccctcctatcagcggtggaggatacagagccaggcccgcaaaagctgcagccacgcagaaaaaagtcgagcgcaaagccccggatgccggtggctgcctccacgctgacccagacttgggagtcctctgcccaaccggatgtcaactgcaggaagcgctgttgcagcaggaacggcctatccggaactcagtcgacgagcttaacaacaacgtggaagcagtctcccagaccagctcatcatccttccagtacatgtatctgctcaaagacctgtggcaaaagagacagaagcaggtgaaggacaacgagaatgtggtgaacgagtattcctcggaactggagaagcaccaactgtacatcgatgaaaccgtgaattcgaacatcccaaccaacctgcgggtgcttcgcagcattctggaaaatcttcgttcaaagatccagaagctggaatctgatgtgagcgcacaaatggaatattgtaggaccccttgcactgtgagctgcaacatcccggtggtatccggaaaggagtgtgaagaaatcatccggaagggtggggaaacttcagaaatgtaccttattcagccagattcttcggtgaagccgtaccgcgtttactgcgacatgaacaccgaaaatggtggatggactgtcatccagaatcgccaagatggatcagtggattttggacgtaagtgggatccgtacaaacagggcttcggaaacgtggcgacgaacactgacggaaagaattactgcgggcttccaggggagtactggcttgggaacgacaaaatctcccagctgaccagaatggggcccactgagttgctgatcgaaatggaggactggaagggcgacaaggtcaaggcgcactacgggggatttactgtgcagaatgaagccaataagtaccaaatctccgtgaacaagtaccgcggaaccgccggaaacgccctcatggacggcgcgtctcaactgatgggagagaatcgcactatgaccatccacaacggaatgttcttctcgacctacgacagagacaatgacggctggctgacgagtgatccgcgcaagcaatgctcgaaagaggacgggggagggtggtggtacaaccgctgccatgcagctaacccgaatggcaggtactactggggtggacagtacacctgggatatggcgaagcatggcactgacgatggcgtggtgtggatgaattggaaagggtcgtggtattcaatgcggaagatgtcgatgaaaatacgcccgttctttccgcaacag

SEQ ID NO: 11272 - DNA, 1473 bp, synthetic construct
  misc_feature 1..1473: note = source = /note="Description of Artificial Sequence: Synthetic coding sequence"
  source 1..1473: mol_type = other DNA
atgaaacggatggtgtcctggtctttccataagctgaagactatgaaacacctgctcttgctgctgttgtgtgtgtttcttgtgaagtctcagggggtaaatgacaacgaggaaggcttcttcagtgccagaggccacagaccactggataagaaacgggaggaagcacctagcctgaggcctgctcctcctcctattagtggcggaggttatagagccaggcctgctaaggccgcagctacccagaaaaaggtggagaggaaggctcccgacgcaggagggtgcctccacgcagacccagatctgggagtactgtgtccgactggctgccagctgcaggaggccctcctacagcaggagcgcccaattcgcaattccgtggatgagctgaacaataacgtggaagcggtctcccagacttcatcctccagttttcaatatatgtacttgctgaaggatctgtggcagaaacggcaaaaacaggtgaaggacaacgaaaacgtcgttaacgaatattcgtcggaacttgagaagcaccagctgtatattgacgaaactgtaaactcaaacatacctaccaacctgcgcgtcctcaggtccattctggaaaacctgaggtccaagatccagaagttagaatcagacgtgtcggcgcagatggagtactgtcgtactccctgcaccgtgtcatgcaatattcctgtcgtgtcagggaaggagtgcgaagaaatcattcgcaaaggtggagaaactagtgagatgtatctgatacagcccgattcctctgtgaaaccttacagagtgtactgcgatatgaacaccgagaatggcggctggaccgttatccagaaccggcaagatggtagcgtcgacttcggacgcaagtgggacccttataagcaaggttttggcaacgtggctactaacaccgatggaaagaactactgtggactgcccggggagtactggctggggaatgataagatttctcagcttacccgcatggggcctacagaactgctcattgagatggaggactggaaaggggataaagtaaaggcacattacggaggcttcaccgtccagaacgaagcaaacaagtaccagataagtgtgaacaaatatcgcgggacagccggtaacgccctcatggatggcgctagtcagttaatgggggagaacagaacaatgaccattcacaacggcatgtttttctcgacatacgaccgggataatgacggatggctgacgagtgatccaagaaagcagtgctcaaaggaggatggcggaggatggtggtataacaggtgccacgccgcgaacccaaatggtaggtattattggggaggacagtacacgtgggatatggctaagcatggtaccgacgacggtgttgtgtggatgaactggaaagggagctggtattcaatgcgcaagatgtcgatgaaaattcgtcctttcttccctcagcag

SEQ ID NO: 11273 - DNA, 1473 bp, synthetic construct
  misc_feature 1..1473: note = source = /note="Description of Artificial Sequence: Synthetic coding sequence"
  source 1..1473: mol_type = other DNA
atgaaacgaatggttagttggtccttccacaaactgaaaactatgaaacacctccttctgctgctgctgtgcgtgttcctggtgaaatctcagggtgttaacgacaacgaggagggctttttctcagcccgcggccaccgacctctggataaaaaaagagaagaagctccgagcctgcggccagcgccgccgccgatatcagggggaggctacagggcaaggcccgcaaaagccgctgcaacccagaaaaaggtggagcggaaagcacccgacgccggtggctgccttcacgccgaccctgacttgggggttctctgccccaccggctgtcagctgcaggaggctctattacagcaggaaagaccaatcagaaactctgtggacgaactgaataataatgttgaggccgttagtcagacttcctccagcagctttcagtatatgtacctgctgaaggacctttggcagaaaagacagaagcaggtcaaggacaatgaaaacgtagttaacgagtactctagcgagctcgagaaacaccagctgtatattgatgaaacagtgaacagcaacatccccaccaatctccgagtattacggtctatcctcgagaacttaagatccaaaatccagaaactcgagtctgacgtgtctgcccagatggagtattgccggaccccctgcaccgtttcctgtaatatccccgttgtatctggcaaggagtgtgaggaaattatcagaaaaggcggcgaaacatcagaaatgtacctgatccagcccgattcctcagtgaaaccatatcgcgtgtattgcgatatgaataccgagaatggcgggtggactgtaatacagaatcgccaagatggatccgtggatttcggacggaagtgggatccttataagcagggatttgggaacgtggcaaccaataccgacggcaagaattactgcggattgcccggcgagtattggctcggcaatgataaaataagccagttaaccagaatgggtcctaccgagctgctgattgagatggaggattggaagggtgataaggttaaggcacactatggtggttttactgtgcaaaatgaggcaaataaatatcagatctccgtgaacaagtacaggggaactgccgggaatgccctgatggatggcgcctcccagctgatgggggaaaataggaccatgactatccacaacggaatgtttttcagcacgtacgatcgtgacaatgacggatggctaacctctgaccctagaaagcagtgttccaaagaggatggagggggctggtggtacaacaggtgccatgcggcaaatccaaatggaagatactattgggggggccagtatacctgggatatggctaagcacggcactgacgatggcgtggtatggatgaattggaagggatcatggtactcaatgcgcaaaatgtcgatgaagatacggcccttttttccacagcaa

SEQ ID NO: 11274 - DNA, 1473 bp, synthetic construct
  misc_feature 1..1473: note = source = /note="Description of Artificial Sequence: Synthetic coding sequence"
  source 1..1473: mol_type = other DNA
atgaagcggatggtcagctggtcctttcacaagctcaagaccatgaagcatctcttgctcctgcttctttgtgtgtttcttgtcaagagccagggagtgaatgataatgaagaaggtttcttttccgcaagaggccaccgacctctcgacaaaaagagggaagaagcgccttcacttcggccggcacctcctcctatttcaggtgggggataccgagcacgcccagccaaggcagcagccacccagaagaaggtcgaacggaaggcaccagacgccggaggatgcctgcacgcagatccagaccttggggttctctgtccaacgggatgccaacttcaggaagcgctcctgcaacaagaaagaccgatccggaattctgttgatgaacttaacaataacgtcgaagcggtgtcccagactagctcctcctcatttcagtacatgtaccttttgaaagatctttggcaaaaacgccaaaagcaggttaaggataacgagaatgtggtgaacgaatactcctcggaactggaaaagcatcagctctacatcgatgaaactgtgaactcaaacattcctactaacctgcgcgtgctccgttcaattcttgaaaaccttagatcgaaaattcaaaagctggaatccgatgtttccgcacagatggaatactgtagaaccccatgcactgtctcatgcaatattccagtcgtgtcgggaaaggagtgtgaagagatcattaggaagggtggcgaaacgtccgagatgtaccttatccagcctgactcgtccgtgaagccctaccgagtgtactgtgatatgaacactgaaaacgggggatggaccgtgattcagaaccgacaggatggaagcgtggactttggaagaaaatgggacccctacaagcagggtttcggaaatgtggcaactaatactgatggcaagaactactgtggattgcctggagaatactggctgggaaatgacaagatctcgcaactgacccgtatgggtcctacggagctgctgattgagatggaggactggaagggtgataaagttaaggcgcactacggaggttttaccgtgcagaacgaagcaaacaaataccagatctccgtgaataagtaccggggtaccgcaggtaatgcactgatggatggagcatcgcaactgatgggggagaatcgaactatgaccatacacaatggaatgttcttttccacttacgatagagacaatgatgggtggctgacctcagaccccaggaagcagtgttcgaaggaagatggaggtggatggtggtacaacagatgtcatgcagcaaacccaaatgggagatactactggggaggacaatacacttgggacatggctaaacatggaaccgatgacggtgtcgtgtggatgaactggaaagggagctggtactcgatgagaaaaatgtcaatgaagattagaccattctttcctcaacaa

SEQ ID NO: 11275 - DNA, 1473 bp, synthetic construct
  misc_feature 1..1473: note = source = /note="Description of Artificial Sequence: Synthetic coding sequence"
  source 1..1473: mol_type = other DNA
atgaagcggatggtgtcttggagctttcacaagttgaagaccatgaagcatctgctactgctactgttgtgcgtgtttttggtgaaatcacaaggcgtcaacgacaacgaagagggctttttctctgcgaggggccacaggcccctggataagaagcgcgaggaagcgccctctttacggccagccccaccacccatctcaggtggcggctatcgggcgcgacccgccaaagcagcagctactcaaaagaaagttgagagaaaagcccccgacgcaggaggctgtttgcacgcagaccctgacctgggggtgctctgtcccacgggatgtcagttgcaggaagcactgctgcaacaagaacgcccaattcgcaattccgtggatgaactgaataacaatgtagaggcagtgtctcaaacgtcatctagcagcttccagtacatgtacctgctcaaggatctgtggcagaagaggcagaagcaggtgaaagacaacgagaacgtggtaaacgagtattcatctgagttagaaaagcatcagttatacatagacgaaactgtgaatagcaatattcctaccaatttgcgggtgttgagaagcattctggaaaatctgagatccaagatacagaaactggagagcgatgtctcagcccagatggaatactgcaggacaccttgtaccgtcagctgtaatatcccagtagtttctggcaaggaatgtgaggagatcatccgaaaaggaggagaaacgtctgaaatgtatttgattcaacccgacagtagcgtgaaaccttaccgggtgtactgcgatatgaatacagagaacgggggctggacggtgatacagaatcgccaggatggaagtgtggatttcgggcgcaagtgggacccttacaaacaggggtttggtaacgtcgcaactaataccgatggtaaaaactattgcgggctgcccggcgagtactggcttggcaacgacaagattagtcagctaactaggatgggacccactgaactacttattgagatggaggattggaagggggacaaggtcaaggcgcattatggcggcttcacagtacagaatgaggccaataaatatcagatcagcgtgaacaagtatagaggcactgccggcaatgcactgatggacggagcctcccagttgatgggtgagaacaggaccatgaccatacacaacggaatgtttttctctacttacgatcgggacaacgatggttggcttacctcagacccacgtaagcagtgcagcaaagaggacggaggcggttggtggtacaaccgttgtcacgctgctaatcccaacggtagatactactgggggggccaatatacctgggatatggcgaaacatggaacagatgacggggtggtttggatgaattggaaaggttcttggtacagcatgcgcaaaatgagcatgaaaataagaccatttttcccacagcag

SEQ ID NO: 11276 - DNA, 1473 bp, synthetic construct
  misc_feature 1..1473: note = source = /note="Description of Artificial Sequence: Synthetic coding sequence"
  source 1..1473: mol_type = other DNA
atgaagagaatggtgtcctggagtttccacaaactgaagacaatgaagcacctcctgcttctcctgctctgtgttttcctggtcaaatcccagggtgtcaacgacaacgaggagggcttcttcagtgcccgcggccatcggccactggataaaaaacgggaggaggccccatcactgaggcccgcccctccccctatctcgggggggggctatcgggcacgccctgccaaggcagcagctacacaaaaaaaagtggagagaaaggccccagatgctggtggctgcctgcacgctgacccagacctgggggtcttgtgccccaccgggtgtcagctgcaggaagccctgctgcaacaggagagaccgatccgtaattctgtcgacgagttaaataataatgtcgaagctgttagccagaccagttcgtcatcatttcagtatatgtacctgctcaaggatctgtggcagaaacggcagaagcaggttaaggataacgaaaatgtggtcaacgagtacagctcagaactggaaaaacaccagctgtatatcgatgaaacagtgaatagcaacatcccgaccaatcttagggtgctgcggtccattctggagaacctgaggagtaaaattcagaagctggagagtgacgtttccgcccaaatggaatactgtaggacgccttgcacggtctcttgtaatatccctgtggtgagtggaaaagagtgtgaagagataatccggaaagggggcgagacttccgagatgtatctgatacagcccgactcttcggtgaagccatatagagtgtactgtgacatgaacaccgagaacggcgggtggaccgtgattcagaatcgtcaagacgggtcagtggacttcggcaggaaatgggacccctataagcagggattcgggaatgtcgccaccaacactgatggtaagaattactgcggcttacccggggaatattggctgggcaacgacaaaattagccagctcacccgaatgggaccaactgaattgttgattgagatggaagattggaagggagataaggtgaaagcacactatggcggcttcactgtccagaatgaggcgaataaatatcagatttcagtcaataaatatagaggcaccgccggtaacgccctgatggacggggcctctcagctgatgggggagaatcgcactatgaccatccataacgggatgtttttctcgacatatgaccgagataatgatggttggctcacctctgatccaaggaagcaatgtagcaaagaggacgggggcggctggtggtataatcgctgccatgcagccaatcctaatggccggtactattggggcggacagtacacgtgggatatggccaagcacggaaccgacgacggagtagtgtggatgaattggaaaggtagttggtacagcatgcggaagatgagcatgaaaatcaggcctttcttcccacaacag

SEQ ID NO: 11277 - DNA, 1473 bp, synthetic construct
  misc_feature 1..1473: note = source = /note="Description of Artificial Sequence: Synthetic coding sequence"
  source 1..1473: mol_type = other DNA
atgaagagaatggtgtcatggtccttccataagttgaaaactatgaagcatctgttgttgctgctgctgtgtgtctttctggtgaaaagccagggggtgaatgataacgaggagggtttcttctccgcaagaggtcatcgacccctcgacaaaaagagggaagaggcgccatcactgcgcccagccccgcctccaatctcagggggaggataccgggcgcgtccggccaaagccgccgccactcagaaaaaggtggaacgcaaggcaccagatgctgggggatgtttgcacgctgaccctgacttgggcgtgctgtgcccaaccggatgccaactgcaggaggcactgctccagcaagaacgaccaatcagaaactcggttgatgagctgaataacaacgtggaggcggtgagccagacctcgagctcctccttccagtacatgtacctgcttaaggatctttggcagaagagacagaagcaagtcaaagacaacgaaaacgtggtgaacgaatactcgtcggagctggaaaagcaccagctctatatcgacgaaactgtcaactcaaacatacctacgaaccttagagtgctccgaagcatactcgagaatctgaggtccaaaatccaaaaactggagtctgacgtgtcggcccagatggaatactgccggactccatgtaccgtgtcatgcaatatcccggtggtgtcggggaaggaatgcgaagagatcattcggaaaggcggggaaacttcggaaatgtacctgatccagccggactcctccgtgaagccgtaccgcgtgtactgcgatatgaacacggagaacggcggatggaccgttatccagaatcggcaagatggctcggtggactttggccgcaagtgggacccgtacaaacagggcttcggcaatgtggccactaacactgatggaaagaactactgcggcctgccaggcgagtactggctcgggaatgataagatttctcaactcactaggatgggcccgacggaattgctcatcgaaatggaagattggaagggagataaagtgaaggcccactatggagggttcaccgtccaaaacgaggcgaacaagtaccaaatcagcgtgaacaagtacaggggtactgcgggaaatgccctgatggacggtgcgagccaactgatgggcgaaaatcgcaccatgaccatccataacggaatgttcttttctacctacgaccgcgataacgacggatggttgacctccgatccgcggaagcagtgctcaaaggaggacggaggtggatggtggtacaatagatgccacgcagcgaacccgaacggacgctactattggggagggcaatacacttgggatatggctaagcacggaaccgacgacggagtggtctggatgaattggaaaggtagctggtactccatgcgcaaaatgtcgatgaagatccgcccgttctttccccagcag

SEQ ID NO: 11278 - DNA, 1473 bp, synthetic construct
  misc_feature 1..1473: note = source = /note="Description of Artificial Sequence: Synthetic coding sequence"
  source 1..1473: mol_type = other DNA
atgaagagaatggtctcttggagtttccacaaactcaagacaatgaagcacttgctgctcctcctcctctgtgttttccttgtcaagtcacaaggggtcaatgacaatgaggaaggatttttctctgctaggggccatcgacctcttgacaagaaacgcgaggaggcaccatccttgcggcccgccccgccgccaatttcaggcggcggctacagagcacgaccggctaaagcagccgccacccagaaaaaagtcgagagaaaggccccggatgccggcggatgcctgcacgctgatccagatctgggggtgctctgccccaccggatgtcagctgcaggaggctctccttcagcaggaaagacctatccggaattcagtcgatgagttaaacaataacgtggaggcggtgagccaaactagttcttcttcatttcagtatatgtacttgctgaaagacttatggcagaagcgacaaaaacaagtgaaagataacgaaaacgtcgttaacgagtatagtagcgagctggaaaaacatcagctatacattgatgagacggtgaattccaacatccccacaaacctgagagtgctgcggagtatccttgagaacctgcggtccaagatccaaaagctagaaagtgatgtttctgctcagatggaatattgccggaccccttgcaccgtgagctgtaacatcccagttgtctcgggtaaggagtgtgaggagattatcaggaaggggggtgagactagtgaaatgtacctcatccagcctgacagctcagtgaaaccatacagggtgtactgcgacatgaacactgagaacgggggttggaccgtgatccagaaccgacaagatggcagtgtggattttggtagaaaatgggacccctacaagcagggctttggcaatgtggccacgaacaccgacggaaagaattactgtggcctcccaggggaatattggttgggaaacgataaaatctcccagttaactcgcatgggcccaactgagctccttatcgaaatggaagattggaaaggggacaaggtgaaggcacactacggtggctttactgtgcagaatgaggccaataagtaccagatctctgtgaataaatacaggggaaccgccggtaacgccctgatggacggcgcctcccaactgatgggggaaaatcgaacgatgaccattcacaacggaatgttttttagcacatatgacagagataatgatgggtggctgacatccgatccacgtaagcagtgcagcaaggaagatggaggaggctggtggtataaccggtgccacgccgccaatcccaatggcagatactactgggggggtcagtacacgtgggacatggccaaacacggaaccgacgatggtgtcgtgtggatgaattggaaagggagttggtattctatgcgaaagatgtcaatgaaaatccggccatttttcccacagcaa

SEQ ID NO: 11279 - DNA, 1473 bp, synthetic construct
  misc_feature 1..1473: note = source = /note="Description of Artificial Sequence: Synthetic coding sequence"
  source 1..1473: mol_type = other DNA
atgaaaaggatggtgtcgtggtcttttcacaagctaaagacaatgaagcatctgctcctgctgctgctctgtgtcttcttggtcaagtcccagggggttaacgataatgaggagggttttttcagcgcccgtggacaccggcctctcgacaagaaaagagaggaagcgcccagcctgcgccccgcccccccccccatttctggcggcggctacagagctcggccggctaaggcggcagcgacccagaagaaggtggagcggaaggccccagatgcaggcggttgcctccacgccgaccccgatctgggggtgctttgccctacggggtgtcagctgcaggaagcattgcttcagcaggagaggccaattaggaattctgtcgacgagcttaacaataatgtcgaagccgtctcccagacctccagctcttccttccaatatatgtaccttcttaaagatctttggcagaagcggcagaaacaggttaaagacaatgagaatgtcgttaatgagtattcatcagaactagagaagcatcagttatatattgacgagacggtcaactccaacatccctacaaatctacgggtcctgcggtcaatcctcgaaaatctcaggagcaagattcagaagctggagtctgatgtaagtgcacaaatggaatactgccggaccccgtgtacagtcagttgcaacattcctgttgtcagtgggaaagaatgcgaagagattatccggaaagggggcgaaacctccgagatgtatctgattcaacctgactcatcagtgaaaccttacagggtgtactgcgatatgaataccgaaaacggtgggtggaccgttatccagaatcgacaggatggctcagtagactttgggcgcaagtgggacccatacaagcagggcttcggtaacgtagcgacgaatactgacggtaagaattattgcgggttacccggcgagtactggctcggtaatgacaaaatttcccaactcactcgcatgggtcccaccgagctgcttatcgaaatggaagattggaaaggtgacaaagtaaaagcacattacggcgggtttacggtgcagaatgaagctaacaagtaccagatttcggttaataagtaccgcggcaccgctgggaatgctctcatggacggggcttcccagctcatgggagagaaccggacaatgaccatccataacgggatgttcttctcgacctatgatcgggacaatgatggttggctcacctctgatcctcgcaagcagtgctccaaggaggatgggggaggttggtggtacaaccgctgccacgctgcgaaccccaacggccgctactactggggcggccaatacacttgggacatggcaaagcacggcacagacgatggggtggtatggatgaactggaaggggtcttggtattccatgaggaagatgagcatgaagatccggcccttctttccgcaacag

SEQ ID NO: 11280 - DNA, 1473 bp, synthetic construct
  misc_feature 1..1473: note = source = /note="Description of Artificial Sequence: Synthetic coding sequence"
  source 1..1473: mol_type = other DNA
atgaaaagaatggtcagttggtcattccacaagctcaagacaatgaaacacctactgttgctcctgctctgtgtttttttggtcaaatctcagggcgtgaacgacaacgaggaaggatttttcagcgcacgtggccatcgcccgctggataagaagcgggaagaggcacccagcctccggcccgcgccaccgccaatcagcggcggcggatatagggcacgtccggcaaaagctgccgccacacagaaaaaggtggaaaggaaagcccccgatgccggcgggtgcttgcacgccgatcctgacctgggagttctttgcccaaccgggtgtcagctgcaggaagccctgttgcagcaggaaagaccaatacgtaactcggttgatgagttgaataataacgtcgaagctgtctcgcagacttccagcagctcttttcaatacatgtaccttctgaaggatttatggcagaagcggcagaagcaggtaaaggataacgagaatgtggttaacgaatactctagcgagcttgaaaagcaccagctttacatcgacgaaacagtgaactcgaacattcccacgaacctgcgggttttgaggtctatcctggagaatttgaggtctaagatacagaaattggagtctgacgtgtccgcccagatggagtactgcagaacaccgtgtaccgtcagctgtaatattccagttgtatcaggcaaagaatgcgaggagatcattcgcaaaggaggggagacgagcgagatgtacctaatccagccagattcctcagtgaagccgtaccgggtatactgtgatatgaacactgagaacggcggttggacagttatccagaaccgacaggacggatccgtggactttggcaggaagtgggacccctacaaacagggtttcggaaatgttgccactaacacggatggcaagaattactgtggcctcccgggggaatactggctgggaaacgacaagatcagccaattaacacgcatggggcctacggagctgctgattgagatggaggactggaaaggcgacaaggtgaaagcccactatggcggattcacggtgcagaacgaggcgaacaagtatcagatttcagttaacaaatacagggggactgccggcaatgctctgatggatggtgcctcacagcttatgggcgaaaaccgaaccatgacgattcataatggcatgttcttctccacatacgatagggacaacgacggctggttgacctctgaccccagaaagcagtgcagcaaagaagatggcggcggctggtggtataatcgttgtcatgctgccaatcccaatggcagatattattggggaggacagtacacctgggacatggccaagcatgggacggatgacggtgtggtgtggatgaattggaaaggcagctggtatagcatgcgtaaaatgtctatgaagatccgacctttcttcccacagcag

SEQ ID NO: 11281 - DNA, 1473 bp, synthetic construct
  misc_feature 1..1473: note = source = /note="Description of Artificial Sequence: Synthetic coding sequence"
  source 1..1473: mol_type = other DNA
atgaagcggatggtttcctggtctttccataagttaaagactatgaagcaccttctgctgttgctgctgtgtgtgttccttgtgaaatctcagggtgtcaatgataatgaggaagggttcttctctgccaggggtcatagaccactggataagaagcgggaagaggcccctagtctgcgcccggctccaccccccatttctggtggtgggtatagggcccgcccagccaaggctgcggcgacacaaaaaaaagtggaacgcaaggcgcctgacgcaggtgggtgcctacacgcagaccccgatctgggcgtgctgtgtcccacgggatgtcagcttcaggaagcattgcttcaacaggagagacccatacggaactcggttgatgaactgaataataatgttgaagcggtttcccagacatccagctcctcttttcagtacatgtatctcttaaaagatctgtggcagaagaggcagaagcaggttaaagataacgaaaatgtcgtgaatgagtactcttccgagctggaaaagcatcagctctatatcgacgaaaccgtgaattccaatattcccaccaatctgagggtgttgagaagcattctcgagaacttacggagcaaaattcagaaactggagtccgacgtgtcagcccaaatggaatactgtagaaccccttgtaccgtgtcgtgtaatataccagtggtgtctggcaaggaatgtgaggaaatcataagaaagggcggggaaacttctgagatgtacctgatccagcctgactcctctgtgaagccttatagggtgtactgcgatatgaacaccgagaacggcgggtggaccgtcatccagaaccgacaagatggatccgtcgacttcggacggaagtgggatccctacaagcagggctttggaaatgtggccaccaacaccgatggcaagaattattgcggtctacctggtgagtactggctgggcaacgacaagatttctcagctaacacgtatggggcccacagaactactgatcgagatggaggattggaagggggacaaagtgaaggctcactacggcggcttcaccgtacagaacgaggccaacaaataccagatttccgtcaacaaatatcggggaacagcaggaaatgccctgatggacggagctagccagttaatgggagaaaaccgtaccatgactattcacaacggtatgtttttcagcacgtacgaccgggacaatgatggatggctgacctctgaccctcgcaagcaatgctcaaaagaggatggcggtgggtggtggtacaatagatgccacgccgcaaaccccaatggacggtactattggggcggccagtacacctgggatatggctaaacacggtacagatgacggagtggtgtggatgaactggaaagggtcatggtattccatgcgtaagatgtctatgaagatacgacctttctttccacagcag

SEQ ID NO: 11282 - DNA, 1473 bp, synthetic construct
  misc_feature 1..1473: note = source = /note="Description of Artificial Sequence: Synthetic coding sequence"
  source 1..1473: mol_type = other DNA
atgaagcggatggtttcctggtcatttcataaacttaagacaatgaaacatctcctcctacttctgctctgcgtgtttctagtgaagagccagggggttaacgataacgaggaaggattcttttcagcgcgaggccatcgccccctggataaaaagagagaggaggctccatccctacgaccagctccaccccccatctcagggggcggctacagagctcggcctgcgaaagcggctgctacccagaagaaagtcgaacggaaggccccggacgcaggaggttgccttcatgcagacccggacttgggagtgttatgtccaaccgggtgtcagctgcaagaagccctcctgcaacaggaaagacccatccggaactccgttgacgagctgaacaataacgtcgaagccgtaagtcaaacctcaagcagtagttttcagtatatgtatcttctgaaggatctctggcagaagcgacagaaacaagttaaggacaatgaaaacgtggtgaatgaatattcttcagagcttgaaaagcatcagctgtatatagatgaaaccgtgaattctaatatccctacaaacttacgtgtgctacgcagcattctcgaaaatctcaggtctaagattcaaaagttagagtcagatgtctcagcccagatggaatattgccggaccccgtgtaccgtgagctgtaatatcccggtagtctcaggaaaagagtgcgaagagatcattaggaaaggaggagagacatccgaaatgtacctcatccagcctgacagctctgtcaagccatatcgcgtctactgcgacatgaataccgagaatggaggatggacagtcatccagaatcgccaggatgggtcagtggacttcggtcgcaagtgggacccctataaacagggattcgggaacgttgccaccaacacggacggtaaaaattactgtgggttgccgggtgagtactggctgggcaacgacaagatttcgcagttgacccgtatgggtcccaccgagttgctgatagaaatggaggactggaagggagataaggtgaaggcacattacggaggctttaccgtacagaatgaagcgaataaatatcaaattagtgtcaataagtacagggggaccgcgggaaatgcgctcatggatggcgcgtcccagctaatgggggagaaccgtacgatgaccatccacaacggcatgttcttctccacttacgatcgtgacaacgacggatggttgacgtcagatccacgcaagcagtgttcaaaggaggacggtggtggatggtggtataaccgttgtcacgcagctaatcccaatggacgctactattgggggggtcagtatacgtgggatatggctaaacatggcacagatgatggtgtagtgtggatgaactggaaaggttcctggtactctatgcgtaagatgtcaatgaagattcgcccgttcttcccgcaacag

SEQ ID NO: 11283 - DNA, 1473 bp, synthetic construct
  misc_feature 1..1473: note = source = /note="Description of Artificial Sequence: Synthetic coding sequence"
  source 1..1473: mol_type = other DNA
atgaaaaggatggtgtcttggtccttccacaaattgaagacaatgaaacacctattgttacttctgctgtgcgtgtttctcgtaaaatctcagggagtgaacgacaatgaagaagggtttttctccgcaaggggacatcggcccctagataaaaaacgagaagaagccccttcgctgcgacccgctccaccccctatttccggaggagggtatagagctaggcccgccaaagctgccgcaacacagaaaaaagtcgagaggaaggcccctgacgctggagggtgtctccacgctgatcctgacctcggagtcctctgccccacaggatgtcagttgcaggaagccctcttacagcaggaacggcccatccggaatagtgtcgacgaactgaacaacaacgtagaagcggtgtctcagacttcttcttccagtttccagtatatgtatttattaaaggatctctggcagaaacggcagaagcaggtgaaagataacgaaaacgttgttaacgaatattcctctgaactggaaaaacatcagctatacatcgatgaaactgtgaattctaacatacccacaaatctccgggtcttacgctctatactggaaaatctaagatctaaaatccagaaacttgaatctgacgtcagtgcacagatggaatattgcaggactccctgcacagtgtcttgtaatatccctgtggtgtcagggaaagaatgcgaagaaataataagaaaaggaggggagacatccgaaatgtatctaatccaacccgactcttctgtaaaaccctatagagtatactgtgatatgaacacagaaaacgggggatggactgtgatccagaatcgccaggatgggtcagtcgattttggaaggaaatgggatccttacaaacagggatttggaaatgttgcaactaatacagatgggaaaaactattgtgggctgccaggagaatattggcttgggaatgataaaatttcacagctaacacgcatgggacccacggaactcttaatcgaaatggaagattggaaaggggataaagtgaaagcccattacggagggtttacagttcagaacgaggctaataaataccagatctcagttaataaatatagggggacagcggggaatgctctgatggatggggcatctcagttaatgggagagaatcggacgatgacaatacataacgggatgtttttctctacatatgatagggataatgacgggtggcttacaagtgaccctcgcaagcagtgttcaaaagaagacggagggggatggtggtacaaccggtgccacgctgctaaccctaacggacggtattattgggggggacagtacacatgggatatggctaaacacggaacagatgatggggtggtgtggatgaactggaaagggtcttggtatagtatgcggaagatgtcaatgaaaattcgaccttttttcccacagcaa

SEQ ID NO: 11284 - DNA, 1473 bp, synthetic construct
  misc_feature 1..1473: note = source = /note="Description of Artificial Sequence: Synthetic coding sequence"
  source 1..1473: mol_type = other DNA
atgaagcggatggtttcctggtctttccacaagcttaaaacaatgaagcacttgctcttgttgttgctctgcgtgtttctggtcaaatcccagggcgtgaacgataacgaggaggggttcttcagcgcccgggggcaccgacctttggacaagaaacgtgaggaagctccctccttacgccccgctccccctccgatttccggtggtggttaccgtgcgcgcccagccaaggccgctgcaacccagaagaaagtggagaggaaggctcccgacgccggcggctgtcttcacgctgaccccgatctgggcgtcctttgtcccactggctgccaactccaggaggccctgttacaacaggaacggcccatccgcaattcggtggatgagcttaacaacaacgtcgaggcggtttcccagacctcctcctcctcctttcagtacatgtatttgttgaaagatctgtggcagaagaggcagaaacaggtcaaggacaacgagaacgtcgtcaatgagtactcttcggaactggagaagcatcagctctacatcgatgagaccgtgaatagtaatatccctaccaacctgcgcgttctgcgtagtatacttgaaaaccttcgcagcaagatccagaagttggaatccgatgtctctgcccagatggaatattgtcgcacgccctgcaccgtctcctgtaatatccccgttgtgtcgggcaaggagtgcgaggagatcatccgtaaggggggtgagactagcgagatgtaccttatccagccggatagcagcgtcaagccgtaccgcgtctattgtgatatgaacaccgagaatggtggctggaccgtcatccagaaccgtcaggatggctccgtcgacttcgggcgtaaatgggacccctacaagcagggcttcggaaacgtagctactaacacggatggtaagaattattgtggtcttcccggtgagtactggcttggcaacgacaagatctctcagttgacacgaatgggtcccaccgagctgctcattgagatggaggactggaagggcgataaggtgaaagcccattacggcggattcaccgttcagaacgaggccaacaagtaccagattagtgtcaacaagtaccgcggcactgccggcaatgcccttatggacggggccagccagctgatgggcgagaatcgtactatgacaatacataacggcatgtttttcagcacctacgatcgagataatgacggctggctgaccagcgatccccgtaagcagtgctccaaggaagatggtggtggctggtggtacaaccgctgccacgctgctaacccaaacggtcgttattattggggtggtcaatacacgtgggatatggctaagcacggcaccgacgacggcgtcgtctggatgaactggaaaggaagttggtattccatgcgcaagatgtccatgaagattcgccccttcttcccccaacag

SEQ ID NO: 11285 - DNA, 1473 bp, synthetic construct
  misc_feature 1..1473: note = source = /note="Description of Artificial Sequence: Synthetic coding sequence"
  source 1..1473: mol_type = other DNA
atgaagcgcatggtttcatggtcctttcacaaactcaaaacaatgaagcacttgctgttgctgcttttatgcgtgtttctcgtgaaaagtcagggcgtgaatgacaacgaggaaggatttttctccgcacgtggacaccgcccgttagataagaagcgcgaagaggcgccctcactcaggcctgccccaccacctatttccggaggaggttacagggcccggccagcaaaagccgcggcgactcagaaaaaagtggaacgtaaagcgcctgatgccggcggttgtttgcacgcggacccagatctcggggtcctctgtcccactggttgccagctgcaggaagccttgctgcaacaggagaggccgattcgcaactccgtagacgagctgaataacaacgtcgaggctgttagccagacatcatcgtcaagctttcagtacatgtatctcctcaaggacctctggcagaagcgacagaaacaggtgaaagacaacgagaatgtggtgaacgaatattcatccgaactggagaaacatcagttatacatcgatgaaaccgtgaactccaacatcccaaccaatttgcgcgtgctcagaagcattttggaaaaccttaggtcaaagattcagaaactggaaagtgatgtctcagctcagatggagtattgccggacaccctgtacagtctcttgcaacattcccgttgtcagtggcaaggagtgcgaggaaatcatcaggaaggggggcgagactagtgagatgtacctcatccaacccgactctagtgtgaagccctacagagtgtactgcgatatgaacactgagaatggcgggtggactgttatccagaatcgccaggatggaagcgtggactttggccggaaatgggacccttacaagcaaggtttcggcaacgtggccactaacaccgacggaaaaaactactgtgggctgccaggggagtactggctgggtaacgacaagatctcacagcttactaggatgggtcccactgaactcctgatagagatggaagattggaagggggacaaagttaaggcccactatggaggattcactgtgcagaacgaggccaataagtaccagatctccgtaaataagtatcgcgggaccgctggcaacgctctgatggacggcgcatcccagctgatgggcgagaaccggactatgaccattcataatggcatgttctttagcacgtatgacagagacaatgatgggtggctgaccagtgatccccgcaaacagtgtagcaaggaggacgggggaggctggtggtacaaccggtgccacgcagctaaccctaacgggcgctattattggggtggccagtatacctgggatatggcaaagcacgggactgacgacggcgtggtgtggatgaattggaagggctcttggtacagtatgaggaagatgtccatgaaaatacgcccgtttttcccacagcag

SEQ ID NO: 11286 - DNA, 1473 bp, synthetic construct
  misc_feature 1..1473: note = source = /note="Description of Artificial Sequence: Synthetic coding sequence"
  source 1..1473: mol_type = other DNA
atgaagagaatggtctcctggagtttccacaaattgaaaactatgaaacatttactactcctgctgctttgtgtattcctggttaagtcccagggagtaaatgataacgaggaagggtttttttcagcacggggccatcggcccctcgataagaagcgcgaagaggctccctccctcaggccagcaccaccccccatcagtggcggaggatacagagctcgcccggcaaaggctgccgccacccagaagaaggtggagcgtaaagccccggacgccggtggttgcctacacgccgatccagatttgggcgtactgtgtcccacagggtgtcaactccaagaagcactgcttcagcaggagagacccattcgtaactctgttgatgagctgaataataacgtcgaagctgtcagccagacctcctcctcctccttccagtatatgtatctattaaaagatctctggcagaaacgccaaaagcaggtaaaagataatgaaaatgttgtgaatgagtatagcagcgagctggaaaaacaccagctatatatagatgagactgttaactcaaatatacctactaatctgagggttcttaggagcatccttgaaaatctccgatcgaaaatccaaaaactggagagcgacgtgtcagcccagatggagtattgccgaactccttgcactgtctcctgtaacataccggtggtttcaggtaaagaatgtgaggagatcatccggaagggcggcgagacatcggagatgtatctgatccagcctgacagtagcgtgaagccttacagagtatactgtgatatgaatactgaaaatgggggctggaccgtcatccagaaccgtcaggacggatccgtcgattttggccgcaaatgggatccatacaaacagggattcggtaatgtcgccaccaacacagacggcaagaattattgcggcctgcccggggagtactggctgggcaacgacaagatttcccagcttacacgaatgggcccaactgaactgttgatcgagatggaggactggaagggggacaaggttaaggcccactatggcggttttacagtccagaacgaggccaacaaatatcaaatttctgtgaataaataccggggaacagctggcaatgcattaatggacggagcatctcagctgatgggcgaaaatcgaactatgacgattcacaacgggatgtttttttccacatatgatagagataatgatggctggctgaccagcgacccgcggaaacagtgctctaaagaagacggcggcggatggtggtataatcgttgccacgccgccaatccaaatggacggtactactggggcggacaatacacctgggatatggccaaacatgggacggacgatggtgtcgtatggatgaactggaagggctcttggtactcaatgcgcaaaatgtccatgaaaattaggccatttttcccacagcag

SEQ ID NO: 11287 - DNA, 1473 bp, synthetic construct
  misc_feature 1..1473: note = source = /note="Description of Artificial Sequence: Synthetic coding sequence"
  source 1..1473: mol_type = other DNA
atgaagcgaatggtatcttggagtttccataaactgaagacaatgaagcatcttctccttttgttgctctgcgttttcttagtaaaatcccaaggagttaatgataatgaagaaggatttttcagcgcacgtggacacagacctttggataagaagcgcgaggaggcaccaagcttgaggccagccccaccaccaatatctggtggcggatatcgtgcccgtccagcaaaagcggcagctacacagaagaaagttgaaagaaaagcaccagatgctggaggatgtttacatgcggatccagatctcggtgttctctgtccaactggatgccaacttcaagaagctcttcttcaacaggaaaggccgatccgtaattcagtggacgagcttaacaataatgttgaagccgtcagtcaaactagttcaagttcctttcaatatatgtacctcctaaaagatctctggcaaaagcggcaaaaacaagtcaaagataatgaaaatgttgtgaatgaatactcatcagaactcgaaaagcatcaactgtatatcgacgaaacggttaattcaaatataccaactaatctcagagtcttacgttcaattctagaaaacttaagatctaagatacaaaaacttgagtccgacgttagtgctcaaatggagtattgtcgcaccccatgcacggtctcctgcaacatcccagtcgtctcaggtaaagagtgtgaggaaattatccgcaaaggaggagagacttccgaaatgtatctcattcaacctgattcctcggtaaaaccatatagagtctattgtgatatgaacactgaaaatggagggtggactgtcattcagaatcgtcaagatggatcggtagattttggacgaaagtgggatccttataaacaaggattcggaaacgtcgccactaacactgatggcaaaaattactgcggactgcccggggagtattggctcggtaatgataaaatctctcagcttacccgtatgggaccaaccgaactattaatcgaaatggaggattggaaaggtgataaagtaaaagcgcattatggtggttttacagtccaaaatgaggctaataaatatcaaatttcagtaaataagtatcgagggaccgcaggtaatgcacttatggatggagcctcgcagttgatgggagaaaatagaaccatgacaattcacaatggaatgttcttttcgacttacgatcgcgacaatgacgggtggctgacttctgatccacgaaaacaatgtagtaaagaggatggcggaggatggtggtataaccgatgccacgctgcgaacccaaatggaagatactactggggaggacagtatacctgggatatggctaagcatggtacggatgacggagttgtctggatgaattggaaaggatcgtggtattcgatgcgtaaaatgtctatgaaaatcaggccgttctttccacaacaa

SEQ ID NO: 11288 - DNA, 1473 bp, synthetic construct
  misc_feature 1..1473: note = source = /note="Description of Artificial Sequence: Synthetic coding sequence"
  source 1..1473: mol_type = other DNA
atgaagcggatggtgtcctggagcttccacaagctgaagactatgaagcacctgcttctgctcctgctgtgcgtattcctggtcaaaagtcaaggagtgaacgacaatgaagaggggttttttagcgcacggggacataggcccttggacaagaagagagaggaggctccttccctgaggccagcaccccctccaatctctggtggaggttacagggctaggccagcgaaagcggctgctactcaaaagaaggttgaaaggaaggccccggacgcagggggatgtctgcatgccgatcccgatctgggtgtgctgtgccctactggatgtcagttgcaggaggctctccttcagcaagagcggcccattagaaatagtgtggatgagctcaacaataatgttgaagccgtgtcccaaacctcctcttcctcattccagtatatgtacctcctgaaggatctctggcagaaaaggcagaaacaggttaaggataatgagaatgtggttaacgagtattctagcgaactcgagaagcaccagttgtacattgacgaaaccgttaatagtaacatcccaacaaatctgcgagttctgcgatcaatcctggaaaatctccgatctaaaatccagaaattggagagcgatgtgtcagcacagatggagtactgccggacaccatgtacagtgtcttgcaacatcccggtggtgagcggaaaggagtgcgaggagatcattagaaagggtggagagaccagcgagatgtacctgatacagcctgatagctctgtgaagccttatagagtgtactgcgacatgaacactgagaacggcggatggacagtcattcagaatagacaagatggtagcgtagactttggcagaaagtgggacccctacaagcaggggttcggtaatgttgccacaaatactgatggaaagaattattgtggtctgcccggggagtattggctgggtaacgacaagatatcccagctgacgcggatgggacccactgaactcctgattgagatggaagactggaaaggtgataaggtgaaggctcactatgggggcttcaccgtacagaatgaggctaataaatatcagatatctgtgaacaagtacaggggaactgcagggaacgccctgatggatggcgcatcacaactgatgggcgaaaataggactatgactattcacaacggcatgttctttagcacatacgatagagacaatgatggatggctgacgtctgatccccgcaagcagtgcagtaaggaagacggcggaggatggtggtacaaccgctgtcacgccgctaacccaaatggccggtactattgggggggccagtacacctgggatatggcgaaacatgggaccgacgatggggtcgtttggatgaactggaagggaagctggtatagcatgagaaagatgagtatgaagatcaggccctttttcccacaacag

SEQ ID NO: 11289 - DNA, 1473 bp, synthetic construct
  misc_feature 1..1473: note = source = /note="Description of Artificial Sequence: Synthetic coding sequence"
  source 1..1473: mol_type = other DNA
atgaagcgcatggtttcctggtcttttcacaagctaaagacaatgaagcaccttctgttactgttgctttgtgtttttctcgtcaagtcacagggagttaatgacaatgaggagggtttttttagtgctaggggacaccgccccctggataaaaagcgggaagaagcacctagtctaaggccagcccctcctccaatatccgggggcgggtatagggctagacccgccaaggccgctgcgacccagaagaaggtagaaagaaaggccccggacgctggcggctgtttacatgccgatcctgacttgggagttctctgccccaccgggtgtcagcttcaggaagccctactgcaacaagaacggcctatccgaaattctgttgacgagctcaacaataacgttgaggcagtgagccaaaccagctccagctccttccagtacatgtaccttctgaaagatctctggcagaagcggcaaaaacaagttaaagataacgagaacgtggtgaacgagtattcatccgagttagaaaagcatcagttatatattgatgagaccgtcaattctaacattccaacaaatttgagggtcttacgctccatccttgagaacctccggagtaagattcagaaactagaatctgatgtgtcagcccagatggagtactgtcgcaccccttgcacagtgtcttgcaacatcccggtggtgagcgggaaggagtgtgaagagatcattaggaagggcggagagaccagcgaaatgtatctgatccagccggactcttccgtaaagccatatcgagtgtattgtgatatgaacaccgaaaacggcggatggactgtaatccagaataggcaagacggcagcgtagactttgggcgcaaatgggacccttataaacagggatttggtaacgtagctaccaatactgacggcaaaaattactgcggactaccgggggaatattggttaggaaacgacaagatctcccagcttactcgaatggggccgaccgaacttttaatcgaaatggaggattggaagggggataaagtgaaggcacattacgggggatttacagtgcagaacgaggctaataagtaccagatttccgtgaacaaatatagaggcacagcaggcaatgccttaatggacggcgcctcccagttgatgggcgaaaacaggacaatgacgatccacaatggcatgtttttttcaacttacgacagggacaacgatggatggctgaccagtgatcccagaaaacagtgttccaaagaggacggcggaggatggtggtacaaccgatgccacgccgccaacccaaacggaagatattattggggcgggcagtatacgtgggatatggccaagcacggaacagatgacggcgtggtgtggatgaattggaagggatcctggtattcgatgcgaaaaatgagcatgaagattaggccattcttccctcaacag

SEQ ID NO: 11290 - DNA, 1473 bp, synthetic construct
  misc_feature 1..1473: note = source = /note="Description of Artificial Sequence: Synthetic coding sequence"
  source 1..1473: mol_type = other DNA
atgaagcggatggtgtcctggtcgttccacaaactcaagactatgaaacacctcctgctattgctgctatgtgtattcttagtgaaatctcagggagtaaatgataacgaggaagggtttttctcagcacgggggcaccgacccctagacaaaaagagagaagaagctccctcgcttcgccccgcaccaccgcctatctccggagggggatatcgagccagacctgccaaagcggctgccactcagaaaaaagtcgaaagaaaagcccctgacgccggggggtgtcttcacgccgatccagatctcggagtcttatgtcctacagggtgtcagttacaggaagcacttcttcaacaggaaagaccgattaggaattctgtcgacgagctgaataacaatgtggaagctgtctctcaaacatcatcctcgtcattccagtatatgtatctcctaaaagacctctggcagaaacgacagaaacaggtaaaagataatgagaatgtcgtcaatgaatattcttctgaactagaaaagcatcagctttatatcgatgaaactgtaaacagtaatatccctactaacttgagagtattgcggtcaatactggagaatctccggtccaaaatccagaaacttgaatccgatgtgtctgcccagatggagtactgtaggactccttgcacagtgtcctgcaacatccccgtggtctccggaaaagaatgtgaagagataatcagaaagggaggagaaactagtgagatgtatcttatccagccagatagttcagtgaaaccatatagggtgtattgcgatatgaatacagagaacggagggtggactgtgatccaaaaccggcaagatggatctgttgactttggaaggaaatgggatccatacaaacaagggtttggaaacgttgccactaatacagatggaaaaaattactgtgggcttcctggggaatactggctgggaaacgacaagattagtcagctaacacggatggggcctactgaactgctgatcgaaatggaggattggaaaggggataaagtgaaggctcactatggggggtttacagtacagaatgaagctaataagtatcagatttccgttaataagtacagagggacagctgggaacgctctaatggatggggcttcccagctcatgggagaaaaccggactatgacaatacacaacggaatgttcttctcaacttatgatagggataatgatggatggctaacttctgatccccgaaaacaatgttcaaaagaagatgggggaggatggtggtataaccggtgtcacgcggccaaccctaacggaagatactactggggagggcaatacacgtgggacatggccaagcacggaacagatgatggagttgtatggatgaactggaaaggatcctggtattctatgcgcaaaatgtccatgaaaataagacccttttttcctcagcag

SEQ ID NO: 11291 - DNA, 1473 bp, synthetic construct
  misc_feature 1..1473: note = source = /note="Description of Artificial Sequence: Synthetic coding sequence"
  source 1..1473: mol_type = other DNA
atgaaaagaatggtaagttggagttttcataaattaaaaacaatgaaacatcttcttttattacttttatgtgtttttttagtaaagtctcaaggagttaatgacaacgaagaaggatttttttcagcaagaggtcatagaccattagataaaaaaagagaagaagctcctagtttaagaccagcaccaccaccaatttctggtggaggttatcgtgcaaggcctgctaaagcagctgcaactcaaaaaaaagtagaaagaaaggcaccagatgctggaggatgtttgcatgcagatccagatttgggtgttctttgtccaactggatgtcaattacaagaagctttattgcaacaagaaagaccaattagaaatagtgttgatgaacttaataacaatgtagaagctgtttcacaaacttcatcttcaagttttcaatatatgtatttattaaaagatctttggcaaaaaagacaaaaacaagttaaagataatgaaaatgtagttaatgaatattcaagtgaattggaaaaacatcaactttatattgacgaaactgtgaattctaatattccaactaaccttagagttcttagatcaattcttgagaacttaagatcaaagattcaaaaattagaatcagacgtttctgctcaaatggaatattgtagaactccatgtacagtttcatgtaacattccagttgtttctggaaaagaatgtgaagaaattattagaaagggaggagagacaagtgaaatgtatttaattcaaccagactcttctgttaaaccatacagagtttattgtgatatgaatactgaaaacggtggatggactgttatacaaaatagacaagatggttcagttgattttggaagaaaatgggatccatataaacaaggatttggaaatgttgctactaatactgatggtaaaaactattgtgggttaccaggagaatattggttaggaaatgataagattagtcaattaacaagaatgggaccaacagaattattaatagaaatggaagattggaaaggggataaagttaaagcacattatggtggatttacagtacaaaatgaagcaaataaatatcaaatttcagttaataaatatagaggaacagctggaaatgcattaatggatggagcatcacaacttatgggagaaaatagaacaatgactattcataatggtatgttcttttctacttatgatagagataatgatggttggttgacttctgatccaagaaagcaatgtagtaaagaagatggaggtggatggtggtataataggtgtcacgccgcaaatccaaacggaagatattattggggaggtcagtatacttgggacatggcaaaacatggaactgatgatggagttgtatggatgaattggaaaggaagttggtatagtatgcgtaaaatgagtatgaaaatacgtccattttttccacaacaa

SEQ ID NO: 11292 - DNA, 1473 bp, synthetic construct
  misc_feature 1..1473: note = source = /note="Description of Artificial Sequence: Synthetic coding sequence"
  source 1..1473: mol_type = other DNA
atgaagagaatggtttcgtggagttttcataagctgaagaccatgaaacaccttttattgttacttctatgtgtctttttagttaagagtcagggcgtgaatgacaacgaagaaggctttttttcagcaaggggtcacaggcccctggacaaaaagcgggaagaagctccatcgctgcgccccgctccgcctccaatcagcgggggtggatacagagctaggccagctaaagccgcagccacacagaagaaggtagagagaaaggcacctgatgcaggagggtgtttgcacgccgatccagacctcggtgtgctttgtcccacaggctgccagctgcaagaggccctacttcagcaggaacgcccaatcagaaacagtgttgatgaattgaacaacaatgttgaggcagtttcccaaacctcctcatcatcctttcagtacatgtatctcctcaaggatctgtggcagaagaggcagaaacaagttaaggataacgagaatgtggttaacgagtattcctccgagctggaaaagcaccagttgtacattgatgaaacagtgaacagcaatatcccaacaaacttgcgggtgctccgatctatcctggagaacctaaggtctaaaatccagaaactggaaagcgacgtgtcagctcagatggagtactgccgtaccccgtgtacagtctcctgtaatataccagtagtgagcggcaaggaatgtgaagaaatcatcaggaaggggggagaaacctcagaaatgtatctgatccagccagacagctcagtgaagccatatcgggtttattgcgatatgaacactgagaacggcggctggaccgtgatccagaatcgccaggatgggtctgtagattttggtcggaaatgggacccgtataaacagggattcggaaacgtggccaccaacaccgatgggaaaaactattgtgggttacctggggagtattggctcggcaacgacaagatctcccagctgacccggatgggtcccacagaacttctgatcgaaatggaagattggaagggcgataaggtgaaggcccattacggaggcttcaccgtgcagaacgaggctaacaagtaccaaatttctgtcaataaataccggggaactgctgggaacgccttgatggacggagcctcccagttaatgggagaaaatagaacaatgacaatacataatggcatgttttttagcacatacgacagagacaatgacgggtggcttacctccgatcccaggaaacagtgcagtaaggaagatggaggcggctggtggtacaaccggtgccatgctgctaaccctaacgggcgttattattgggggggccagtacacttgggatatggcgaagcacgggaccgatgacggcgtggtctggatgaactggaagggatcttggtacagcatgcggaagatgagtatgaaaattcgtcctttctttccacaacaa

SEQ ID NO: 11293 - DNA, 1473 bp, synthetic construct
  misc_feature 1..1473: note = source = /note="Description of Artificial Sequence: Synthetic coding sequence"
  source 1..1473: mol_type = other DNA
atgaaacgaatggtctcttggagcttccataagcttaagacaatgaaacacttgctgcttctgttactgtgcgtgttcttggtgaagagtcaaggggtgaatgataacgaggagggattttttagcgcgcggggccaccgcccgttggataagaagcgcgaagaggctccatcgctgcgcccggccccaccaccgatcagcggcggaggttatcgtgcgcgtccggctaaggccgcagccacccaaaagaaggttgagaggaaggcgcccgacgcgggcggatgcctgcacgcagatccagacctcggggtattgtgtcctacaggctgtcagctgcaggaagccctgctgcagcaggaacgtccgattcggaactctgtggatgaacttaacaataacgtggaggccgtgtctcagacgtccagcagcagcttccagtatatgtatctcctgaaggatctttggcagaaacggcagaagcaagtgaaagataatgagaacgtggtaaatgaatactccagtgaattagagaaacaccagctctatattgatgaaaccgtgaattcgaacatacctacgaacctacgtgtgctacgcagcatactagagaatctgcgaagcaagatacagaagttggagtcggacgtgtctgcccagatggaatattgccgtaccccatgcaccgtgtcctgcaatatccccgtggtcagcggaaaggagtgcgaggagataatccgaaaaggcggagagacctccgagatgtatctgattcagccagattcgagcgtgaagccttaccgcgtgtattgtgatatgaataccgagaatggaggctggaccgtgatacagaatcgtcaagatggatcagtcgatttcggtcgcaagtgggatccctacaagcaaggcttcggtaatgtggccacgaacacagacggcaagaactattgcggtctacccggagaatactggctcggaaacgataagatctcgcagctgacccgaatgggcccaacagagctgctgattgagatggaagactggaaaggtgacaaggtgaaagcccactatggaggttttactgtgcagaatgaggcgaacaagtaccagatatctgttaacaagtaccgcggaacagccggcaatgcacttatggatggagcgtcccagttgatgggcgagaaccgcaccatgaccatccacaacggtatgtttttctcgacctacgaccgagacaatgacggatggctgacaagcgatccgcgcaaacaatgctccaaggaggacggtggcggctggtggtataaccgatgtcatgctgccaatcccaacggacggtactactggggtgggcaatacacctgggacatggccaaacatggcaccgatgacggcgtcgtatggatgaactggaagggttcttggtactcgatgagaaagatgagcatgaagattcggcccttttttccccagcaa

SEQ ID NO: 11294 - DNA, 1473 bp, synthetic construct
  misc_feature 1..1473: note = source = /note="Description of Artificial Sequence: Synthetic coding sequence"
  source 1..1473: mol_type = other DNA
atgaaacgtatggtctcttggtcttttcataagctcaagacaatgaaacacctcctgcttctcctgttgtgcgtctttctggttaaaagccagggagtgaacgacaacgaggagggatttttctcagcccgggggcatcgcccactggacaagaaacgagaggaggccccctctctgaggcccgcccctcctccaatctcgggtggtggctatagggcccgtcccgcaaaggccgctgctacccagaagaaagtggagcggaaggcacctgacgcaggcggatgtcttcacgccgatccagatctgggggttctctgccccacagggtgccaactccaagaggcattgctccagcaagaacggccaattcggaacagcgtcgatgagctgaacaacaatgtcgaagcagtgagtcagactagctcttcttccttccagtacatgtatctgcttaaagatttgtggcaaaaaaggcagaagcaggtaaaggataacgagaacgtggtgaatgaatattcaagcgaattggaaaagcaccagctctatattgacgaaacagtgaactcaaacatacccaccaatcttcgcgtcctgcggtccattctggagaatcttcggtctaagattcagaagcttgaatccgacgtgtctgcacagatggagtactgccgcacaccgtgcactgtgtcgtgtaatattccagtcgtctcgggtaaggagtgcgaggaaatcattagaaaaggaggtgagacaagcgagatgtacctcattcagcctgattccagcgtcaaaccttacagagtgtattgtgatatgaataccgaaaacggaggttggaccgttatccagaatcgccaggacggttctgtcgacttcggtaggaagtgggatccttacaagcagggctttgggaatgtggctaccaatacagacggtaagaactattgcggccttcccggagagtactggctcgggaatgacaagatctcccagctgacccggatgggcccaacagagctgcttatcgaaatggaggactggaagggggataaagtcaaagcgcattacggggggttcactgtccaaaacgaagctaacaagtaccagatttccgtcaacaagtaccggggcactgcaggaaatgcactgatggatggcgctagtcaactgatgggggagaacaggacaatgaccatacacaacggaatgtttttctccacatacgaccgcgacaacgacggttggctaacaagcgatccgcggaagcagtgtagcaaggaagacgggggaggatggtggtataatcggtgccatgccgctaaccctaatggccgttactactggggggggcaatacacctgggatatggcgaagcacggcactgatgatggggttgtgtggatgaattggaaaggcagctggtattctatgcggaaaatgtccatgaagatccgcccattttttccacagcag

SEQ ID NO: 11295 - DNA, 1473 bp, synthetic construct
  misc_feature 1..1473: note = source = /note="Description of Artificial Sequence: Synthetic coding sequence"
  source 1..1473: mol_type = other DNA
atgaagcgaatggtctcctggagttttcataagcttaagaccatgaagcatcttttgttactgctgttatgcgtgtttctggttaagagccagggcgtgaacgacaacgaagagggctttttctccgcccgaggacatcgccctttagataagaagcgggaagaggcaccttccctgcggcctgcacccccccctatctcggggggggggtaccgcgcccgccccgctaaggctgctgccacccagaagaaggttgagagaaaggcgccggatgccggcgggtgcctccatgccgatccagatcttggggttctgtgtcctacaggatgtcagctgcaggaagctcttctgcaacaagaacgtcctattagaaactcagtggacgaactgaacaataatgtcgaggccgtttcccagacatcctcttcgagtttccagtacatgtatcttctcaaggatctgtggcagaaaagacagaagcaggtgaaggataacgaaaacgtggttaacgaatattcaagcgaattagagaagcaccagctgtacatagacgaaacggtgaattccaatatcccaaccaatctacgggtacttaggagtatcttggagaatctgcgcagcaagatccagaaactcgaatccgacgtttcggcccagatggagtactgtcggacaccatgtactgtttcttgtaacatcccagtcgtttctggaaaagagtgcgaggaaatcatcaggaagggcggtgaaacctcagagatgtatctgattcagcccgattcctctgtgaagccttacagggtgtactgtgatatgaatactgagaacggcggatggactgtaatccagaacaggcaggatggctctgtcgacttcggacgcaagtgggacccttataagcagggattcggtaacgtggcgaccaacaccgatgggaagaattactgtggcctccccggcgagtactggttaggtaacgacaagatatcacagttgacaagaatggggccaaccgagctattgatagaaatggaggattggaagggggacaaggtgaaggcccattacggcggtttcacagtccagaatgaggcaaataagtatcagatttcggtgaacaagtacaggggcacagctggaaacgcactaatggacggtgcttctcagctgatgggcgagaacagaaccatgacgatccacaatggtatgtttttttcgacgtacgacagggataacgatgggtggctcacttccgacccaaggaaacagtgttccaaagaagatggcggcggatggtggtataatcgctgccacgcggcaaaccccaacgggcggtactactggggcgggcaatatacctgggatatggccaagcacgggaccgatgacggcgtggtttggatgaactggaaaggttcttggtacagcatgaggaagatgagtatgaagatccgcccgttcttcccccagcag

SEQ ID NO: 11296 - DNA, 1473 bp, synthetic construct
  misc_feature 1..1473: note = source = /note="Description of Artificial Sequence: Synthetic coding sequence"
  source 1..1473: mol_type = other DNA
atgaaacggatggtgtcttggtcctttcataaattgaagaccatgaagcatctgcttctcctgttgctctgcgttttcctggtgaaatcccagggtgttaacgataacgaggagggtttcttctctgcccgcggccatcgcccactagataagaaacgcgaagaagcgccgtcgctgagacctgcacctccacctatctcaggaggtggttacagggcacgtcctgcgaaggctgcagcgacccagaaaaaagttgaacggaaggctccggacgccggtggctgtctgcatgccgatccagatcttggagttctgtgtcctactgggtgtcaactgcaagaggcgctgctgcaacaggagcgccctatccgaaatagtgtcgacgagctgaataacaatgtggaggcggtgagccagaccagctcctccagcttccaatatatgtaccttctgaaagacctgtggcagaaaagacaaaagcaggttaaggacaacgaaaatgttgtgaacgagtattcgagcgaactggagaaacatcagctgtacatcgacgagacggtgaacagcaacatcccgacaaacctccgcgttctgcgtagcatactcgaaaacctgcgcagcaaaatccaaaagctggagtcagacgtgtccgcccagatggaatattgccgcactccttgtacggtgagctgtaacattcctgtcgtcagcggcaaggagtgtgaggagataattagaaaaggtggcgaaactagcgagatgtacttaatccagccagacagcagcgttaaaccgtaccgcgtgtattgcgacatgaataccgagaacggtggctggacagtgattcaaaaccggcaggatggcagcgttgactttggtcgcaaatgggacccttacaagcaaggctttggcaatgtcgccaccaacactgatggtaaaaattattgtgggctgccgggtgagtattggcttggtaatgataagatcagccagctcacccgcatgggccctacggagctgctgatcgaaatggaagactggaaaggcgacaaggtcaaagctcactatggtggttttaccgtgcaaaatgaggcgaacaaataccagatttcagtgaacaagtatcgcggcactgctggtaacgccctgatggacggcgcgtcccaactcatgggtgagaaccgcactatgaccatccataatggaatgttcttcagcacctacgaccgcgacaatgatggttggctgactagcgaccctcgcaagcagtgcagcaaggaggatggtggcggttggtggtataaccgctgtcacgctgcgaacccaaacggccgctactactgggggggtcaatacacatgggacatggcgaaacatggcacggacgatggcgttgtttggatgaattggaaaggttcttggtacagcatgcgcaagatgagcatgaagattcgcccgttcttcccacagcag

SEQ ID NO: 11297 - DNA, 1473 bp, synthetic construct
  misc_feature 1..1473: note = source = /note="Description of Artificial Sequence: Synthetic coding sequence"
  source 1..1473: mol_type = other DNA
atgaaacgaatggttagttggtccttccataagcttaaaactatgaaacatctgctgttactcctcttgtgcgtgtttctggtgaagtctcaaggcgtcaacgacaatgaggaaggcttcttctccgcccgaggccatagaccgctagacaaaaaaagagaagaggccccctcacttcgacctgctccaccacccatctcaggcgggggatatcgagcgcgacctgccaaggccgctgccacacaaaagaaagttgaacgaaaggcgcccgatgctgggggctgcctgcatgctgacccagacctcggagtactctgccccaccggatgtcaactgcaagaagccttactgcaacaggaacggcccataagaaacagcgtggatgaactgaataataacgtggaggctgtgagtcaaacctcctctagctcgttccagtacatgtaccttttaaaggatttgtggcagaagcgtcagaagcaagtgaaggacaacgaaaacgtggttaacgagtattctagcgaactcgagaagcaccagctgtacatcgacgaaaccgttaacagcaacatacccaccaatcttcgagttctccgatccattctggagaacttgagaagtaaaatccaaaagctcgaatctgacgtgagcgcacaaatggaatattgcagaacgccgtgcacagtgtcctgcaatatcccagtggtctccggaaaagagtgcgaggaaatcattaggaaaggaggggaaacgtcagaaatgtacctgattcagccagactcgagcgtcaaaccttaccgagtgtactgtgacatgaacactgaaaatggagggtggacagtaattcaaaaccgacaggatgggtcagtcgatttcgggaggaaatgggacccttacaaacaggggtttgggaatgtcgcgaccaatacagacggaaaaaattactgtggtctgcctggcgaatactggttgggcaacgataaaatatcacagcttacccgtatggggcctaccgaactactgatcgaaatggaggattggaagggggacaaagtgaaagcacattacggtgggttcaccgtgcagaacgaggcgaataagtatcaaatctcagtaaacaagtacaggggcactgccggcaatgccctgatggatggagccagtcaattgatgggggaaaaccgaacaatgacaatccacaacggtatgttcttttctacctatgatcgcgacaatgatggatggctcacatcagacccacgaaaacagtgctctaaggaggacggcggagggtggtggtataatcgatgccacgcagcaaaccctaacgggcgctactactgggggggccagtatacttgggatatggccaagcatggcacggacgacggcgtggtttggatgaactggaaaggtagttggtattctatgcgaaaaatgagcatgaagattcgaccttttttccctcagcaa

SEQ ID NO: 11298 - DNA, 1473 bp, synthetic construct
  misc_feature 1..1473: note = source = /note="Description of Artificial Sequence: Synthetic coding sequence"
  source 1..1473: mol_type = other DNA
atgaagcggatggtgtcttggagttttcataagcttaagacaatgaaacatctactgcttctgctgttgtgtgtgtttcttgtgaagtctcaaggtgtgaatgacaatgaggaagggttcttctctgcacgcggccaccggccactcgataagaaaagggaggaagctccgtctctgaggccagcccccccccctatcagcggtgggggctatcgcgcgcgtcccgcaaaagctgcagcgacgcagaaaaaggtcgagaggaaggcacctgacgcaggaggctgcctacatgctgacccagatttgggcgtgctctgtccaacgggttgccagctccaggaggccctcttgcagcaagagcgcccaatcagaaactcagtagacgagctgaacaataacgttgaagccgtgagtcagacctcttcttccagctttcagtacatgtacctgctaaaggacttgtggcagaagcggcagaaacaggtgaaagacaacgaaaatgtggttaacgagtattcttccgagctagagaaacaccaactctacattgacgaaaccgtgaatagtaacattccaactaacctgcgcgtgctgaggagcatcctggagaatttgagaagcaagattcagaagctagagagcgacgttagcgcccagatggagtactgcagaacaccttgcaccgttagctgcaatattccggttgtttctgggaaagagtgtgaggaaattattcgcaagggcggggaaaccagcgagatgtacctgattcagccagactcttccgtcaagccctaccgggtgtattgtgatatgaacaccgagaacggcgggtggaccgtgatacagaacagacaagacggaagcgtagattttggtcgcaaatgggacccctataagcagggctttgggaatgtggccactaataccgatggaaaaaattattgtgggttaccgggggagtactggctgggtaatgataaaatttctcagctgacccgcatgggaccaactgagctgctgattgagatggaagactggaagggtgataaggtgaaagcacattatggggggtttactgttcaaaacgaggccaacaaataccaaataagcgtgaacaaatacagggggacagcgggaaacgcgctgatggatggggcctcacaacttatgggagagaatcggacaatgaccatccacaacggtatgttttttagcacttatgatcgagataatgacgggtggctgacaagcgacccacgtaaacagtgttccaaagaggatggaggcggatggtggtacaataggtgtcatgccgcaaatccaaatggaagatattattggggcgggcagtacacctgggacatggcaaaacacggcacggacgacggcgtggtctggatgaactggaagggctcctggtattctatgcgaaagatgtccatgaaaatcaggccctttttcccgcagcaa

SEQ ID NO: 11299 - DNA, 1473 bp, synthetic construct
  misc_feature 1..1473: note = source = /note="Description of Artificial Sequence: Synthetic coding sequence"
  source 1..1473: mol_type = other DNA
atgaagagaatggttagttggagcttccataagctcaagacaatgaaacatctcctgttactgctcctgtgtgttttcctggtgaaatctcagggcgtgaacgacaacgaagaggggttctttagcgcccgggggcaccgacccctcgataagaaaagggaggaagctcctagcctgaggcccgcccccccacccattagcggcggcggatacagagctcggcccgccaaagccgccgcgacacagaagaaggtagaacggaaagccccagatgccggaggttgtctacatgctgacccagaccttggagtgctatgtcctactggctgccagctccaggaagctctcctccagcaggagcgtcccattcgaaactcagtggatgagctgaataataacgtcgaggcggtgagccagacctcaagctcctcattccagtacatgtacctgctgaaggacctatggcagaaacgtcagaaacaagtcaaggataacgagaacgtcgtaaatgagtactcgtctgagttagagaagcaccagctgtatattgacgagaccgtgaattccaacataccaactaatttgcgagtgttgcgctcaattctggagaatctgcgctctaagatccagaagcttgagtctgatgtctctgcccagatggaatactgccgaactccttgcaccgtctcgtgcaacatcccggttgtgtccgggaaagagtgtgaagagattatcaggaaaggtggagaaaccagcgaaatgtacctgatacaaccggattccagcgtcaaaccctatagggtgtactgcgacatgaacacagagaacggagggtggaccgttattcagaatagacaggatggctccgtcgattttggcagaaaatgggacccctacaagcaaggttttggcaacgtggctaccaatacagacggcaaaaactactgcgggctgcctggcgagtattggttggggaatgataagatctcccaacttacaagaatgggcccaactgagcttcttatcgagatggaggactggaaaggtgataaagtgaaggcccattacggtggattcactgttcaaaacgaggctaacaaataccagattagcgtcaacaagtatcgcggtacggccggaaacgctctgatggacggcgcaagtcaacttatgggagaaaaccggacgatgaccattcataacggaatgttcttcagtacctacgatcgtgacaacgacggttggctgacgagcgacccacggaaacaatgttcaaaagaggacggcggcggctggtggtataatcggtgccacgccgccaatcccaacggccggtattactggggaggacagtatacctgggacatggctaagcacggcaccgacgacggggttgtctggatgaattggaagggctcttggtactcaatgcgcaaaatgagcatgaagatccgtccatttttcccccagcag

SEQ ID NO: 11300 - DNA, 1473 bp, synthetic construct
  misc_feature 1..1473: note = source = /note="Description of Artificial Sequence: Synthetic coding sequence"
  source 1..1473: mol_type = other DNA
atgaagcgtatggtcagctggtcttttcacaagttaaagacgatgaagcatctgttgttactcctactttgcgtgttccttgtgaaaagccagggtgttaatgataatgaagaaggtttcttctccgcccgcggtcaccggccgctggataaaaaaagagaagaagctccatctctaaggcccgcaccccctcccatctctggaggtggctatagagcccggccggcaaaggctgccgcgactcagaagaaggtggagagaaaagcccctgacgcaggtggctgcctgcacgctgacccagacttaggcgtcctctgtccaacaggatgccagctgcaggaggccctcctgcaacaggaacggcccattagaaattctgttgatgaactgaacaacaacgtggaagccgtgtctcagacttcgagctcctctttccaatacatgtacttattaaaagacctgtggcaaaaacgccagaagcaggtgaaggacaacgaaaacgtggtcaatgagtattcgtctgagctggagaaacaccagctgtacatcgatgagactgtcaacagcaacataccaacaaacttgcgggtattgcgaagtatcctggaaaacctgagatcaaagatacaaaaactggagtcggacgtaagcgcacagatggagtactgtaggacaccctgtactgtgagttgcaatatcccagtggtgtcaggtaaggagtgtgaggagattatccgaaaaggtggtgagacatcagagatgtacctcatacagccagatagttcagtgaaaccttatagggtatactgcgatatgaacactgaaaatgggggctggacagtcatccagaatcggcaagacgggagcgtcgatttcggcaggaagtgggacccatataaacagggttttggtaacgtcgccaccaatactgacggaaagaattattgcggtctgcccggcgagtattggttgggaaacgacaagatcagtcagctgacaagaatggggccgactgagctgttgattgaaatggaagactggaagggagacaaagtaaaggcccattacggaggctttaccgtccaaaatgaggctaacaaatatcagatcagcgttaataagtatcgaggcacggcggggaatgcgctgatggatggcgccagccagttgatgggcgagaaccggacaatgacgatacacaacggcatgttttttagtacatacgaccgcgacaacgatggatggctgacgtcagaccccagaaaacagtgtagtaaagaggacggaggggggtggtggtataacagatgccacgccgcaaacccgaatgggcgatattactggggtggacaatatacctgggacatggccaaacacgggacagatgatggtgtcgtgtggatgaactggaaagggtcatggtactctatgaggaagatgtctatgaagatcagaccatttttcccccaacag

SEQ ID NO: 11301 - DNA, 1473 bp, synthetic construct
  misc_feature 1..1473: note = source = /note="Description of Artificial Sequence: Synthetic coding sequence"
  source 1..1473: mol_type = other DNA
atgaaacggatggtaagttggagcttccataaactgaagactatgaagcatctgctgttgctgttactgtgcgttttcctcgtaaagtcccagggggtgaacgataacgaagagggtttttttagtgcaaggggtcatcggcctctggacaaaaaacgggaagaagctccctctttacgtcctgcacctccacccataagcgggggaggttaccgggcgaggcccgccaaagcggccgcaactcagaagaaagtcgaaagaaaggcgcctgacgccggcggctgtttacatgcggaccccgatctaggtgtactgtgtcccacaggatgccagctgcaggaagctctcttgcagcaggagaggccaatacgaaactccgtggacgagttgaataacaatgtggaggctgtgtcacagacttcaagttccagctttcagtacatgtatctgctgaaagacctctggcagaagcgccagaaacaggtaaaggacaacgagaacgtggtgaatgagtacagcagcgaactggaaaagcaccagctgtatatcgacgagaccgtgaattccaacatccctacaaatctgcgggttctgcgctctatccttgagaatctcaggagcaagatccagaaactggagagtgacgtatcagcgcaaatggaatactgcagaacgccctgtactgtcagctgtaatattcccgtagttagcggcaaagagtgcgaggaaatcatcaggaaggggggcgagacatcggagatgtacctcattcaaccggattcaagcgtgaagccctaccgcgtatattgcgacatgaacactgaaaatggaggatggacagtgatccagaacagacaggacggcagtgtagacttcggacgcaagtgggatccatataaacagggattcgggaatgtggccaccaataccgacggcaagaattattgcggcctccccggtgaatactggctgggaaacgataagatctctcagctgacccgcatgggacccaccgaattgctgattgagatggaggattggaaaggggataaagttaaagcacattacggaggcttcacagtccagaatgaagcaaataaataccaaatctccgtgaataaatatcgcggaaccgccggcaatgcgcttatggatggcgcgtcccagctgatgggcgagaatcgtaccatgacaatccataacggcatgtttttttcaacatacgaccgggacaacgatggctggcttacctcagacccccgcaagcagtgctccaaggaggacggcggcggctggtggtacaaccgatgtcatgccgccaaccccaacgggcgctattactggggcggacagtatacttgggacatggccaaacatggcacagacgatggcgtggtgtggatgaactggaagggctcttggtactctatgcgcaagatgtcgatgaagattcgcccgttttttccccagcag

SEQ ID NO: 11302 - DNA, 1473 bp, synthetic construct
  misc_feature 1..1473: note = source = /note="Description of Artificial Sequence: Synthetic coding sequence"
  source 1..1473: mol_type = other DNA
atgaaaagaatggtgagctggtcatttcacaaactgaagacaatgaagcacctcctgcttcttttgctttgcgtcttcctggtaaagagccagggagtgaacgacaacgaagagggcttcttcagtgccaggggacatcgccctctagataaaaagcgtgaggaggcaccttccttgcggccagcccccccgcccattagtggaggcggttacagggcgcggcccgctaaggccgccgccacacaaaagaaggtcgagcgcaaagcccctgatgccgggggttgtctacatgccgaccccgatctgggcgttttgtgtcccaccggatgtcagctacaggaggctcttctgcagcaagagcgccccatccgaaactccgtggacgaactgaataacaatgtggaggccgtgagccagacttcgtcctcatccttccagtatatgtacctgttgaaagatttatggcaaaagcgacagaaacaggtaaaagacaatgagaacgttgtgaatgaatacagcagtgaactcgagaaacatcaattgtacattgacgaaacagtgaatagcaatatcccaactaacctgcgcgtactgcggtctatcctggaaaacttgcgaagtaagatacagaagcttgagagcgacgttagcgcgcagatggaatactgcaggactccgtgtactgtgagctgtaacattccagtcgtttccggaaaagagtgcgaagagattatccgcaaagggggcgaaacttcggaaatgtacctcatccagccggattcttcggtgaagccttacagggtctactgtgatatgaacactgaaaacggagggtggactgtcatccaaaatcggcaggatggaagtgtggatttcggccgcaagtgggacccatacaagcaaggctttggcaatgtcgctacaaacactgacggcaaaaactattgcggtctcccaggcgagtactggctcggaaatgacaaaatctcccaattgacacggatgggtcctaccgagctgctcatcgagatggaggattggaaaggcgacaaggttaaagctcactatgggggatttacagtgcagaatgaggctaataaataccagatttctgtcaacaaatacaggggaaccgcaggcaatgccctcatggatggtgcttcccagcttatgggtgaaaacaggactatgactattcataacgggatgttctttagcacctatgaccgggacaatgatggctggctgacttccgacccgaggaagcagtgctccaaagaagatggcggaggctggtggtataatcgatgtcacgccgctaaccctaacggccggtactactggggtggtcagtacacctgggatatggctaagcatggcaccgatgatggagttgtgtggatgaattggaagggcagctggtattccatgaggaaaatgtcgatgaagatcagaccttttttcccccagcag

SEQ ID NO: 11303 - DNA, 1473 bp, synthetic construct
  misc_feature 1..1473: note = source = /note="Description of Artificial Sequence: Synthetic coding sequence"
  source 1..1473: mol_type = other DNA
atgaaacgcatggtttcttggtccttccataagttgaaaacaatgaagcacctgttgcttctcctcctgtgtgtctttctagtgaagagtcagggcgtgaatgacaacgaagagggctttttctctgccagaggtcatcgaccccttgataagaaaagggaagaggcacccagcctgcgccctgctcctccaccgatatccggtgggggctatcgcgcaaggcctgctaaggccgccgctacgcaaaaaaaggtggagaggaaggccccagatgcagggggatgtctgcatgccgatccagatctgggagtcctgtgtccgactggatgccagcttcaagaagctctgttacaacaagaacggccaatcaggaattccgttgatgagttgaataacaacgtcgaagccgtctcccagacttccagctcgtcgttccagtacatgtatttgctcaaggacctatggcagaaacggcagaagcaggtgaaagataatgaaaacgtcgttaatgaatactcgagcgaattggaaaaacaccaactttacatcgatgaaacagtgaactccaatatccccacaaacctgcgtgtgcttagaagcattttggagaatctcaggagtaagatccagaagctagagtctgacgtatctgctcagatggagtattgtaggactccttgcacggtgtcctgcaacattcccgtcgtgtccgggaaagagtgcgaagagatcatccggaagggcggggagactagcgagatgtacctgatccaaccagatagctccgtgaagccatatagagtgtactgtgacatgaataccgagaacggaggctggacggtgattcaaaacaggcaggacggatcagtggattttgggagaaagtgggacccttacaagcagggttttggaaatgtcgccacgaacacagatgggaagaactactgtggcctgcctggtgagtattggctgggaaacgataagatctcccagctgacccggatgggtccaaccgaactcctgattgagatggaagactggaagggggacaaagtgaaagcccactacggaggcttcactgtgcagaacgaggcgaacaagtaccagatttctgtaaacaagtatcgaggaacggccggcaatgctctcatggatggggcgtcccagctcatgggtgagaacagaaccatgactattcataacgggatgttcttcagtacctatgatagggacaacgatggctggcttaccagcgacccccgcaaacagtgttctaaggaggatgggggcggctggtggtataatcggtgtcatgcagcaaacccgaacgggaggtactattggggcggacagtacacatgggatatggcgaaacacgggaccgatgatggggtagtgtggatgaattggaagggcagttggtacagtatgaggaaaatgtccatgaaaatacgccccttctttcctcagcag

SEQ ID NO: 11304 - DNA, 1473 bp, synthetic construct
  misc_feature 1..1473: note = source = /note="Description of Artificial Sequence: Synthetic coding sequence"
  source 1..1473: mol_type = other DNA
atgaagagaatggtgagctggtcttttcacaaattgaagacaatgaagcacctgcttctgcttcttctgtgcgtctttctggtcaaatcacaaggagtgaatgataatgaggaagggttcttcagcgcaagaggccatagaccgttggataaaaaaagagaggaagcacccagcctgcggcctgctccgccccctatctctggcgggggctacagagcccggcccgcgaaggcagcggccacccagaagaaagtcgagagaaaagcccctgatgcggggggatgcctccatgccgatcccgatttgggtgtgctgtgtcccactggttgccagctgcaggaagcgttgctccaacaggagaggccaatcagaaactctgttgatgagttgaacaacaacgtcgaggccgtgagccagaccagttcaagttccttccagtatatgtaccttctgaaggatctttggcaaaagcggcagaaacaggtgaaggacaacgagaacgtggtaaacgagtactcctcagagctcgagaaacatcagctttatatcgatgagaccgtgaattctaacattcccaccaatctgcgagtgctgcggagcatactcgaaaatctcaggagtaaaatacagaaactcgagagcgatgtgtccgcccaaatggagtactgtcgcaccccgtgcactgtcagctgcaacatccctgtggtcagcgggaaagaatgtgaggaaatcatcaggaaaggaggagagacctccgagatgtaccttatccaaccagacagcagtgttaagccctatagggtatattgcgacatgaatacagagaatggtgggtggaccgtgattcagaacagacaggacggcagtgtggattttggaaggaaatgggacccgtacaagcaggggttcggtaatgttgccactaataccgacggaaaaaattactgtggcctgcctggtgagtattggctcgggaacgacaagattagtcaactcactcggatgggacccaccgagctgcttatagagatggaggactggaagggggacaaggtgaaagcgcattatggggggttcaccgtgcagaacgaagccaacaagtatcaaatctccgtaaataagtaccgcggtaccgccggtaatgcccttatggatggtgcgagtcagctgatgggagaaaatcggactatgaccattcacaatgggatgtttttctccacctatgacagggacaacgacggttggctcacctccgatccccgcaagcagtgctccaaagaggatggcggcggctggtggtacaaccggtgtcacgccgcaaaccccaacggccggtactactggggtggacagtatacatgggacatggctaaacatggaaccgacgatggcgtggtgtggatgaactggaaaggctcctggtattctatgcggaaaatgagcatgaagatccggccattctttccccaacag

SEQ ID NO: 11305 - DNA, 1473 bp, synthetic construct
  misc_feature 1..1473: note = source = /note="Description of Artificial Sequence: Synthetic coding sequence"
  source 1..1473: mol_type = other DNA
atgaaacgaatggtgtcttggagttttcacaaactaaagacaatgaagcatttgctgcttctgctcctctgcgtctttttggtcaaaagccagggagtcaacgataatgaagaagggtttttctccgcccgcggccacaggccactagataagaagcgcgaagaagctccgagtcttcgccctgctccgccgcccatcagtggaggcggttatagagcgagacccgctaaggccgctgcaacccagaaaaaggtcgaacgcaaggcacccgacgctggcggttgtctgcatgccgatcctgacctgggagttttatgccccacaggatgtcagctgcaggaggcactgctgcagcaggaacgtccaattcgaaactccgtggatgaattgaataataacgtcgaggcggtcagtcagacctctagctcatcctttcagtacatgtacttgcttaaggacctctggcagaagagacagaaacaggtgaaggataacgaaaacgtcgtgaatgagtactcatccgagctagagaagcatcagctatacatagacgagactgtgaactctaatatccctaccaatttgagagtgttgaggtcaattctcgagaacctgaggagtaagattcaaaagctcgaatctgacgtcagcgcgcagatggagtactgccgtacaccgtgcactgtgtcatgtaatataccagtggtgtctgggaaggagtgcgaggaaattatccgcaaaggcggggagacaagtgaaatgtaccttatccagcctgactcctcggtgaagccttacagagtatattgcgacatgaacaccgagaacggaggatggactgtgatccagaacagacaagatggcagtgttgattttggccgcaaatgggacccatataaacagggattcggcaacgtggcaactaacaccgacggtaagaactattgtggactccctggagagtattggctcggcaacgataagattagccaactcaccagaatgggccctaccgagctgcttattgagatggaggattggaaaggcgacaaagtcaaggcccattacgggggtttcactgtgcaaaacgaggccaataaatatcagatttctgttaataaataccgagggacggcgggcaatgctctaatggatggggcaagtcagctgatgggtgaaaacagaaccatgactatccacaacggaatgtttttctccacctatgatcgagataacgatggctggctgacttccgacccccgcaagcagtgctcaaaagaagacgggggcggatggtggtataatagatgccacgccgcaaaccccaatggccgctactactggggcggtcaatacacctgggacatggccaagcacggtaccgacgatggggtcgtgtggatgaactggaaagggagctggtacagcatgagaaaaatgagcatgaagattaggccatttttcccacagcaa

SEQ ID NO: 11306 - DNA, 1473 bp, synthetic construct
  misc_feature 1..1473: note = source = /note="Description of Artificial Sequence: Synthetic coding sequence"
  source 1..1473: mol_type = other DNA
atgaagcgcatggtgtcttggtccttccataagttgaaaacgatgaagcacttgctcctgctccttctctgtgtgtttctcgtcaagtcgcagggcgtcaacgataatgaggagggctttttcagcgctcgggggcaccgacctctggataagaaaagagaagaggccccatcactcagaccagccccgccacctatcagtggcggcggctatcgggcacgacctgcaaaggctgccgctacccaaaagaaagttgagcggaaggctcccgacgccgggggatgtctccatgctgatccagatctaggtgtgttatgtcccacagggtgccaactgcaagaggccctgctccagcaggaaagacccatccgaaattcagtggatgagctgaataacaacgtagaagcggtgtctcagacctcatccagttcctttcagtacatgtatctgctgaaagatctgtggcagaagcgacaaaagcaggttaaggacaacgagaatgtggtgaatgagtacagcagcgaacttgagaaacaccagctctacattgatgagaccgtgaattctaacatccctacaaatctgagggtcctccgatctattttagagaacctgcggtccaaaatccagaaactggaatctgatgtgagtgcccagatggaatactgcagaaccccttgcaccgtgagctgtaacatccccgtggtaagtgggaaagaatgcgaagagatcatccggaagggaggcgagacctcggagatgtatctgattcagccagacagttcagtgaagccgtaccgggtgtattgcgacatgaacactgagaacggtgggtggacagtgatacaaaacaggcaagacggctccgtcgactttgggaggaaatgggacccttataagcagggcttcggcaacgtcgccacaaatacagatggcaagaattactgcgggctcccgggagaatattggctcggcaatgataaaatttctcaattgactcgcatggggcctaccgaactgctgatagagatggaggactggaaaggggataaggtcaaagctcattacggagggtttactgtgcagaacgaggcgaataagtatcagattagtgtgaacaagtatcgggggaccgccgggaatgcgctgatggacggggcctctcagcttatgggtgaaaacaggacaatgaccatacacaacggaatgtttttcagcacctatgatagggacaatgacggctggctaacatctgatccccggaaacagtgtagcaaagaagacggggggggctggtggtataaccggtgccatgccgcaaacccaaacggacggtattattggggtggccaatatacctgggacatggcaaagcacgggacggatgacggagtggtttggatgaattggaagggatcttggtattcaatgcgcaagatgagcatgaagattaggccattcttcccgcaacag

SEQ ID NO: 11307 - DNA, 1473 bp, synthetic construct
  misc_feature 1..1473: note = source = /note="Description of Artificial Sequence: Synthetic coding sequence"
  source 1..1473: mol_type = other DNA
atgaagcgaatggtctcgtggtcattccacaaactgaaaacaatgaagcatcttctgcttcttctcttgtgtgtctttctggtcaaaagtcagggtgtgaatgacaatgaggagggcttcttttccgctaggggacatcgccccctcgataaaaagcgcgaagaagccccaagccttagaccagcgcctccacccatatccggaggcgggtaccgagcacggcctgccaaggccgccgcaacacaaaagaaggtggagaggaaagcccctgatgcaggaggatgcctgcacgccgatcccgacctgggagtactgtgccctaccgggtgccaactgcaagaagccctgctccaacaggaacggcccatcaggaacagcgtcgacgagttgaataataacgtggaggccgtgtctcaaacatcatcctcgtccttccagtacatgtacttgctgaaggacctttggcaaaaacgccaaaaacaagtcaaagataacgagaatgtcgtgaatgagtattcttcagagctggagaaacatcagttgtatattgacgaaactgtgaactcaaatattcccactaacttaagagtgctgaggtctatcctggaaaacttgcggtctaagatccagaagctggagtcagacgtatctgcccaaatggaatattgtaggacgccatgcaccgtgtcatgtaacatccctgtcgtaagcgggaaggaatgtgaagaaataatccggaaggggggcgaaaccagtgaaatgtatcttattcagccagatagttcggtgaagccctatagagtgtactgcgacatgaatactgaaaacgggggttggacagtaatacaaaaccggcaggacggtagtgtggactttgggcgcaaatgggacccctataaacaggggtttgggaacgtggcgaccaataccgatggaaagaattactgcgggttgcctggggagtattggctgggtaacgacaagatttctcagttgacccgcatgggccctacagaattactgattgagatggaggactggaagggcgacaaagtcaaggcgcactatggggggtttacggtccagaacgaagcaaataaatatcagataagtgtcaataagtaccggggaacagccggtaacgcccttatggacggagcatcacagctgatgggcgaaaatcgcaccatgaccatccacaacggcatgttcttttccacatacgatcgagacaacgacggatggctgacgagcgaccctaggaaacagtgcagtaaggaggatgggggaggctggtggtataatcgctgccatgccgccaatcctaatggccggtactactggggcggacagtacacttgggacatggcaaaacacggcacagacgacggagtcgtttggatgaattggaagggcagctggtactcgatgcggaagatgagtatgaagatcagaccctttttccctcaacag

SEQ ID NO: 11308 - DNA, 1473 bp, synthetic construct
  misc_feature 1..1473: note = source = /note="Description of Artificial Sequence: Synthetic coding sequence"
  source 1..1473: mol_type = other DNA
atgaagcgcatggtctcatggtctttccataagctaaaaacaatgaagcatcttcttctgctgctgttatgtgtattcttagtcaagagccagggcgtgaatgacaatgaagaaggtttcttcagcgcaagaggtcaccgacccctggacaaaaagagagaggaggcaccgtcactgaggcctgcccctcccccaatatctggaggaggctacagagcccgccctgcaaaggctgctgccactcagaagaaggtggaacgcaaggcgcccgacgctggagggtgcttgcatgctgaccctgatctgggcgtgctgtgccctacaggatgccagctgcaggaagcgttactgcaacaggagcggcccatccggaactccgtggatgaattgaacaacaacgtcgaggccgtctctcaaacatctagtagctcctttcagtatatgtacttgctgaaagacctgtggcagaaaagacaaaagcaggtgaaagacaacgaaaacgtggtgaacgagtattccagtgagctggaaaagcaccagctgtatatagacgaaaccgtgaactcaaacatcccaacgaatttgcgggtgctccggtctatacttgaaaatctgcgatcgaagattcagaagctggagagcgacgtctccgcgcagatggagtattgtaggacaccatgcactgtctcttgtaatattcctgtcgtgagcgggaaggagtgcgaggagatcattcgaaagggcggggaaacctcagagatgtatctgattcagcctgactcctccgtaaaaccctacagagtttattgcgacatgaacaccgaaaatggcgggtggaccgtgattcaaaaccgtcaagacggctccgtggacttcggacgcaagtgggacccctacaaacagggctttggaaatgttgctaccaatactgacggaaagaattattgcggcctccccggcgagtactggctaggtaatgacaagatttcacagctgacccggatgggtcctacagagcttctaatcgaaatggaagattggaaaggtgacaaggtcaaggcgcactacggcggattcaccgtgcagaacgaggccaacaagtatcagatcagtgtcaataagtaccgcgggactgcgggaaatgcactgatggatggagcctctcagctaatgggcgaaaatagaaccatgaccattcacaatggcatgtttttctccacttacgacagagacaacgacgggtggctgacttctgatccaaggaaacagtgtagtaaagaggatggcgggggatggtggtataatcgctgccatgctgctaacccaaacggaaggtactactggggaggtcagtatacttgggacatggcaaaacacgggaccgacgacggcgtggtgtggatgaattggaagggcagctggtactcaatgaggaagatgagcatgaaaatccgcccgttttttccacagcag

SEQ ID NO: 11309 - DNA, 1473 bp, synthetic construct
  misc_feature 1..1473: note = source = /note="Description of Artificial Sequence: Synthetic coding sequence"
  source 1..1473: mol_type = other DNA
atgaaacgaatggtgtcttggtcctttcacaagttgaagaccatgaagcaccttctcctgctgctgctgtgtgtgttcctcgtaaaaagccagggagtgaacgacaatgaagaaggtttcttttcagccaggggccaccgccctctggataagaaacgggaagaagcgccatctctgcgtcctgctcctcctccgatcagcggaggtggatacagggctcgccctgctaaagctgctgctacccagaaaaaagtggaaagaaaggctccagacgctggcggatgcctgcatgctgatccagaccttggcgtgctgtgccctacaggttgtcagctgcaagaagctctcctgcagcaggaacggccaatcaggaattcagtggatgaactgaacaacaatgtggaagctgtgagtcaaacctccagcagcagcttccagtatatgtatcttctgaaggacctgtggcagaaaaggcaaaagcaggtcaaggataatgaaaacgtcgtgaacgagtatagctccgagctggaaaaacaccaactgtacatagacgagactgtaaacagcaacattccaactaacctgagggtccttcgcagcatcctggaaaacttgaggagcaaaattcagaaattggagtcagatgtctcagcgcaaatggagtactgtcggaccccatgcaccgtcagctgcaacatccctgtggtgagcggaaaggaatgcgaagaaatcatacggaagggcggggagaccagcgagatgtaccttattcagcccgatagttctgttaagccgtacagagtgtactgtgacatgaacactgagaacggaggctggactgtgatccaaaacaggcaagacggcagcgtggatttcgggagaaaatgggacccatacaagcagggctttggaaatgtggctaccaacacggatggaaagaattattgtggactccccggtgaatattggcttggaaacgacaaaatcagtcagctcacccgcatgggccctacagaactgctgatagagatggaggattggaaaggcgataaagtgaaggctcattatggagggttcaccgtccagaatgaggcaaacaagtaccagataagcgtgaataaatatagagggaccgctggcaacgcactgatggatggcgcctcccaactgatgggcgaaaaccggaccatgacaatccataacggcatgtttttcagcacatatgatagggataacgatggatggctgacatcagacccgaggaaacaatgttcaaaggaggacggaggaggatggtggtacaataggtgtcacgctgcaaacccaaatggacgctactactggggagggcagtatacctgggacatggcaaagcatggcacagacgatggagttgtctggatgaactggaaaggaagctggtactccatgcggaagatgagcatgaaaatcagaccattctttccgcagcag

SEQ ID NO: 11310 - DNA, 1473 bp, synthetic construct
  misc_feature 1..1473: note = source = /note="Description of Artificial Sequence: Synthetic coding sequence"
  source 1..1473: mol_type = other DNA
atgaaaaggatggtgagttggtcctttcacaagttaaagacaatgaagcacctattactgctgctgttgtgcgtcttcctggtgaagagtcagggtgtgaatgacaatgaagaaggctttttcagcgcccgcgggcaccgcccacttgacaagaagagagaggaggcccctagcctgcgaccagctcctcctcctatcagtggagggggatacagagcccggcccgctaaggccgcagctacacagaagaaagtggagcggaaggcccccgacgcagggggatgcctgcacgccgatccagatctgggggtactctgtccaaccggctgtcaactgcaagaggccctgctgcagcaggagcgacccattcgtaactccgtggatgaactaaataataatgtcgaagccgtttcacagacatcttccagctcctttcagtatatgtatctgctgaaggatctatggcaaaagaggcaaaagcaggttaaggacaatgaaaacgtcgtaaatgaatactcttccgagcttgagaaacaccagttatatatcgacgagacagtgaactctaacattcccaccaacctgcgtgtgctccgatcaatactggagaatctccggtctaagattcaaaagctggagtctgatgtgtccgcacaaatggagtactgtcgaacaccttgcaccgtgtcttgtaacatccccgtggtttccggtaaggagtgtgaggagattatccggaagggaggggagacctccgaaatgtaccttatccagcctgacagtagcgttaaaccatatcgagtatactgcgacatgaacaccgaaaatggcgggtggactgtgatccaaaacagacaggacggcagcgtggacttcgggcggaagtgggacccatacaagcaaggctttggcaacgtggctactaataccgatggtaaaaactactgcggactgcccggcgaatactggcttgggaatgacaagatctctcagctgacccgcatgggcccaactgagctgctcattgagatggaggactggaagggcgataaagtgaaggcccactacggtgggttcacagtgcagaatgaggccaacaaataccagataagcgttaacaaataccggggaaccgcagggaatgcactcatggatggcgccagtcagctgatgggggaaaacaggactatgacaatacataatggcatgtttttttctacctatgacagggacaacgacggatggcttacatccgatccaagaaaacaatgttctaaggaagacggggggggatggtggtacaatagatgccacgctgccaaccccaacgggcgctattactggggcggtcagtacacttgggatatggccaaacacggcacagacgatggggtggtctggatgaactggaaaggctcttggtatagtatgcggaagatgagcatgaagatacggccttttttcccccagcag

SEQ ID NO: 11311 - DNA, 1473 bp, synthetic construct
  misc_feature 1..1473: note = source = /note="Description of Artificial Sequence: Synthetic coding sequence"
  source 1..1473: mol_type = other DNA
atgaaacgcatggtgagctggagcttccataagttgaaaaccatgaagcacctcctcctcctgttgctgtgcgttttcctggtcaagtcccagggggtcaatgacaatgaggaggggtttttttccgctagaggtcatcgaccccttgataagaagcgagaagaagcccctagcctgaggcctgccccgcctcctatcagcggaggcggctacagagctcggccggccaaagcagctgcaacacagaagaaagttgagcgcaaggctcccgacgccggaggatgcctccatgccgatcccgatttaggagttctgtgcccaaccgggtgtcagctgcaggaagctctgctacagcaagaacgaccaatcagaaatagtgtggacgagctaaataataatgtggaggccgtatctcagacaagctcgtcctcattccagtacatgtatctgttgaaagatctgtggcagaagaggcagaaacaagtcaaagataatgagaatgtggtgaatgaatacagcagcgagttggagaagcatcagctgtacattgacgagactgtgaattcgaatatccccacaaacttacgggttctccggtccattctggagaacctaaggtccaagatacagaagctggagagcgatgtgtctgcacaaatggagtattgcaggacaccctgtactgtctcttgtaatatcccggttgtcagcggaaaggagtgcgaggagattattcggaaaggaggcgagaccagcgagatgtacctcattcaacctgactcttccgttaaaccttacagagtgtactgtgacatgaacactgagaatggtggatggacagttatccaaaaccgccaagatgggtctgttgattttgggcggaaatgggacccatacaaacaggggtttggtaatgtggcaaccaatacggacgggaagaactactgcggcctgcccggagaatactggctggggaacgacaagatcagccaactgacaaggatgggacccaccgagcttttgatcgagatggaggattggaagggggataaagtcaaggcacactatggggggtttacagttcagaatgaggccaataaataccagattagcgtgaataaataccgcgggaccgcaggaaacgctctgatggatggagcctcacagcttatgggagaaaataggacaatgacaattcacaacggcatgtttttttccacctacgatagggacaatgatgggtggctaaccagcgacccaaggaagcaatgctctaaagaggatgggggggggtggtggtataaccggtgccatgctgctaaccccaacggcaggtactactggggtggccagtacacatgggacatggcaaaacatgggaccgacgacggggttgtgtggatgaactggaaaggatcatggtattcaatgagaaagatgtccatgaagattagaccattttttccacagcag

SEQ ID NO: 11312 - DNA, 1473 bp, synthetic construct
  misc_feature 1..1473: note = source = /note="Description of Artificial Sequence: Synthetic coding sequence"
  source 1..1473: mol_type = other DNA
atgaagcggatggttagctggtcatttcacaaacttaaaacgatgaaacatttgttactgcttttgttgtgtgtatttttggtgaagtcacaaggtgtcaatgacaacgaagagggattcttctcagcgagaggacatagaccgctcgataaaaagcgggaggaagcgccttcgctgcgtccggcgccaccgccgatctcaggaggtggttatcgcgcccgaccggcgaaagccgccgcaacccagaagaaagttgagcgtaaggcgccggatgcaggaggatgccttcatgccgatccggacctgggcgtgttatgcccaacaggctgtcagttacaagaagccctgttgcaacaggaaagaccgattcgcaatagcgtagatgaactgaataacaatgtggaagctgtgtcgcagacctcttcctcgagtttccaatatatgtatcttttgaaagatctttggcagaagcgccaaaaacaggtgaaggacaatgagaatgtggtcaatgaatatagcagtgaattggagaaacaccagctgtatattgacgaaaccgtgaacagtaacatccctaccaaccttcgagtactgcggtcaattttagagaatctgcggtcaaagatccagaaacttgaaagcgatgtgtcagcccaaatggaatattgtagaacgccatgcacggttagttgcaatattccagtggttagcggtaaggaatgtgaagaaatcatcagaaaggggggggaaactagcgagatgtatctaattcagcctgattcatcagtaaaaccgtatcgtgtctactgcgacatgaatactgaaaatggaggatggacagtcattcaaaatcgccaagatggttccgtcgatttcgggagaaagtgggatccgtataagcaaggctttggtaacgtcgctacgaatacggacggtaagaattattgcgggcttcctggcgaatactggcttggcaatgataaaatctcgcaactgactaggatggggcctacggaactgcttatcgaaatggaagattggaaaggcgataaagtgaaagcacactatggcgggtttacagtgcaaaacgaagccaataaataccagatttcagttaataaatatagaggtacagcgggaaatgcacttatggatggggctagccagttaatgggggaaaatcggactatgacgattcacaatgggatgttcttctctacatacgaccgtgacaatgatggatggttgacgtctgatccgcgcaaacaatgtagtaaagaagatggcggcggatggtggtacaatcgttgtcacgcagccaatccaaatggtagatactattggggtggacaatatacatgggacatggcgaagcatggtacagatgatggtgtagtatggatgaactggaaaggctcctggtattcaatgcggaagatgtctatgaaaatccgtccatttttccctcaacaa

SEQ ID NO: 11313 - DNA, 1473 bp, synthetic construct
  misc_feature 1..1473: note = source = /note="Description of Artificial Sequence: Synthetic coding sequence"
  source 1..1473: mol_type = other DNA
atgaagcgcatggtgtcttggagtttccacaagctcaagaccatgaagcacctgttgctgttgttgctttgtgtgtttctcgtgaagtcacagggtgttaacgataatgaggagggatttttctctgccagaggtcacaggcctctcgataagaaaagagaggaggccccaagcctgcgccctgccccacctcccatatcaggaggaggatacagggcccgccctgctaaagccgctgctacgcagaagaaggtagagagaaaggcgccagatgcaggaggctgcctgcacgctgaccctgacctcggtgttctgtgtccgaccggatgccagctgcaggaagcactgctgcagcaggaaagaccaattaggaacagtgttgacgaactcaataataacgtcgaagcagttagccagacatcctcttccagtttccaatatatgtacctgttgaaggatctgtggcaaaaaagacagaagcaggtaaaggacaacgaaaatgtagtgaatgagtattctagtgagcttgagaagcatcagctgtacatagacgagacagttaatagtaacatccccactaacctcagggtgctgagatcaatcttggaaaatctccgcagcaagatccaaaaattggaatctgatgtatctgctcaaatggagtactgccgcaccccgtgtacagtttcttgtaatattccggtggtttccggcaaggagtgcgaggagatcattaggaaaggaggagagacttccgaaatgtatctgatccaaccagactccagtgtgaagccttaccgcgtgtactgtgacatgaacaccgagaacggtggttggactgtgattcagaataggcaagacggttccgtagactttggtagaaagtgggacccttacaagcagggattcggtaacgtggctacgaatacagacggtaagaactattgtggtctgcctggagagtattggttgggaaatgacaaaatttcccagcttaccagaatgggtcccactgagctgctcatcgagatggaagattggaaaggagacaaagtgaaagctcattatggcggttttactgttcagaacgaggcgaacaaataccaaattagcgttaacaagtataggggtacagctggaaatgccctcatggatggcgcctcccaattgatgggagagaacagaaccatgaccatccacaatggtatgttcttcagcacttacgacagagataatgacggttggctgacctctgaccctaggaaacagtgcagcaaggaagacggcggaggctggtggtacaacaggtgtcacgctgccaacccaaacggtaggtactactggggaggtcagtacacatgggatatggcgaagcacggaaccgacgacggagtcgtttggatgaattggaagggctcatggtactccatgcgcaaaatgtctatgaagatacgcccattcttccctcagcag

SEQ ID NO: 11314 - DNA, 1473 bp, synthetic construct
  misc_feature 1..1473: note = source = /note="Description of Artificial Sequence: Synthetic coding sequence"
  source 1..1473: mol_type = other DNA
atgaagcgcatggtgtcctggtctttccacaaactaaagaccatgaagcacttgcttctcctgctgttgtgtgtttttctggtgaaatcccagggggtcaacgacaacgaagaggggtttttttctgcacgtggccacagaccactagacaagaagagggaagaggcacccagcctgcggcctgcacccccccctatttcgggaggagggtacagagctcggcccgccaaagctgccgctactcagaagaaggttgagcgcaaggcaccggatgccggaggctgtttacatgccgatcctgacttaggggtactctgcccgacgggttgccaacttcaggaagcacttcttcagcaggaacgcccaatcaggaactccgtcgacgaacttaataacaacgttgaagcggtcagccagacctcaagctcgtccttccaatatatgtacctgcttaaagacttatggcaaaagagacagaagcaggtgaaggataacgagaacgtagtgaatgaatactcatcagagctagagaagcaccagctttacatagatgaaacagtcaacagtaatattcctactaacctccgagtcttacgaagcattttagagaatttgaggtcaaaaatccagaagttggagtctgatgtatcagctcagatggagtactgccgcaccccatgcactgtatcctgcaacattccagtggtgtctgggaaggaatgtgaggagatcatccgtaaaggcggtgagacttcagaaatgtatcttatccagcccgacagctctgtcaagccttacagggtatactgtgatatgaacaccgaaaatggaggctggaccgtgattcagaatcggcaggacggatctgtggattttggtaggaagtgggacccttacaagcagggtttcggtaacgttgctaccaataccgatggaaagaattactgcggcctgccaggcgagtactggttaggcaacgacaaaatttctcaactcacacggatggggcccacagaactgcttattgaaatggaagactggaagggcgacaaagtgaaggctcattatggggggttcaccgttcaaaatgaggcgaacaaatatcaaattagcgtgaataagtaccgcggaaccgccgggaatgccctgatggacggagcgagtcagttaatgggggagaacaggacaatgacaattcacaatggaatgttctttagtacctatgatagagacaatgatggctggctgacaagcgatccgcgaaagcagtgctcaaaggaggatggtggcggttggtggtacaaccggtgccacgctgcgaatcccaatggtcgatattattggggaggccagtatacatgggatatggcgaagcacggcacagacgacggagtcgtgtggatgaattggaaaggatcatggtactccatgcgtaaaatgtctatgaaaatcagacctttcttccctcagcag

SEQ ID NO: 11315 - DNA, 1473 bp, synthetic construct
  misc_feature 1..1473: note = source = /note="Description of Artificial Sequence: Synthetic coding sequence"
  source 1..1473: mol_type = other DNA
atgaaaagaatggttagttggtcattccataagcttaaaacgatgaaacacctgctgttactgctgttatgcgtcttcttggtgaaaagccagggtgtcaacgacaacgaagaggggttttttagcgctaggggtcataggcctttggataaaaagagagaagaagccccaagccttagaccagctccgccgcctatctcggggggtgggtatagagctaggccagccaaggcggccgccacccagaaaaaagtcgagcgtaaggctcctgacgcgggcggctgtctccacgccgacccggatcttggggtcttgtgccctactggctgccagctgcaggaagcccttctgcagcaggagagacctattcgcaatagcgtcgacgagctcaataacaatgttgaggccgtgtcacagactagtagttcatctttccagtacatgtacctgctgaaagacttgtggcaaaagaggcagaagcaggtcaaagataatgagaatgtggtaaacgagtattccagcgaactcgagaaacaccagctgtacatcgacgaaacagtgaactctaatattcctaccaacttgagggtgctccgatccatcctggagaacctgcgcagtaagatccaaaagctcgagagcgatgtgtccgcccagatggaatactgccgaaccccgtgtacagtgtcctgcaatatacctgtggtatcaggtaaggaatgtgaagagattattcgaaagggtggagagacatccgagatgtatctcatccagccagactcctctgttaagccctatcgagtgtactgcgacatgaacaccgaaaatggggggtggactgtgatccagaatagacaggacgggtccgtcgatttcggcaggaaatgggatccctacaaacagggtttcggcaatgtcgccactaacactgacggtaagaactactgtggacttcccggtgagtattggctggggaacgataaaatttcgcagctgactaggatgggacccaccgagttgcttattgaaatggaggactggaagggggataaagtaaaggcgcactatggaggctttacagtccagaatgaagccaataagtatcagatatcagtgaacaaatatcggggaacggctggcaatgctctgatggatggtgctagccagcttatgggagagaaccggactatgacaattcacaacgggatgttcttctccacttatgaccgggataacgacgggtggcttacctcagacccgcggaaacagtgcagcaaggaggatggaggcggttggtggtacaatcgatgtcatgccgcgaatcccaacggacggtactattggggcggtcagtacacctgggatatggcaaaacatggaacggacgatggagtggtctggatgaattggaaagggtcctggtactctatgagaaaaatgtcaatgaaaattcggccgttctttccacaacag

SEQ ID NO: 11316 - DNA, 1473 bp, synthetic construct
  misc_feature 1..1473: note = source = /note="Description of Artificial Sequence: Synthetic coding sequence"
  source 1..1473: mol_type = other DNA
atgaagcggatggtgtcatggtcgttccataaactgaaaaccatgaagcatctgctcctcctgttgctttgcgtctttctggttaaatcccaaggcgtcaacgacaacgaggagggattcttttctgcgcgcggccatcgcccgctcgacaagaaacgggaggaagccccttcgcttcggccagctccgccgcctatctcaggcgggggataccgcgcacggccggctaaagcggcagcgactcagaagaaggtggaaagaaaggcgcccgacgccggaggatgcctgcatgccgatccagacctcggcgttctctgccctactggatgccagctgcaagaggcgctgctccagcaagaacgcccaatccgcaactcggtcgacgaactcaacaacaacgtggaggccgtgtcccagacttcatcgagttcgttccagtacatgtatctgctcaaggacctgtggcagaagagacaaaaacaggtgaaagacaatgagaacgtcgtgaacgaatactcgagcgagctggaaaagcaccagctctacattgacgaaaccgtgaactccaacatcccaactaacctgagagtccttcgatcgattcttgagaatctgaggagcaagatccagaagctggaatcggacgtgtccgcccaaatggagtattgcagaacgccctgcaccgtcagctgcaatatcccagtggtgtcgggtaaggagtgtgaagaaatcatcaggaagggcggagaaacctccgaaatgtatctgatccaaccggattcctcagtgaagccataccgcgtatactgcgacatgaataccgagaatggagggtggactgtcatccaaaaccgccaggacggaagcgtggatttcggaaggaagtgggacccgtacaagcagggtttcgggaacgtggccaccaatacggatggcaagaactactgtggattgccgggtgagtactggctgggaaacgacaagatcagccaattgacgagaatgggccccaccgaactgctgatagagatggaagattggaaaggggacaaggtcaaggctcactacggaggattcactgtgcagaatgaagctaacaagtaccagatctccgtgaataagtaccggggaaccgccggaaacgccctcatggatggtgcatcacaactgatgggggagaatcgcactatgaccattcacaatggaatgttcttcagcacctacgatcgcgataacgacggctggttgacttccgacccgcggaaacagtgttccaaggaagatgggggcgggtggtggtacaataggtgccacgccgcaaatcctaacggacggtactactggggaggccaatacacttgggacatggcaaaacacggtaccgatgatggagtggtgtggatgaactggaagggaagctggtactcaatgcggaaaatgtctatgaagatcagaccgttctttccgcagcag

SEQ ID NO: 11317 - DNA, 1473 bp, synthetic construct
  misc_feature 1..1473: note = source = /note="Description of Artificial Sequence: Synthetic coding sequence"
  source 1..1473: mol_type = other DNA
atgaagaggatggtctcctggtccttccacaaactcaagaccatgaaacaccttctgctcttgctgctctgcgtcttcttggtcaaatctcagggggtcaatgataacgaggagggcttcttctccgctagggggcatcgccccctggataaaaaacgggaggaagctcctagcctgcggccagcccctcccccgatctcaggaggggggtatagagcacgacccgctaaggctgccgctacacagaagaaagtagagcggaaggcacctgatgcaggcggttgcctgcacgctgatccagacttaggagtgctgtgccccaccggctgtcagctgcaagaggctctcctgcaacaggaaaggccgatcagaaattccgtggacgaactgaacaataacgtggaagcggtctcgcagaccagctcttcgtcctttcaatatatgtacttacttaaagatctgtggcaaaagcgccaaaagcaggtaaaggacaatgaaaatgtggtcaatgaatattcctccgagctagagaagcaccagctttatatcgatgagacagttaattccaacatcccaacaaatctccgcgtgcttcggagtatactcgaaaatctgaggtccaaaattcagaagctcgaatccgatgtctcagcacagatggaatactgccgaaccccttgcactgtgtcctgtaacatcccagtcgtgtccggcaaggagtgtgaagagattattcgaaaaggcggagaaacttccgaaatgtatctgatacagcctgattcaagtgtcaaaccttatagagtttattgtgatatgaatacagaaaatggaggttggacggtcatacaaaataggcaggatgggtctgttgacttcggaagaaaatgggacccgtataagcaggggttcgggaatgtcgccacaaacacagatggaaagaactattgcggccttccaggagagtactggcttggtaacgataagatttcacagttaaccagaatgggacctaccgaactgctcatcgagatggaagactggaagggagacaaggtgaaggcacattacggcggattcaccgtgcagaacgaggccaataagtaccagatatcagttaacaaatacagggggacagctgggaacgcactgatggacggtgcctcccagctcatgggggaaaacaggactatgacaatacacaatggcatgttctttagcacctacgatagggataatgacgggtggttgacgtctgaccctcgaaagcagtgctccaaagaggacggtgggggctggtggtacaaccgatgccacgctgcgaacccaaatggtcggtactactggggcggccagtacacatgggacatggctaagcacggcactgacgacggtgtggtttggatgaattggaaaggctcctggtacagcatgaggaagatgtctatgaaaattaggcccttcttcccccagcag

SEQ ID NO: 11318 - DNA, 1473 bp, synthetic construct; identical to SEQ ID NO: 11292
  misc_feature 1..1473: note = source = /note="Description of Artificial Sequence: Synthetic coding sequence"
  source 1..1473: mol_type = other DNA

SEQ ID NO: 11319 - DNA, 1473 bp, synthetic construct
  misc_feature 1..1473: note = source = /note="Description of Artificial Sequence: Synthetic coding sequence"
  source 1..1473: mol_type = other DNA
atgaagaggatggtgagctggagctttcacaaactcaaaaccatgaagcacctgctcctcctgctgctctgcgttttcctcgtcaaaagtcagggtgtgaatgacaacgaggaaggattcttctccgcccgtggccataggcccttagataaaaagcgagaggaagctccaagcctgcgccctgcaccccccccaatcagcggcggcggatatcgcgctcgaccggccaaggcggcagctacacagaaaaaagtggagagaaaagctccagatgctggaggatgcctacacgctgatccagaccttggtgtgttgtgtccgaccggctgtcaattgcaggaggccttgctccaacaggagagacctatcagaaatagcgtcgacgaattgaacaataacgtggaagctgtatcacagacctccagctcaagcttccaatatatgtaccttttgaaggacctttggcaaaagagacaaaaacaggtaaaagataatgagaacgtggtgaacgagtatagcagcgaactggaaaagcaccaactgtacatcgacgagacagttaacagcaacattcccaccaacttgcgtgtcctccgcagtatacttgaaaaccttcgcagtaagatccaaaaactcgagtcggatgtctctgctcaaatggagtactgtagaactccgtgcactgtaagctgtaatattcccgttgtatccggaaaagaatgcgaggagatcatcaggaaaggtggagagacctctgagatgtacttaattcagcctgattcatcagtcaaaccttatcgagtgtactgtgatatgaacactgagaatggtggatggactgtcattcagaaccggcaagacggctctgtcgacttcggacgcaagtgggatccgtacaaacaaggctttggcaatgtggccacgaacaccgacggtaagaactactgtggcttaccaggagagtattggcttggaaatgataaaatatctcaactaacacgtatgggcccaaccgaactgctcattgagatggaagattggaaaggtgataaggttaaagcacactacggcgggttcaccgtccaaaatgaggctaacaaataccaaatctcagtcaacaaatataggggcactgccggaaacgcactgatggatggtgcctcacaactcatgggggagaacagaacgatgacgattcataacggcatgttctttagtacttatgaccgggacaacgacggatggctgactagcgacccccgaaagcagtgttccaaggaggatggcggaggttggtggtacaaccgatgccacgccgctaaccctaacggaaggtactattggggcggtcagtacacttgggacatggctaaacatgggactgatgacggcgtcgtgtggatgaactggaagggcagttggtactcaatgaggaagatgtcgatgaaaatccggccattctttccacagcag

SEQ ID NO: 11320 - DNA, 1473 bp, synthetic construct
  misc_feature 1..1473: note = source = /note="Description of Artificial Sequence: Synthetic coding sequence"
  source 1..1473: mol_type = other DNA
atgaagcggatggtgtcctggtcctttcacaagctcaaaaccatgaagcatctcctgctcctccttctctgtgtatttctggtgaaatcccaaggagtcaatgacaatgaagagggcttctttagtgccagggggcaccggccactggacaaaaaaagagaagaagcaccgagcctgcgccctgctccacccccgataagtggtgggggttatcgggcgagacccgccaaggctgcagctacccagaagaaggtggaacgcaaggccccagacgcgggcgggtgcttgcacgccgaccctgacctcggagtcctgtgtcccactgggtgccagcttcaggaggctttgctgcagcaagaacgccccatccgaaattcagtagacgaactgaataataacgtggaggctgtgtcccagacatcctcatcctcttttcagtacatgtatctgctcaaagacctctggcaaaagcgccagaagcaggttaaggataacgagaatgtcgtgaacgagtattccagcgagctggaaaagcatcagttgtacatcgatgagacagtcaattccaatatccccacaaatctgagggttctgaggtcaatccttgaaaatttgcggagcaaaatccagaagttggagtctgacgtgagcgctcagatggagtactgcaggaccccttgtaccgtgtcttgcaacataccagttgtgtccggaaaggagtgtgaggaaatcattcgcaagggcggagagacaagtgagatgtacctgattcaacccgattcttctgttaagccatatagggtctactgtgacatgaataccgaaaacgggggttggacagttattcagaaccggcaggacggatctgtggactttggccggaaatgggacccttacaagcagggattcggtaacgtggccacgaataccgacggcaagaactactgcgggctgccaggtgaatattggttgggtaacgacaagattagtcagctgacacggatgggaccaaccgagttgctcattgagatggaggactggaagggagacaaggtgaaggcacattatggcgggtttacagtgcaaaacgaagcaaacaagtatcagatttctgtgaataagtataggggcacggcaggcaatgcactgatggacggggcatctcagctgatgggggaaaaccggacaatgaccatacacaatggaatgttcttctctacatatgatcgggacaacgacggctggcttacaagtgacccaaggaaacagtgcagtaaagaagatggcgggggctggtggtataataggtgtcacgccgcgaaccccaacggccggtattactggggcggacaatacacatgggatatggcaaaacacggcacagatgacggagtggtatggatgaactggaagggatcttggtacagtatgaggaagatgagtatgaaaatcaggccattctttcctcagcag

SEQ ID NO: 11321 - DNA, 1473 bp, synthetic construct
  misc_feature 1..1473: note = source = /note="Description of Artificial Sequence: Synthetic coding sequence"
  source 1..1473: mol_type = other DNA
atgaaacggatggtgtcctggtcattccataaactcaagaccatgaagcatctgctcctattgctgctgtgtgtatttttggtgaagtcacagggcgtcaatgacaacgaggagggatttttctccgctagaggtcaccggcctctggataagaaacgcgaagaagcaccctctctgaggccggctccgccacccatcagcggtgggggttatcgggctcgccccgccaaagccgccgctacacaaaagaaagttgagagaaaagctccagatgctggcggctgtctgcacgctgatcctgatctgggtgtgctgtgtccaacgggctgtcaactgcaggaagcactcctccagcaagaaaggcctataagaaactccgtcgacgagttgaacaacaacgtagaagccgttagccagacctcttcctccagtttccaatatatgtatcttttaaaggacctttggcaaaaacgccagaagcaggttaaggataatgaaaatgtcgtcaatgaatatagctcagagctggaaaagcatcagctgtacatagacgagacggtcaacagcaacatacccacaaacttgagggtgctgagatcgatcctcgagaatctgcggagcaaaatccagaaactggagtccgatgtgtctgcccagatggagtactgccgtacaccgtgcaccgtctcatgcaacattccagtcgtcagtgggaaagagtgtgaggaaataatcagaaaagggggggagacgtccgaaatgtatctgattcagccagactcttcagtgaagccctacagagtgtactgtgatatgaatactgagaacggcggttggaccgtcatacagaatcgtcaagacggaagtgtcgattttggtaggaagtgggacccttacaagcagggattcgggaatgtggctaccaacaccgacggcaaaaactactgcggcctccctggagaatactggctggggaatgacaagatcagtcagctgacacgaatgggacctaccgagctccttatagaaatggaggattggaagggggacaaggtgaaggctcactatgggggattcaccgtccagaacgaggctaacaaataccagatctcagttaacaagtaccggggcaccgctggaaatgcacttatggacggagcgagccagttaatgggagaaaatcgcacaatgacgatccacaatgggatgttcttctcgacgtacgatcgtgataatgatggttggttaacctctgatccccgtaagcaatgtagtaaggaggatggcggcggatggtggtataaccggtgccacgccgctaatcccaacggcaggtactactggggaggtcaatatacctgggacatggctaaacatggcacagatgacggggtggtatggatgaactggaagggaagctggtattctatgaggaaaatgagtatgaagatcagacctttctttcctcagcag

SEQ ID NO: 11322 - DNA, 1473 bp, synthetic construct
  misc_feature 1..1473: note = source = /note="Description of Artificial Sequence: Synthetic coding sequence"
  source 1..1473: mol_type = other DNA
atgaaacggatggtgtcttggagcttccataagctgaaaactatgaagcatttattactcttgctgctttgcgtgttcctggttaagagtcaaggcgtaaacgataatgaagaggggttcttctcggctagaggccatcgcccgctcgacaagaaaagagaagaggctccatcgttaagaccggccccacctcctatatccggtggaggatacagagcaagacctgccaaggccgccgcgacacagaagaaggtggagcgcaaagctcccgacgccgggggctgtctgcacgccgatcctgatctcggggtactctgtcctaccgggtgccaacttcaggaagctttgttgcaacaggagcgcccaattcggaactccgtggacgagctcaataataacgtggaggcggtgtctcagacgtccagttcgtcctttcagtatatgtatctattgaaagacctgtggcagaaaaggcaaaagcaggtaaaggataacgaaaatgtggttaacgagtattcctccgaactggaaaagcaccagttgtacatcgatgaaacggtgaatagcaacatccccacaaacctgcgtgtgctgaggagcatcctcgagaatctgaggtcaaagatacagaaattggagtctgacgttagcgcacagatggagtactgtagaaccccttgtactgtgtcttgtaacattccagtggtgtctggaaaggagtgcgaagagattatccgtaagggtggagaaactagcgagatgtacctgatccagccggactccagtgtgaaaccatatagggtgtactgcgatatgaatacggagaatggcggttggaccgtgattcagaatcgacaggacggctccgtggacttcggacgcaagtgggatccttacaaacagggatttggcaatgtggctacaaacactgacgggaagaattactgcggtctaccaggagagtattggctgggaaatgataagatctcccagctgacccgaatgggccctaccgagctgctgattgagatggaagactggaagggagataaagtcaaggcccattacggcgggtttacagttcagaatgaggctaataagtaccaaatttcggtgaataagtacagaggaaccgctggaaatgctctcatggacggtgcctctcagcttatgggcgaaaacagaacgatgactattcataacggaatgtttttctctacttacgatcgcgacaacgacggctggctgacctccgacccaaggaaacagtgctccaaagaggatggggggggctggtggtacaaccgatgccacgccgctaacccgaatggtcggtactactggggcggccagtacacatgggacatggccaagcacggcacagatgacggcgtggtgtggatgaattggaaggggtcctggtatagtatgaggaagatgtccatgaaaataaggcctttcttcccacagcag

SEQ ID NO: 11323 - DNA, 1473 bp, synthetic construct
  misc_feature 1..1473: note = source = /note="Description of Artificial Sequence: Synthetic coding sequence"
  source 1..1473: mol_type = other DNA
atgaaacgaatggtgtcatggagtttccacaaacttaagacaatgaagcacttgttgctattgttgctctgcgtgttcttggtcaagagccaaggtgtaaacgataatgaggaagggtttttttctgctagaggtcatcgacctttggataagaagcgagaagaggcacctagcctaagacccgcgcctccgccaatatctgggggtggatacagagctagaccagctaaagccgcagctacacagaagaaggtggaacgtaaagcgccagatgctggaggatgcctgcatgctgacccagatttgggcgtattgtgtccaactggatgtcaacttcaagaggctttgctgcaacaggagaggcctattcgtaactccgttgacgaattaaataataacgtcgaggcagtgtcccaaacatcgagctcatcttttcaatacatgtacctactgaaggacctctggcaaaagcgtcaaaagcaagttaaggataatgaaaatgttgttaacgagtactcttctgaattggagaagcatcaattatatattgatgagactgttaattctaacataccaacaaatttgagggttcttcgttctattctagaaaatttacgaagcaagatccaaaaattagaatcggacgtctctgcacagatggagtattgccgtacaccttgtaccgtaagttgcaacatccccgtcgttagtggcaaagaatgtgaggaaattatcagaaagggcggcgaaacttccgaaatgtatttgattcagccagattcttctgttaagccatacagggtgtactgcgatatgaatacagagaacggagggtggaccgtcatacagaaccggcaggatggatcagtcgattttggccgcaagtgggatccgtacaagcaaggttttggaaatgtagctacaaacacggatggtaagaattattgcggtctccctggggaatactggcttggaaatgataaaattagtcagctcacacgcatggggccaaccgagctgttgatagaaatggaggattggaaaggtgacaaagtgaaggcacactacggggggtttactgtgcaaaatgaggctaataaatatcagatctcagtcaacaaatacaggggcactgctggtaatgcgctcatggatggtgcaagtcaacttatgggagagaatagaacaatgactatccataatggtatgtttttctcaacatatgaccgtgataatgatggctggctgacttctgatccacgaaaacagtgttctaaggaagatgggggcggatggtggtacaacagatgccatgctgcgaacccaaatggtagatactattgggggggccagtacacgtgggacatggctaaacatggaacagacgacggagtagtttggatgaattggaaggggtcatggtactccatgagaaaaatgtcaatgaaaataagacccttcttccctcaacag

SEQ ID NO: 11324 - DNA, 1473 bp, synthetic construct
  misc_feature 1..1473: note = source = /note="Description of Artificial Sequence: Synthetic coding sequence"
  source 1..1473: mol_type = other DNA
atgaaaaggatggtcagctggagctttcataagcttaagacaatgaagcatctcctcctgcttctgttgtgtgtgttccttgtgaagagccagggagttaacgataacgaagaaggttttttcagcgccagagggcacagaccactggacaaaaagcgagaagaagctccaagcctgaggccagcccccccgcctattagtggcggcggctaccgggcaagacccgctaaggctgctgcaacccagaaaaaggtcgaacgaaaggcgccagacgccggtggttgcctgcacgccgacccagatctgggcgttctctgccccacagggtgccagttgcaagaagcactactgcaacaggaacgacctatccgcaatagtgtagacgagctgaataacaacgtcgaggctgtgagtcagactagttcctccagttttcagtacatgtatctcttgaaggatctgtggcagaaaagacaaaagcaggtaaaagacaacgaaaatgtcgtaaacgagtactcaagtgagctggagaaacatcagctgtatattgatgagactgtgaactccaatatcccaacaaacttgcgcgtcttgcggagtatcctagaaaatttgagatcgaaaatccagaaactagagtctgacgtgagcgctcaaatggagtattgtcgaacgccctgtaccgtctcatgcaacatacccgtcgtgagtgggaaagaatgtgaagaaataatcaggaaaggaggggagacctctgagatgtacctgatacagcctgacagctctgtaaagccctaccgggtgtattgcgacatgaataccgaaaacgggggctggacagtgattcaaaatagacaggacgggtcagttgactttggcagaaaatgggacccgtataagcaggggttcggtaacgtggcgacaaatacagatgggaagaattattgcgggctgcccggcgaatattggctgggaaatgataaaatcagccagttaacgaggatggggcccacagagttgctgatagaaatggaagattggaagggggataaggttaaagcccattatggcgggttcactgtccagaatgaagctaacaagtaccagatcagcgtgaataaatacaggggcactgcgggcaacgccctgatggatggagcctctcagctcatgggcgaaaatagaaccatgactatccacaacggaatgttcttctccacatacgatcgagataacgacgggtggctgactagtgatcctagaaagcagtgcagcaaagaagacggcggaggctggtggtacaacagatgccatgccgccaaccctaatggaagatactactgggggggacagtatacgtgggacatggcaaaacacggcacagacgatggcgtggtttggatgaactggaaagggtcctggtacagcatgcggaagatgtccatgaagattcgaccattcttcccacaacaa

SEQ ID NO: 11325 - DNA, 1473 bp, synthetic construct
  misc_feature 1..1473: note = source = /note="Description of Artificial Sequence: Synthetic coding sequence"
  source 1..1473: mol_type = other DNA
atgaagcgcatggtttcctggagtttccataagctcaagacaatgaagcaccttcttcttctactgttgtgcgtgttcctggtgaagtctcaaggagtaaacgacaacgaggaggggttcttctcagccagggggcatcgcccactggacaagaaaagagaggaggccccatccttgagacctgctccccctcctatttcaggcggaggttatcgggcccggccggcgaaggccgccgcaacacaaaaaaaagtggagcgaaaggctccagacgccggtggatgtctccacgctgatcccgatttaggagtgttatgtccaacggggtgccaactgcaagaagctcttctgcagcaggaacgaccaataaggaactccgttgacgagctgaacaacaatgtggaagccgtcagccaaacaagtagctcctcctttcagtacatgtatttgctcaaggacttgtggcagaaaagacagaagcaggtaaaggacaatgagaacgtggtcaatgagtactcctccgagctggagaagcaccaactgtatattgacgaaactgtgaactccaacattcccacaaaccttcgggtattaagatccatacttgagaatctccggagcaagatacaaaagctggaaagcgatgtgtctgcccagatggagtattgccggacaccctgcacggtatcatgtaatattcccgttgtgagcggtaaagaatgtgaggaaattatacgcaaaggcggggagactagtgaaatgtacctgattcagcctgattcgtcagtgaaaccttacagggtgtactgcgacatgaacactgaaaatggcgggtggaccgtcattcagaacaggcaggatgggtctgtggattttggtaggaaatgggatccctataagcaaggcttcgggaatgttgcgactaacacggacggtaagaactattgcggcttgcctggagaatattggctgggaaacgataagatttcacagttgacccgaatggggccgaccgagctgttaatagaaatggaggactggaaaggggataaagttaaagcccactacgggggctttaccgttcagaacgaggcgaataaatatcagatatcagtaaataaatacaggggcaccgccggtaacgccctaatggatggcgctagccagcttatgggcgaaaaccgcactatgacaattcacaacggcatgtttttttccacgtacgacagggacaatgacggatggctcacctctgatcctcggaagcagtgcagcaaggaagatgggggaggctggtggtacaatcgctgccacgcggccaatccaaacgggcggtattattggggcggacagtacacatgggacatggccaagcatggcaccgatgacggggttgtatggatgaactggaagggatcatggtactccatgcgaaagatgagcatgaaaatcaggccattttttcctcagcag

SEQ ID NO: 11326 - DNA, 1473 bp, synthetic construct
  misc_feature 1..1473: note = source = /note="Description of Artificial Sequence: Synthetic coding sequence"
  source 1..1473: mol_type = other DNA
atgaaaaggatggtgagctggagttttcacaaactcaagacaatgaaacatttgttgcttctactactctgtgtgtttttggtcaagtctcagggtgtgaatgataatgaggagggttttttttcagcaaggggacacaggcctctcgataagaagcgggaagaagcaccatcactcaggccggccccgcctcctatatccggcggtgggtatcgggcaaggccggcgaaggccgcagccactcagaagaaagtcgagaggaaggccccagacgcagggggttgtctgcatgccgaccccgatctaggagtgctctgtcccacaggctgtcagctgcaggaggctctgcttcaacaggagcgcccaatccgcaacagcgtggacgagctgaacaataatgttgaggctgtctctcagacttcttcttcttccttccagtacatgtatctcctcaaagatctttggcagaagaggcaaaaacaggttaaggacaacgagaacgtggtcaacgaatattctagtgaactcgagaagcaccaattgtatatcgacgagacagtcaactcgaacattccaaccaacctcagggtgttacgttcgatactggagaacctgaggtccaagatccagaaactggaatccgatgtgtccgcacagatggagtattgtagaactccatgcaccgtgagttgcaatattcctgtagtgagtggcaaggaatgtgaggagattattcgtaagggaggcgagacgagcgagatgtaccttatccagcctgacagcagcgtcaagccctaccgcgtttattgtgatatgaacactgagaacggggggtggaccgtcatccagaaccgtcaggatggctccgttgatttcggccgaaagtgggacccatacaaacaggggtttggaaatgtggccaccaatacggacggcaagaattactgtggtctgccaggcgaatactggctgggaaatgacaagatcagccaactgacccggatgggccccaccgagttactgatcgaaatggaggattggaagggtgacaaagtgaaagctcattacggggggttcactgtccagaatgaagctaataagtaccaaatctcggtgaacaagtaccgcgggactgcaggaaacgctctgatggacggggcgtctcagcttatgggggagaaccgtacgatgactatacacaacggcatgttcttttcaacatatgatagggacaatgacgggtggctcactagcgacccccgaaaacaatgctctaaggaagacgggggaggttggtggtacaatagatgtcacgcggccaacccaaacggtcgctactactggggggggcagtacacatgggacatggccaagcacgggactgatgatggcgtcgtttggatgaactggaaggggagttggtatagcatgcgtaagatgagcatgaagatcagacctttttttccccagcag

SEQ ID NO: 11327 - DNA, 1473 bp, synthetic construct
  misc_feature 1..1473: note = source = /note="Description of Artificial Sequence: Synthetic coding sequence"
  source 1..1473: mol_type = other DNA
atgaaacgtatggtttcgtggtcgtttcataaattaaaaacgatgaaacatctattactactattattatgtgtttttttagtaaaatcgcaaggtgttaatgataatgaagaaggttttttttcggcgcgtggtcatcgaccgttagataaaaaacgagaagaagcgccgtcgttacgtccggcgccgccgccgatatcgggtggtggttatcgagcgcgtccggcgaaagcggcggcgacgcaaaaaaaagttgaacgtaaagcgccggatgcgggtggttgtctacatgcggatccggatctaggtgttctatgtccgacgggttgtcaattacaagaagcgttattacaacaagaacgtccgatacgtaattcggtagatgaattaaataataatgtagaagcggtttcgcaaacgtcgtcgtcgtcgtttcaatatatgtatttactaaaagatctatggcaaaaacgacaaaaacaagtaaaagataatgaaaatgttgtaaatgaatattcgtcggaattagaaaaacatcaactatatatagatgaaacggttaattcgaatataccgacgaatctacgtgtactacgatcgatattagaaaatctacgttcgaaaatacaaaaattagaatcggatgtttcggcgcaaatggaatattgtcgaacgccgtgtacggtatcgtgtaatataccggtagtatcgggtaaagaatgtgaagaaataatacgaaaaggtggtgaaacgtcggaaatgtatttaatacaaccggattcgtcggtaaaaccgtatcgagtttattgtgatatgaatacggaaaatggtggttggacggttatacaaaatcgtcaagatggttcggtagattttggtcgtaaatgggatccgtataaacaaggttttggtaatgtagcgacgaatacggatggtaaaaattattgtggtttaccgggtgaatattggttaggtaatgataaaatatcgcaattaacgcgtatgggtccgacggaattattaatagaaatggaagattggaaaggtgataaagttaaagcgcattatggtggttttacggttcaaaatgaagcgaataaatatcaaatatcggttaataaatatcgaggtacggcgggtaatgcgttaatggatggtgcgtcgcaactaatgggtgaaaatcgtacgatgacgatacataatggtatgtttttttcgacgtatgatcgtgataatgatggttggttaacgtcggatccgcgaaaacaatgttcgaaagaagatggtggtggttggtggtataatcgttgtcatgcggcgaatccgaatggtcgttattattggggtggtcaatatacgtgggatatggcgaaacatggtacggatgatggtgtagtttggatgaattggaaaggttcgtggtattcgatgcgaaaaatgtcgatgaaaatacgaccgttttttccgcaacaa

SEQ ID NO: 11328 - DNA, 1473 bp, synthetic construct
  misc_feature 1..1473: note = source = /note="Description of Artificial Sequence: Synthetic coding sequence"
  source 1..1473: mol_type = other DNA
atgaagaggatggtcagctggtcctttcacaaactgaagaccatgaagcatcttctgctccttctgctgtgtgtgtttttggtgaaatcacagggcgtgaacgataacgaggaaggattcttttccgcacgtggccaccgcccactggataagaagcgcgaggaggccccctccctgcgcccagcccctccccctatctctggaggcggatacagagcacgccctgctaaggctgccgccacacagaaaaaggtggaaaggaaggctccagatgccggcggctgcctgcatgccgaccccgacttgggtgtgctctgccctacaggctgtcaattgcaggaggctctgctccaacaagagcgcccaattaggaacagcgtggacgaactcaacaacaacgtcgaggctgtgagtcagactagttcctcttctttccagtatatgtacctgcttaaggacctgtggcagaagaggcaaaagcaagtgaaggataacgagaacgttgttaatgagtactcctccgagcttgagaaacaccagctctacattgacgagactgttaacagtaatattcctactaacctccgtgttctgcgctcaatcctcgaaaatttgaggagcaaaatacagaaacttgaatctgacgtgtccgcccagatggagtattgccgtaccccctgcaccgtaagttgtaatatccctgtggtcagcggcaaagagtgcgaagagatcatacgtaaaggtggcgagacttcagaaatgtatctcattcagcctgactcatcagtgaagccctatcgcgtatactgcgatatgaacacagaaaacggaggctggaccgttattcaaaaccgtcaggatggttccgtggactttggacgcaagtgggacccttataaacaaggcttcggaaatgtcgctaccaacaccgacggtaagaactattgtggacttcccggcgaatactggctcggcaacgacaagatctcccagctgacccgcatgggacctaccgagctcctgatcgagatggaagattggaagggagacaaagtgaaggcccattatggcggatttactgtgcagaatgaggctaataagtatcagatttcagtgaataagtaccgtggcacagctggtaatgccctgatggacggagcttcacagctgatgggtgagaacagaaccatgacaattcataacggaatgttcttcagtacctatgaccgcgacaacgatggttggttgaccagcgatcctcgcaagcaatgttccaaggaagacggaggtggttggtggtacaacaggtgtcacgcagccaaccctaacggcagatactattggggcggccagtacacatgggacatggcaaaacatggtaccgatgacggagtggtatggatgaactggaagggcagctggtattccatgcgcaagatgtctatgaagatccgtcctttcttccctcagcag

SEQ ID NO: 11329 - DNA, 1473 bp, synthetic construct
  misc_feature 1..1473: note = source = /note="Description of Artificial Sequence: Synthetic coding sequence"
  source 1..1473: mol_type = other DNA
atgaagcgaatggtcagctggtctttccacaagctgaaaaccatgaagcacctcctgctcttgctcctgtgtgttttcctagtcaagagtcagggagtgaacgataacgaagagggttttttttccgcgcgaggacaccggcctttggacaagaaacgagaggaagccccctcccttcgccctgcaccacctcctatcagtggagggggataccgggcaagacctgccaaggctgccgctacccagaagaaagtggagcgcaaggcccccgatgctgggggctgcctgcatgctgaccctgatcttggggtcctgtgtcctacaggttgtcagctgcaggaagcgctactgcagcaagaaaggcccatccgcaattctgttgatgagttaaataacaacgtcgaagccgtttctcaaacaagctctagttctttccagtacatgtacctgctgaaagatttatggcagaaaaggcagaagcaagtaaaggacaacgagaatgtagtgaacgagtactccagcgagcttgagaaacaccagttgtatattgatgaaacagttaactcgaacatccccactaatctgagagtacttaggtcaatcctggagaacctgaggtccaagattcagaaactggagtccgacgtttccgctcagatggaatattgtagaactccctgtacggtgagctgtaacattcctgtggtgtcagggaaagagtgcgaggagattatccgtaaaggtggagaaacttccgaaatgtatctgatccagccagactcctccgtgaaaccgtatcgtgtttattgcgacatgaacactgaaaatggaggctggaccgtgatacagaacaggcaggatggtagtgtagactttggccggaaatgggacccatataaacagggattcggcaatgtggcaacaaacacagacggtaaaaattactgtgggttacctggagagtattggctcggcaatgataaaatcagtcagttgaccaggatggggccgaccgagctcttaattgaaatggaggactggaagggtgacaaggtgaaagcccactacggcggcttcactgtccagaacgaagcgaataagtaccagatctcagtgaacaagtataggggaacagccggaaatgcactcatggacggggcgagccagcttatgggagagaacagaaccatgaccatacacaacgggatgttcttctccacgtatgatagagataatgatggctggcttaccagtgatccgcgcaagcaatgctcaaaagaagatggggggggatggtggtacaataggtgccacgcagctaaccccaacggtcggtactactgggggggccagtatacctgggacatggcaaagcatggaaccgacgacggagtcgtatggatgaattggaagggctcctggtatagtatgagaaagatgtctatgaagattcggccattttttcctcaacag

SEQ ID NO: 11330 - DNA, 1359 bp, synthetic construct
  misc_feature 1..1359: note = source = /note="Description of Artificial Sequence: Synthetic coding sequence"
  source 1..1359: mol_type = other DNA
atgagctggtccctgcacccaagaaatctcattctgtacttttacgcacttctcttcctgagcagcacctgcgtcgcatatgtggcaaccagagataactgttgtatcctggacgaaaggttcgggtcgtactgtcctactacctgcggcattgcagattttctttcaacttaccaaactaaggtggataaggaccttcagtccctcgaggacatacttcatcaagtcgaaaacaagacgtccgaagtgaaacaactgattaaggcaattcaactgacttacaatcctgatgaatcctcaaaaccaaacatgattgatgccgctacccttaagtctcgtaaaatgctggaggagattatgaaatacgaagcctcaattcttacccatgattcgtcaatccgctacctgcaagaaatctacaactccaataaccaaaagatcgtgaatctgaaagagaaggtcgctcagctcgaggcgcagtgtcaggaaccttgtaaagataccgtccaaatccatgatataactggcaaggattgccaagacattgccaacaagggggcaaagcagagcggcctgtactttatcaagcctcttaaggcgaaccaacaatttcttgtgtactgcgagattgacggatcgggcaacggatggacggtgtttcagaagcggctggatggatcggttgactttaagaagaattggattcaatacaaagagggtttcggtcacctgagccccaccggaaccaccgaattttggctcggcaacgaaaagatccatctcatttccactcagtccgcaatcccttacgcacttagagttgagcttgaggactggaatgggcggactagcaccgcagattacgcaatgtttaaggtgggccctgaagcggacaaataccgactgacttacgcgtactttgcgggtggagatgcaggtgacgcattcgatggttttgattttggcgacgacccctcagataagtttttcacttcgcataacggaatgcaattctcgacttgggacaatgataacgataagttcgagggtaattgtgccgaacaagatggatcaggatggtggatgaacaagtgccatgcaggtcatctgaacggagtctattaccaaggcggcacgtactcgaaggcgtcaactccgaacggctatgataacggaattatctgggcaacctggaaaactcgctggtacagcatgaaaaagaccactatgaaaatcatcccttttaaccggttgactatcggcgagggtcagcaacatcacctcggaggtgcgaaacaagtgcgtccggagcatcccgcagaaaccgaatacgattcactctacccggaggatgatctt

SEQ ID NO: 11331 - DNA, 1359 bp, synthetic construct
  misc_feature 1..1359: note = source = /note="Description of Artificial Sequence: Synthetic coding sequence"
  source 1..1359: mol_type = other DNA
atgagctggtccttgcatcctaggaatctgatcctgtatttctacgcactcctgtttctttcgtccacttgcgtggcctatgtcgcaactcgtgataattgttgtatccttgatgagagatttggctcgtattgtccaaccacctgcggaatcgcagattttctgtcgacgtaccagaccaaggtcgacaaagatcttcaatcacttgaggacattctgcaccaagtggagaacaagacctctgaagtcaagcaacttatcaaggccattcaacttacttacaatccagacgaatctagcaagcccaacatgattgatgcagcaactcttaagtcgcgcaaaatgctggaagagattatgaagtacgaggcatcgattcttacccatgattctagtattcggtacctccaagagatttacaattcaaacaatcagaagatcgtgaatctgaaggaaaaagttgctcagctggaggcccaatgtcaagagccttgtaaggataccgtccagattcatgacataactggaaaggactgtcaggacattgcaaacaagggagcgaaacagtccggcctgtactttatcaaacctcttaaagcaaaccagcaatttcttgtgtactgtgaaattgatggctccggaaatggatggaccgtgtttcaaaaaagattggatgggtcagtggacttcaaaaagaactggattcaatacaaggaggggtttggtcacctgtccccgaccggaacgactgaattttggcttggaaacgaaaagatacacctgatttcgactcagtctgccatcccatacgcgctccgcgtagagttggaagattggaacggtagaacctctaccgcggactacgcaatgtttaaggtgggaccggaagcagataagtaccgtctcacttacgcatacttcgcaggcggtgatgccggagacgcattcgatggcttcgactttggggatgatccatcggataagttctttacctcacacaacggaatgcaattttccacctgggataacgataatgacaagtttgaaggtaactgcgcagaacaagatggatccggctggtggatgaacaaatgccacgctgggcatcttaacggggtgtactaccagggagggacctactcaaaggcaagcactcccaatggttacgataacgggataatctgggcaacgtggaaaactcgatggtacagcatgaaaaagaccaccatgaagataatccctttcaaccgccttactatcggggaaggacagcagcatcatttgggtggagcgaagcaggtgcggcctgaacatcctgccgaaacggagtacgattcactgtatccagaggacgacctc

SEQ ID NO: 11332 - DNA, 1359 bp, synthetic construct
  misc_feature 1..1359: note = source = /note="Description of Artificial Sequence: Synthetic coding sequence"
  source 1..1359: mol_type = other DNA
atgtcttggtctctgcatcctcggaacctaattttgtacttctatgcactgctgtttctctctagcacttgtgtggcttacgtggcaacacgcgataactgctgcattctggacgagcgctttggaagctattgtcctaccacttgcggtatcgctgactttctgtccacataccagaccaaagtggataaagatttacagagtctagaagacatcctgcaccaggtggaaaacaagacttctgaagtgaagcagttgatcaaagccatccagctgacatacaacccagatgagtcctcaaaacctaacatgattgacgctgccaccctcaaaagtagaaaaatgctagaggaaattatgaagtacgaagccagtattctgacccacgactcttcaatacgctatctacaagagatctacaattctaataatcagaagatagtgaatcttaaagagaaagtggcacagttggaggctcagtgccaggaaccatgtaaggataccgtgcagattcacgacattaccggcaaggactgccaggatatagctaataaaggcgctaagcagtctggcctgtatttcataaaacctctgaaagcaaatcagcagttcctagtatattgtgagatcgatggtagcggaaatggctggacagttttccagaaaaggctggacgggtccgtggattttaagaagaactggattcaatacaaggagggcttcgggcacctgagccctacaggcactaccgagttttggctgggcaatgagaaaatacacctgattagtactcaatcagccattccatacgccctgagggtggagcttgaagattggaacggccggacttctactgctgactatgcaatgtttaaagtaggccctgaagcagataaatacagattaacatacgcctacttcgctggaggagatgctggcgacgcttttgatggcttcgactttggcgatgacccaagcgataagttctttaccagccacaatggaatgcagttttctacctgggataacgacaacgacaaattcgagggaaattgtgccgagcaagacggcagcgggtggtggatgaataagtgccacgccgggcacctcaatggtgtgtattaccaaggaggaacatatagcaaggcttccacacccaacggctacgataatggcatcatatgggccacctggaagacacgttggtactccatgaagaaaactactatgaaaataatacctttcaatcgcttaactattggtgagggtcagcaacaccacttaggcggcgccaagcaggttagaccagagcacccagccgaaaccgaatatgacagcctgtaccctgaagacgatttg

SEQ ID NO: 11333 - DNA, 1359 bp, synthetic construct
  misc_feature 1..1359: note = source = /note="Description of Artificial Sequence: Synthetic coding sequence"
  source 1..1359: mol_type = other DNA
atgtcctggtcacttcatccacgtaatctcatcctttacttttacgccctgttgtttctcagctctacttgcgttgcatacgttgcaactcgcgacaattgctgtattctggacgagcggttcgggagctactgtccaactacatgtgggatcgcagactttttaagcacatatcagactaaggtcgataaagatctacagtcgctggaagacattctgcaccaagtggagaataagacttctgaagtaaagcagctgatcaaagctatccagttgacatacaaccccgatgaatccagcaaacctaatatgatcgacgcagcaaccctgaaaagtcggaaaatgcttgaggagatcatgaagtatgaggcctcaatcctaactcacgactcctctatacggtacctacaggagatctacaattcaaataaccagaaaatcgtcaatctaaaagaaaaggtcgctcagttggaagcacagtgccaggaaccctgtaaagacaccgtacagatccacgatattaccggcaaggactgccaagacatcgctaacaaaggcgctaagcagtcgggcctttatttcattaaacccctgaaggccaatcagcagttccttgtgtattgcgagatcgacggctccggaaacggatggacagttttccagaaacggcttgatggctctgtcgacttcaagaagaactggatccagtataaagagggcttcggacacctcagccctacggggacaactgagttctggctgggcaatgaaaagattcacctgatttccactcaatctgctatcccctacgccctacgggtagagcttgaggactggaacggcagaacgtctacagcagactacgcaatgttcaaggtggggccagaggccgacaagtaccgactgacgtacgcttatttcgcaggcggcgatgctggtgatgccttcgatgggttcgatttcggtgacgacccatctgataagtttttcacctctcataacgggatgcagttctctacctgggacaatgacaacgataaattcgagggcaactgcgcggaacaggatggcagcgggtggtggatgaacaaatgccatgcaggtcacctgaatggcgtctactaccaaggaggaacatatagtaaggcttccacccctaatggctacgataatggtatcatctgggcaacctggaaaacacgatggtacagcatgaagaagaccaccatgaagattattccatttaaccgactgaccataggggagggacagcaacatcatcttggcggcgccaaacaggttcggcctgaacatccagctgaaactgagtatgactcactatatccagaagatgacctt

SEQ ID NO: 11334 - DNA, 1359 bp, synthetic construct
  misc_feature 1..1359: note = source = /note="Description of Artificial Sequence: Synthetic coding sequence"
  source 1..1359: mol_type = other DNA
atgagttggagccttcatccacgaaatctgattttatatttctatgccctgctgtttctgtcaagcacatgcgtcgcctacgtggcaaccagggataactgttgcattttggatgaacggtttgggtcatattgcccaaccacatgcggcatagcggactttttgagcacctaccagacgaaagtggacaaagatctgcagtcgttggaagacattttacaccaggttgagaataagacaagcgaggtgaagcagctgatcaaagccattcaattgacttacaaccctgacgagagcagtaagcctaacatgattgatgcggctactctgaaaagtcggaaaatgctggaggagataatgaaatatgaggcctctatcctgactcacgacagctcaattaggtacttgcaggagatctacaacagcaataatcagaaaatcgtgaatttaaaggagaaagttgcccagttagaggcacagtgccaagaaccctgcaaagatacagtacagatccatgacattacaggcaaagattgtcaggatatcgccaacaagggtgccaagcagagtggcctatatttcatcaagccactgaaagctaatcagcagttcctggtctactgcgagatcgatgggtcaggaaacggatggacagtgtttcaaaaacggctggatggtagtgtcgacttcaagaaaaattggatccagtataaggagggcttcggacatttgagccccactggaacaaccgagttttggctcggaaacgagaaaatacacttgatctcgacccagtcagctattccctacgctctcagggtcgaactggaagattggaatggacgaactagcacagctgattacgccatgtttaaagttggtccggaggctgacaagtaccggctaacatacgcttatttcgcagggggagacgccggcgacgcctttgacgggtttgactttggggacgaccccagcgataagttttttacatcacacaacggaatgcagttctccacatgggacaatgacaacgataagtttgaaggaaattgtgccgagcaggatgggtcgggctggtggatgaacaagtgccacgccggccacctcaacggagtgtactaccaaggaggcacttactcgaaggcttccacacccaacggctacgacaacgggatcatttgggccacatggaagaccaggtggtacagcatgaagaaaactaccatgaagatcataccattcaaccgtctcacaatcggcgaaggccaacagcaccatctggggggagcgaagcaggttagacccgaacatcctgctgaaacggaatatgactccctgtatccagaggatgatctt

SEQ ID NO: 11335 - DNA, 1359 bp, synthetic construct
  misc_feature 1..1359: note = source = /note="Description of Artificial Sequence: Synthetic coding sequence"
  source 1..1359: mol_type = other DNA
atgagctggtccctgcatccaagaaatttgatcttgtatttctacgccctcctgtttctctcaagcacttgtgtcgcgtacgtggcgacgcgcgacaactgctgcattcttgatgagcggttcggatcgtactgtccaaccacctgtggtatcgcggactttttgtcgacctaccagactaaagtggataaggacctgcaatccctcgaggatatcttgcaccaagtcgaaaataagacttctgaagtcaagcagttgatcaaggccatccagttgacttacaacccggatgaatcgagcaagccaaacatgatcgatgccgccaccctgaagtcgagaaagatgctggaagaaatcatgaaatacgaagcatccattctgacccacgacagctcaatcagatacctgcaggaaatctacaactcgaacaatcagaagatcgtgaatctgaaggagaaggtggcacaactggaagcccagtgtcaggaaccgtgcaaagacactgtgcagatccatgatattactggaaaggattgccaggacatcgcaaataaaggcgccaagcaatcgggcctgtacttcatcaagccgctgaaggccaatcagcaattcctggtgtactgcgaaatcgatggatcggggaatgggtggaccgtgttccaaaaacgcctggatgggagcgtcgactttaagaagaactggatccaatacaaggaaggttttggacacctgtcacctactggcaccaccgagttctggttgggcaacgaaaagatccacctcatcagcactcagtcagctatcccatacgcccttcgggtggaattggaggactggaacggtcgcacttccactgctgattacgctatgttcaaagtgggcccggaagcagacaagtaccgcctcacctacgcctacttcgcaggcggcgatgcaggagacgccttcgacggcttcgacttcggagatgacccgagcgacaaattctttacctcccataatggcatgcaattctcaacctgggataatgacaatgacaagtttgagggcaactgcgccgaacaagatggttcgggatggtggatgaataagtgccatgccgggcacctcaatggtgtgtactaccagggcggaacttacagcaaggcttcgaccccaaacggttacgacaatggcatcatctgggctacttggaagacgcggtggtactccatgaagaaaaccactatgaagatcattccgttcaacagactgaccatcggcgaaggacagcagcaccacctggggggagccaaacaagtgcggccagagcatcctgcagagacggaatacgattccctctacccagaggatgacctt

SEQ ID NO: 11336 - DNA, 1359 bp, synthetic construct
  misc_feature 1..1359: note = source = /note="Description of Artificial Sequence: Synthetic coding sequence"
  source 1..1359: mol_type = other DNA
atgtcctggagcctccatcccagaaatctgatcctgtatttctatgcattgttgttcctgtctagtacctgtgtggcgtacgtggccacgcgggataattgctgcatactcgacgagcgttttggaagctattgccccacgacttgcggaatagcagactttctgtccacctaccagacaaaggtggataaggaccttcaatccctggaagacattttgcatcaagtcgagaataagacgagcgaagtgaaacagcttatcaaggcgatccagcttacctacaaccctgatgaaagctccaagcccaatatgatcgatgcggcaacccttaaatcgaggaaaatgcttgaagagattatgaaatacgaggcaagcatactgactcacgattcctccattagatacctccaggaaatttataatagcaataaccagaaaatagtaaacctgaaagaaaaggtcgcccagctagaagcccagtgccaggagccctgcaaagataccgtacagattcacgatatcaccggcaaggattgccaggatatagctaacaagggcgctaaacagtcaggactgtacttcatcaagccattgaaggcgaatcagcaattcctggtttactgcgaaattgatgggtcgggcaatggctggaccgtcttccaaaaaaggttggatgggtccgtggatttcaagaaaaactggattcaatacaaagaagggttcgggcatttgagccctacaggaacaactgaattttggctgggaaacgaaaagatccacctcataagcacccagagcgctatcccttatgctttgagggtggaactagaagattggaacgggcggacttcaacggccgactacgctatgttcaaggtcggcccagaagccgacaagtataggctcacgtatgcttatttcgcgggcggagatgcaggtgatgcgttcgacgggttcgattttggggacgatccaagcgataagttttttaccagccataacgggatgcagtttagcacatgggacaacgacaacgataagttcgagggtaactgtgcagagcaggacgggagtggctggtggatgaataagtgtcatgcaggccatcttaacggagtatactatcagggaggaacatattccaaggccagcacccccaatggatacgacaatgggatcatttgggccacctggaaaacaaggtggtactccatgaagaagactacaatgaaaattatcccgtttaaccgccttactatcggtgagggacagcagcaccatctaggtggcgcaaaacaggtcagacccgagcaccccgctgaaaccgagtacgactctctttatcctgaagatgacctg

SEQ ID NO: 11337 - DNA, 1359 bp, synthetic construct
  misc_feature 1..1359: note = source = /note="Description of Artificial Sequence: Synthetic coding sequence"
  source 1..1359: mol_type = other DNA
atgtcctggtccctacacccaaggaacctcatcctgtacttctacgccctactgtttcttagcagtacttgtgtagcgtatgtcgctaccagggacaattgctgcatcctggacgagcggttcggcagctactgccccaccacctgcggtatagctgatttcctctccacctaccagacaaaggtcgacaaagatctacagtcactggaggatatcttacatcaggttgaaaataagacctcagaggtgaaacagttgattaaggcaatccagttaacctataaccctgacgagtccagtaagccaaatatgattgacgccgccaccctcaagagcagaaaaatgctcgaggagattatgaaatatgaggcctcaatcctgacccacgactctagtatccgctacctgcaggagatttataactccaataatcaaaagatcgtcaaccttaaggaaaaagtcgctcagttggaggcacagtgccaggaaccatgcaaggacactgtccagattcatgacattactggtaaggactgccaggacattgccaacaagggcgccaaacaatccgggctttacttcattaagccactgaaggcaaatcagcagttccttgtctactgcgagatcgacggttctggtaacggctggaccgtgttccaaaaaaggcttgatgggagtgtcgattttaagaagaactggatccagtacaaggagggcttcggacatctgtctccaactggtacaacggaattttggctgggaaatgagaagatccatctcatctcgactcagagtgcgatcccatatgctctgcgggtggagttagaagattggaacggcagaacaagcacagctgactacgcgatgttcaaggttggtcctgaggctgacaaataccgactcacttacgcctactttgctggcggggatgcaggcgatgccttcgacggcttcgacttcggtgacgatcctagcgataaattctttacgtcccataacgggatgcaattttccacgtgggacaacgataatgacaagttcgaggggaattgcgcagaacaggatggttcgggttggtggatgaataagtgtcacgccggacatttgaatggggtgtactatcagggcgggacatactccaaggcctctaccccaaatgggtacgataacggcattatatgggcaacatggaaaacccggtggtactccatgaaaaagaccacgatgaaaatcatccccttcaaccggttgacaatcggcgagggacagcagcaccacctgggcggagccaagcaggtcaggcccgaacaccccgccgagaccgagtatgattctctttatcctgaggacgacctg

SEQ ID NO: 11338 - DNA, 1359 bp, synthetic construct
  misc_feature 1..1359: note = source = /note="Description of Artificial Sequence: Synthetic coding sequence"
  source 1..1359: mol_type = other DNA
atgagctggtcgctgcacccacggaaccttatcctctacttctacgccctcttgttcctctcatcgacttgcgttgcatacgtcgccactagggataactgctgtattttggacgaacgcttcggaagttactgcccaacgacctgtggcatcgcggatttcctctcgacctaccagaccaaggtggacaaggacctccagtcgcttgaggatatcctgcaccaggtcgaaaacaagacgtccgaggtcaaacaattgatcaaagcaatccagctgacgtacaacccagatgagtctagcaaacctaatatgattgacgcggcgacgctgaagagcagaaaaatgcttgaagagataatgaagtacgaggccagcattctcactcatgattcctcgattagataccttcaagaaatctacaattcgaacaaccaaaagatcgtcaacctgaaggaaaaggtggctcaactggaggcccaatgtcaggaaccctgcaaagataccgttcagatccacgacatcactgggaaggactgccaggatatcgctaacaagggtgccaagcagtcaggactctactttatcaagcctctgaaggctaaccagcaattcctggtgtattgcgagatcgacggatcaggaaacgggtggactgtgttccagaagcgcctggacggatcagtggatttcaaaaagaattggattcagtacaaggaaggattcgggcacttgtccccaactggcactactgaattctggctgggaaacgagaagatccacctgatctccactcagtcggcgataccgtacgcactccgagtcgaactggaagattggaatggccggacctctactgcagactatgccatgttcaaggtcggccctgaagccgacaaatacaggctcacctacgcgtacttcgctggtggggacgccggcgacgcctttgacggattcgatttcggcgacgacccaagcgacaagttcttcaccagccataacggaatgcagttctcaacctgggacaacgacaacgacaaattcgaggggaattgcgcggaacaagacggatcgggatggtggatgaataagtgccacgctggccacctgaacggtgtatactaccagggcggaacttacagcaaggcaagcactccgaatgggtatgacaacggaatcatctgggccacctggaaaactagatggtactcgatgaaaaagactactatgaaaatcatcccattcaaccggctgaccatcggggagggccagcagcatcatctcggaggtgccaagcaagtgcgccctgaacatccagccgagacggaatatgacagcctgtacccagaagatgatctt

SEQ ID NO: 11339 - DNA, 1359 bp, synthetic construct
  misc_feature 1..1359: note = source = /note="Description of Artificial Sequence: Synthetic coding sequence"
  source 1..1359: mol_type = other DNA
atgtcatggtcacttcatccaagaaaccttattctttacttttacgcgcttctgttcctctcgtccacttgcgtggcgtacgtcgcaacccgggacaactgctgtatactcgacgaaaggttcggatcgtactgcccaacgacgtgcggaattgctgactttctgtcgacctaccagactaaggtggataaggatcttcagtctcttgaagatattctgcatcaagtggaaaacaagacttctgaagtgaagcagctgattaaggcaattcaactcacttacaaccccgatgaaagttcaaaaccgaatatgattgatgcagccaccctgaagagcagaaagatgctggaggagataatgaaatatgaagcctcgatccttacccatgattcctcgatcaggtacctccaggagatctacaactcgaataatcagaaaattgtgaatcttaaagaaaaggtcgcacagctggaggcgcaatgtcaggagccgtgtaaagatacggtgcaaatccacgatatcaccggtaaggattgtcaagatattgccaacaagggagcaaagcagtccggcctctactttatcaaacctctgaaggctaatcagcaatttctcgtctactgtgaaatagacgggagcggtaacggatggaccgtctttcaaaaacggttggacggtagcgtcgactttaagaagaactggattcagtacaaagaaggctttggtcatttgtcgcctactgggactacggaattttggctggggaatgagaagattcatctcatctccactcaatcagccattccctacgctctgcgcgtggaacttgaggattggaacgggagaacttcgaccgcagattatgcgatgtttaaagtaggacctgaagcagacaagtaccggttgacctatgcgtacttcgcaggcggtgatgcgggtgatgcttttgatggattcgattttggtgatgacccatcagataagttcttcacctcccacaacggtatgcaattcagtacctgggataacgataatgataagttcgaaggtaattgtgcagaacaagacggctccgggtggtggatgaacaaatgtcacgcagggcatctgaatggtgtgtactaccagggaggaacttacagcaaggcatctaccccaaacggatacgacaacggaatcatttgggcaacttggaaaactaggtggtactccatgaagaaaaccactatgaagataattccttttaaccgcctcactatcggcgagggccagcaacaccatcttggcggagcgaagcaagttagacccgaacaccctgcagaaactgagtacgattcactctaccctgaggacgatttg

SEQ ID NO: 11340 - DNA, 1359 bp, synthetic construct
  misc_feature 1..1359: note = source = /note="Description of Artificial Sequence: Synthetic coding sequence"
  source 1..1359: mol_type = other DNA
atgtcatggtccctccatccgagaaatcttatcctatatttctatgcgctgctgtttctgtcaagcacctgcgtagcctacgttgctacaagggataattgctgtatcctcgacgaacggtttggctcttattgtcctactacctgtggaattgccgacttcttatcgacatatcaaactaaggtagataaggacctgcagtcgctcgaggatattctacaccaggtggagaataaaaccagcgaagtgaagcagttgatcaaggccatccagcttacctacaatccggatgaaagctccaaaccaaacatgatcgatgccgccaccttgaagagcaggaaaatgttagaggaaataatgaaatatgaagccagtatcctgactcatgactccagtatccggtatctgcaggaaatctataattccaacaatcagaagattgtcaacctcaaagagaaggtggctcaactggaggctcaatgtcaggagccatgcaaagacacagttcaaatacacgacattaccgggaaggactgccaggatatcgccaacaagggggcaaaacaaagcggtctttacttcataaaacctctgaaagccaaccagcagtttttggtgtactgcgaaatagacggatcggggaatgggtggactgtgttccagaagcgtttagatggctctgtcgatttcaagaaaaactggatccagtacaaagaagggtttggtcacctcagccccacaggtacaaccgagttttggctggggaatgagaaaattcaccttatctccacacaatccgcgatcccatacgccttgcgcgtggagctggaggattggaatgggcggacctcgacagctgactacgccatgtttaaggtgggacctgaggcggataagtacagactgacctacgcttactttgccgggggggacgcgggggacgcatttgacggcttcgacttcggtgacgatccctctgataagttttttacctcccacaatggcatgcagttttcaacgtgggacaatgacaacgataagttcgagggcaactgcgcagagcaggacgggtcagggtggtggatgaataagtgccacgcaggtcaccttaatggagtatattaccagggcggtacatattcaaaagccagcactcccaacggctacgacaacggtattatttgggccacctggaaaacccgctggtacagcatgaagaagactactatgaagatcatcccgtttaacaggctgactatcggggagggccagcaacaccacctgggcggcgcaaaacaagtgcgtcctgaacaccccgcggaaacggagtacgattccctttatcccgaggatgatctt

SEQ ID NO: 11341 - DNA, 1359 bp, synthetic construct
  misc_feature 1..1359: note = source = /note="Description of Artificial Sequence: Synthetic coding sequence"
  source 1..1359: mol_type = other DNA
atgtcttggagtctgcatccaaggaatttaattttgtacttctatgccctccttttcttgtcatctacctgtgtggcctatgtggcgaccagggacaattgctgcatcctggacgaacgcttcggctcctactgccccaccacctgcgggatcgcagatttcttgtcaacataccagacaaaagtcgacaaggatctgcagagcctggaagacattctgcaccaggttgaaaataagaccagcgaggtgaagcaactcattaaagccatacagctaacctataatcccgacgagtcctcgaagcccaacatgattgacgccgcaacactgaaaagcaggaaaatgcttgaagaaattatgaagtatgaagcatcaattttaactcacgatagctccatccggtatttgcaggaaatctacaattctaataatcaaaaaatcgtgaacctcaaagagaaggttgctcaattagaggctcagtgccaggaaccttgcaaggataccgtgcaaatccatgatatcactggcaaagattgtcaagacattgcaaataagggtgcaaagcagagtggcttatactttataaagccactaaaggctaatcagcagtttctggtgtactgtgagatcgatggcagtggcaatggatggacagtctttcagaagaggcttgatggctctgtggattttaagaaaaattggatccaatacaaggaagggtttggccatctctctcccacgggcaccaccgagttttggctgggaaacgagaagatacacctcatcagcacacagagcgcaattccctatgctctgcgggtggagttggaagattggaacggacgtaccagcacagcggactatgcaatgttcaaggtgggcccggaggcggataagtacaggctaacatatgcttatttcgctggaggcgatgccggcgatgcgttcgacggattcgactttggtgatgacccaagcgacaagttctttacatcccataatgggatgcagttttccacgtgggataatgacaacgacaagttcgagggaaactgtgcagagcaggacggctcgggctggtggatgaacaaatgtcacgctggtcaccttaacggcgtctactatcagggtggcacctattctaaagcgtcgaccccaaatggatacgataacgggatcatatgggctacctggaagactcggtggtattccatgaaaaagaccaccatgaagatcattccatttaatcgcctgacaataggggagggacaacaacaccatttgggcggagcaaagcaagtgcgccctgaacaccccgcagaaactgaatacgactcgctgtacccagaggatgatctg

SEQ ID NO: 11342 - DNA, 1359 bp, synthetic construct
  misc_feature 1..1359: note = source = /note="Description of Artificial Sequence: Synthetic coding sequence"
  source 1..1359: mol_type = other DNA
atgtcttggtctctacacccaaggaatctgatcctgtatttctacgcactgctgttcttgagttctacctgtgttgcttacgtcgccacccgtgataactgttgcattctagatgaaaggttcgggagctactgcccgaccacttgtggcattgctgatttcctctcaacataccagacaaaagtcgacaaggatctgcaatccctagaagatatcctccaccaagtcgagaataaaacatcagaggttaagcaactgattaaagcgattcagttaacttataaccctgatgagtcttccaagcctaacatgattgatgccgccaccctaaaatcacgcaagatgttggaggaaattatgaagtatgaagcgtctattttaactcatgactccagcattcgctatctacaggagatttataatagtaacaatcagaaaatagttaatctaaaagagaaagtcgcccaattggaagcgcaatgccaggaaccatgtaaggataccgtccaaattcacgacatcactgggaaagactgccaagatatcgctaacaagggggctaagcagtctggtctgtacttcatcaagcctctaaaggcaaaccaacagttcttggtttactgtgaaatcgatggttctggcaacggatggacagtgttccaaaaacgcctggatggctccgtagattttaagaaaaactggatccagtataaggaaggcttcggccatctgtcgcctaccgggacgactgagttttggctaggcaatgagaagatccacttaatcagcacgcaatccgctattccgtacgccctcagagtggaacttgaggattggaacggccgtacatcaaccgcagactacgcgatgttcaaagttggacctgaagccgataaataccggttaacgtatgcttacttcgccggaggcgatgcaggagacgcctttgatggattcgacttcggcgatgatccttcggataaatttttcactagtcacaatggaatgcagttcagtacatgggacaatgataatgataaattcgagggcaattgcgcggagcaggatggcagcggatggtggatgaataaatgccacgcaggtcatttgaacggtgtgtactaccagggcggcacctactccaaggcatcaactcccaatgggtacgataatgggataatctgggcaacatggaaaactcgttggtactcgatgaagaagactaccatgaagattattccgtttaatcgcctaacgatcggagaaggacaacaacaccatttaggtggagccaagcaagttcgcccggaacatccagctgagaccgagtatgactccctttatccggaggatgatctt

SEQ ID NO: 11343 - DNA, 1359 bp, synthetic construct
  misc_feature 1..1359: note = source = /note="Description of Artificial Sequence: Synthetic coding sequence"
  source 1..1359: mol_type = other DNA
atgtcatggtcccttcatccaagaaatctgattctttatttttacgcacttttgtttcttagctctacgtgtgtggcatatgttgctacgcgcgacaactgttgcatactggatgaaagattcgggtcatattgcccgacaacgtgcggaattgctgactttctttcaacttatcaaactaaggtcgataaagatttacagagcttagaagatatcttacatcaagtggagaacaaaacatcagaagttaaacagttaattaaagcgattcagctgacttacaacccagatgaatcatctaaaccgaacatgattgatgccgcaacccttaaaagtcgcaaaatgcttgaagaaataatgaagtacgaggcctccattcttacacatgattcatcaatccgttatttacaggaaatttataactcaaacaaccagaaaattgtaaacttaaaggaaaaagtcgcacagctggaagcacaatgccaagaaccctgtaaagatactgtccaaattcatgatatcacgggcaaagattgtcaagatattgcaaacaaaggagctaaacagtcgggcctttactttattaagccattaaaggcaaaccagcagtttctggtctactgcgagatagatggaagcggaaatggctggaccgtgtttcagaaacgtctcgatggcagcgttgactttaaaaagaactggattcagtataaagaaggctttgggcatttgagcccaaccggcaccacagagttctggctgggaaacgaaaaaattcatcttatctcaacacagtcggctatcccttacgcgctgcgggtagaattggaggattggaatggcagaacatcaacggccgattatgcaatgtttaaagtcggacctgaggcggataagtacagattaacatatgcatatttcgccggaggcgatgctggcgatgcttttgatggttttgatttcggagacgatccgtcagataaattttttacatctcataacggtatgcagttttcaacgtgggataacgacaacgataaattcgaaggcaactgcgctgaacaggatggttctggatggtggatgaacaaatgccatgcggggcatctgaatggcgtctactaccaaggtgggacatattcgaaagcgtcaacgccaaatgggtatgacaatggcataatatgggccacttggaaaacccgctggtattctatgaaaaaaaccacaatgaaaattattccatttaatagattgaccattggagaaggccaacaacatcatctcggcggagctaaacaagtgcgccctgaacatcctgcggagacagaatatgattcactgtatccagaagatgatctc

SEQ ID NO: 11344 - DNA, 1359 bp, synthetic construct
  misc_feature 1..1359: note = source = /note="Description of Artificial Sequence: Synthetic coding sequence"
  source 1..1359: mol_type = other DNA
atgtcctggtcgctgcatccgcggaacctgatcctctacttttacgcgctgctcttcctttcgtcgacctgcgtcgcgtacgtcgccacccgcgacaactgttgcatccttgatgagcggttcggatcctactgcccgaccacttgtggtatcgccgatttcctgtcgacgtaccagaccaaggtggataaggacctgcagtcactggaagatattctgcaccaggtggaaaacaagacctcagaagtaaagcaacttatcaaagccatccagctgacctacaacccagacgagtcatccaagcctaacatgatcgatgcagctactctcaagtcacgtaaaatgcttgaggagatcatgaaatacgaggcttcaatcctgactcatgattccagcatccgctacctccaagagatatacaactcgaacaatcagaaaatcgtgaatctgaaggaaaaagttgcccaattggaagcacaatgccaagagccgtgcaaggacaccgtgcagattcacgacatcactggaaaagactgccaggatatcgcaaacaagggagccaaacagtcgggactgtacttcatcaagcccctgaaggccaatcaacaattcctggtgtattgcgaaattgacggatcgggaaatgggtggactgtctttcagaagcggctggatggatcagtggacttcaaaaagaactggattcagtacaaggagggttttgggcacttgtctccaacgggaaccacggaattttggctcggaaacgagaaaattcacctcatctcaactcagtcggccatcccatacgccctgcgggtcgaactcgaggattggaacggacgaaccagcaccgccgactacgccatgttcaaggtcggacccgaagccgacaagtaccgcctcacttacgcgtactttgctggtggagacgctggagatgcgttcgacggattcgatttcggagacgatccgtccgacaaattcttcaccagccataacgggatgcagtttagcacttgggacaatgacaatgacaagttcgaagggaattgcgccgaacaggacggctctggatggtggatgaacaagtgccatgcgggacacctcaatggggtgtactatcagggagggacctactccaaggccagcactccaaacggttacgataacgggatcatttgggccacttggaaaacccggtggtactcaatgaagaaaaccaccatgaagatcatcccctttaatcggctgaccatcggagagggacagcagcatcacctgggaggagcgaagcaggtgcgccctgaacacccggcggagacggaatacgactctctgtacccagaagatgacctg

SEQ ID NO: 11345 - DNA, 1359 bp, synthetic construct
  misc_feature 1..1359: note = source = /note="Description of Artificial Sequence: Synthetic coding sequence"
  source 1..1359: mol_type = other DNA
atgagctggagcctgcatccaagaaacctgattctttacttctacgcactcctattcctctcatcaacttgcgtggcttacgtcgccacccgagacaactgttgtattttagacgagcgctttggaagttattgtccaactacctgtggaatagctgatttcctatcgacatatcagacgaaagtcgataaagatctgcagagtctcgaagacatattgcaccaggtggaaaataagacgtcagaagttaagcagttaatcaaagccatacagcttacatacaacccagacgaaagttctaaaccaaacatgattgatgcggcaactcttaagtcccgtaagatgctcgaggaaatcatgaagtatgaggccagcattctgacgcatgattctagcatccgctatctacaagaaatatacaactccaataaccagaagatcgtcaatctcaaggagaaggtcgctcagctggaagcccaatgccaggaaccgtgtaaggataccgtgcagatccatgacatcacaggaaaggattgtcaagacatcgccaacaagggcgccaagcaatcaggactgtacttcattaagcccctgaaggccaaccagcagtttctggtttattgtgagatcgatggctctggtaatggatggaccgtgttccagaaaaggctggatgggagcgtggatttcaagaaaaactggatacaatacaaagaaggctttggccacctgagtcctactgggaccaccgaattttggctcggaaatgagaaaatacatctcataagcacccagagcgccatcccctatgctttgcgggtggagctggaagactggaacggccgaacgagtacagccgattacgctatgtttaaggtgggcccagaagcagacaaatacaggttaacttacgcatacttcgccggcggcgatgcaggagacgcctttgacggttttgattttggagatgatccttccgacaagttcttcaccagccataacggcatgcagttcagtacatgggataacgacaacgacaaattcgagggtaattgcgcagagcaggacgggtccggatggtggatgaataaatgccacgctggccacctgaacggagtttactaccagggcggcacatacagtaaggcatctacaccaaatggatatgataatgggatcatctgggcaacatggaagacccgctggtattctatgaaaaagacaaccatgaagatcatcccatttaaccggctgaccataggtgaaggccaacaacatcatctgggcggggccaagcaggtgcggccagagcaccctgctgagacagaatacgactcactttatcccgaagatgatcta

SEQ ID NO: 11346 - DNA, 1359 bp, synthetic construct
  misc_feature 1..1359: note = source = /note="Description of Artificial Sequence: Synthetic coding sequence"
  source 1..1359: mol_type = other DNA
atgagttggagcttacacccacgcaatcttatcctctacttctatgccctgctattcctttccagcacatgcgtggcttacgtggctactcgggataattgctgcatactggatgaacggtttggcagctattgccccactacatgtgggattgctgatttcttgagtacataccaaacgaaagtggataaagatctccagagcttggaggacatactacatcaggttgagaataaaacatccgaagtgaaacagcttatcaaagcaatccagctcacgtacaaccctgacgagtcttcaaagccaaatatgattgacgcagcgacactcaagagccgcaagatgctcgaggaaatcatgaagtatgaggcaagcatcctgacacacgacagcagcattagatatcttcaggagatatacaacagtaacaatcaaaagattgtgaatcttaaggagaaagtggcacagctggaggcacagtgccaggaaccgtgtaaagacaccgtccagattcacgacattaccggcaaggattgccaggacattgcaaataaaggggccaagcagtctggcctgtacttcatcaaacccctcaaggccaaccagcagttccttgtgtactgtgagatagatgggtccggcaacgggtggacggtattccagaagagattggacggcagtgtggactttaagaaaaactggatacagtataaggaaggattcggtcacctgagccctaccgggacgactgagttctggctcgggaacgagaagatccacctgatctctactcaaagcgctattccatacgccctgagagtggagctcgaggactggaatgggcgtacaagcaccgctgattacgctatgtttaaggtgggtcctgaggctgacaagtaccgtctgacttatgcatacttcgcaggaggagacgcaggggatgcttttgacggatttgatttcggcgatgatccctctgataaattttttacttcacacaacggaatgcagttttcgacgtgggataacgacaatgacaaatttgagggtaactgcgccgagcaagatggaagcggctggtggatgaataagtgccacgctggccatttgaacggagtttattatcaggggggcacttatagcaaagcgtctacccccaacggatatgacaacggcattatttgggccacatggaagacacgatggtactctatgaagaaaacgaccatgaagatcattccattcaatcgcctcaccatcggcgagggacagcagcatcatttggggggggctaaacaggtccgcccagagcacccagcggaaacagagtacgattccctgtaccccgaagatgatcta

SEQ ID NO: 11347 - DNA, 1359 bp, synthetic construct
  misc_feature 1..1359: note = source = /note="Description of Artificial Sequence: Synthetic coding sequence"
  source 1..1359: mol_type = other DNA
atgtcatggtcgcttcacccccgaaacttgattttgtacttttatgctcttcttttcttgtcatctacgtgcgttgcctacgtcgctacccgagataattgctgtatccttgacgaaagattcggttcttattgtcccacgacatgtggaattgcggacttcctttccacatatcagaccaaagtcgataaagatcttcagtcgctggaagacatccttcaccaagtggaaaataagaccagtgaagttaagcagctgatcaaggccatacaacttacctacaatccagatgaaagcagtaaacctaatatgatcgatgcagcaacattaaaatcgagaaaaatgcttgaagaaatcatgaaatatgaagcaagtattcttacccacgactcatcaattagatatcttcaggaaatatacaattccaataaccaaaaaatcgtgaatcttaaggaaaaagtcgcccagcttgaagctcaatgtcaagaaccgtgcaaggacacagttcaaatacatgacattaccggaaaagactgccaggacattgcaaataaaggagcaaagcagagcgggctttattttattaaacccctgaaggcaaatcagcaattccttgtatattgtgagatagacggatctggcaatggatggactgttttccagaagcgactggatggaagtgtggacttcaaaaaaaattggattcagtataaggaaggatttggtcacctgtcaccgacaggaacaactgaattttggttgggaaatgaaaagatccacctgattagtactcaaagtgccattccttacgccctacgagttgaattggaggactggaatggacgaacatcaaccgctgattatgctatgtttaaggtcggaccagaagcagataaataccgtttaacctacgcctactttgctggtggtgatgctggagacgcatttgatggtttcgacttcggtgatgatccatcagacaaatttttcacatcccataatggaatgcaatttagcacatgggacaacgataatgataagtttgagggaaactgtgcagaacaggacggatcgggctggtggatgaataagtgccatgcaggacaccttaatggagtctactatcagggaggaacttacagtaaggcatctacgccaaacggatatgacaatggaattatttgggccacatggaagacaagatggtatagcatgaaaaaaacgactatgaagattatcccatttaaccgattgacgatcggagagggacaacaacatcatctgggaggtgctaaacaggttaggccagagcacccagcagaaactgaatatgatagtttgtacccagaggatgacctc

SEQ ID NO: 11348 - DNA, 1359 bp, synthetic construct
  misc_feature 1..1359: note = source = /note="Description of Artificial Sequence: Synthetic coding sequence"
  source 1..1359: mol_type = other DNA
atgtcttggtccttacatccaagaaaccttatcttgtatttctatgccctcctgttcctctcaagtacctgtgtggcgtacgtggcaacccgggacaattgttgtatcttggatgagcgttttggctcctattgtcccaccacatgcggaatcgcagatttcctctccacttatcagactaaggttgataaagacctgcaaagcctggaggacatcctccaccaagtggagaataagactagcgaagtgaaacagctgatcaaagccatccagctgacttataatcctgatgaaagctctaaacccaacatgatcgacgccgctactctgaaatcaagaaaaatgctggaagaaatcatgaagtatgaagcctcaattctgacccatgattcctctatccggtatctgcaggagatttataactcaaacaaccagaagatcgtcaacctcaaagagaaagttgcccagttggaggcccagtgtcaggagccctgtaaggacaccgtgcagatccacgatatcacaggtaaggattgtcaggacattgctaacaagggtgctaagcagagcgggttatatttcataaagccattgaaagctaaccaacagttcctggtgtattgcgagatcgatggcagcggcaatggttggacggtgttccagaaacgcctggacggctcggttgactttaaaaagaactggatccagtacaaagaaggatttgggcacctgtccccaacaggtacaacagagttttggctggggaacgagaaaattcacctcatctccacccagagcgccattccgtacgcgctccgagtggagctggaagattggaatgggagaacttctaccgcagactatgccatgtttaaggtggggccggaagccgacaagtaccgcctcacatatgcatattttgcaggaggcgatgccggcgacgcattcgacgggtttgactttggggacgatccatcagacaagtttttcacaagccacaatggaatgcagttttcaacgtgggacaacgacaacgacaaatttgagggaaactgcgctgagcaggatggaagcggctggtggatgaataaatgccatgcaggccatctgaacggggtttactaccaggggggaacttatagtaaggcttccacaccaaatgggtatgacaacggcatcatttgggctacctggaagaccagatggtatagtatgaaaaaaacgacaatgaagattatccctttcaatcgcttaaccattggcgaggggcagcaacatcatctcggtggagccaaacaggtgaggcctgaacatccggcggagacagaatatgactccctgtacccggaggatgacctg

SEQ ID NO: 11349 - DNA, 1359 bp, synthetic construct
  misc_feature 1..1359: note = source = /note="Description of Artificial Sequence: Synthetic coding sequence"
  source 1..1359: mol_type = other DNA
atgtcgtggtcgctgcacccccgtaacctgatcctctacttctatgccctcctgtttctgagcagtacctgcgtcgcctacgtcgctacgcgcgacaattgttgtatcctcgatgaacgattcggttcctactgccccaccacatgcgggatcgctgatttcttgagcacctaccagaccaaggtggacaaggatctccaatccctggaggacatcctccaccaggtcgagaacaagaccagtgaggtcaagcagcttatcaaggccatccagcttacgtataacccggatgagtcttcgaaacccaacatgatcgacgccgctacgctcaagtcccgtaaaatgctcgaggagattatgaagtacgaagcatctatactgacgcacgattcctccatccgttacctccaggagatttataactctaacaaccagaagatcgtgaacttgaaggagaaggtcgcccagcttgaggcccaatgccaggaaccctgcaaagatactgtccagattcacgatatcaccggcaaggactgccaggacatcgctaacaagggtgctaagcagtccggcctgtactttatcaaacctctcaaggccaaccagcagttcctggtatactgcgagatcgatggttcaggcaacggttggactgtgttccaaaagcgcctggatgggtctgttgatttcaagaaaaactggattcagtacaaggagggcttcggccacctgtcccccaccggcaccactgagttctggctcggaaacgagaagatccacttgatctccacgcaatccgccatcccctacgctctccgcgtcgaactggaagattggaacggtcgaacatctactgcggactacgcgatgttcaaagtgggccctgaagccgataagtaccgtttgacttatgcctatttcgctgggggtgacgccggtgatgccttcgacggattcgatttcggagatgacccgtcagataagttcttcacctctcacaatggcatgcagtttagcacctgggacaacgacaatgacaagttcgagggcaattgcgccgagcaggacggcagcggttggtggatgaataagtgtcacgctggccacttgaatggcgtgtactaccagggcggcacctacagcaaagcgagcacgcctaacggctacgacaacggaattatttgggctacctggaaaacccgctggtattccatgaagaagaccacgatgaagatcatccctttcaaccgcctgaccattggagagggacagcagcatcacctcggcggagccaagcaagtgcgtcccgagcaccctgcagagaccgagtacgactccctttacccagaagacgacttg

SEQ ID NO: 11350 - DNA, 1359 bp, synthetic construct
  misc_feature 1..1359: note = source = /note="Description of Artificial Sequence: Synthetic coding sequence"
  source 1..1359: mol_type = other DNA
atgtcatggagcttacaccctaggaatctcatcctgtacttttacgccctcctgtttctgtcatccacatgcgtcgcttacgtggcaactcgggataactgctgcattctcgatgaaagatttgggtcatactgccctacaacttgcggtattgccgatttcctgtcgacataccagaccaaggttgacaaggacctgcagagcctagaggacatcctgcaccaggtggaaaataaaactagcgaggtaaaacagctgataaaggccatacagcttacttacaacccggatgagtcgagcaagccaaacatgattgacgccgctacacttaaaagcagaaagatgctcgaggagattatgaagtatgaggcctcgattctgactcacgattcatcgatcagatacctgcaagagatttataatagtaataaccaaaaaatcgtgaacctaaaagagaaggttgctcagcttgaagcgcagtgtcaagagccatgtaaggacacggtgcaaattcacgatattacgggcaaggactgtcaggatatcgcaaacaagggcgccaaacagagcggcctgtactttatcaaaccactgaaagctaaccagcaatttctggtctattgcgaaatcgacggatccggtaatggttggacagtgttccagaagcggctcgatgggtcggttgacttcaaaaagaattggattcagtacaaagaaggattcggccatctgtctcccacaggaacaacggaattctggttaggaaatgagaagattcacctcatctccacacagtcagccattccttatgcactcagagtggaactggaggactggaacgggcgtacttccacggcggactatgccatgtttaaagttggacctgaggcagataaataccgcctgacctacgcctatttcgcaggcggcgatgcaggtgacgcattcgatggctttgattttggtgacgacccatccgacaagttctttacctcccacaacggaatgcagttttctacatgggacaatgacaatgataagttcgaagggaattgcgctgaacaggatggatcaggctggtggatgaataagtgtcacgccggccatctcaatggagtgtattatcaggggggtacttactcaaaggcatcaactcccaacgggtatgacaacgggattatctgggcgacctggaaaacccgctggtactctatgaaaaagaccacaatgaagataattcccttcaacagattaaccatcggagagggtcagcagcatcatctggggggagccaaacaagtgcgaccagagcatccagccgagactgagtatgattccttatatccggaagacgatctc

SEQ ID NO: 11351 - DNA, 1359 bp, synthetic construct
  misc_feature 1..1359: note = source = /note="Description of Artificial Sequence: Synthetic coding sequence"
  source 1..1359: mol_type = other DNA
atgtcttggtcactccacccgcgaaatcttatcctttacttctacgcccttctgttcctgtccagtacatgtgtggcgtacgtggcaacccgcgataattgctgtatcttagacgagcgcttcggatcatattgcccaacgacttgcggcatcgccgacttcttgtcaacgtatcagaccaaggttgacaaagatctccaatcgctcgaggacatcctccaccaggtcgagaataaaacatcggaggtgaagcaactcatcaaagccatacagctgacttacaatccagatgagagttccaaacctaatatgattgatgcggccactctcaagtctcgaaagatgctagaggaaatcatgaagtacgaggccagcatacttacgcatgactcgtccatccgttacttgcaggagatctacaacagtaacaaccaaaagattgtgaatctgaaggagaaggtggcgcagctggaggcacaatgccaggagccctgcaaggatacagtgcagatacatgacatcacaggcaaagattgccaagacatcgccaacaagggcgcaaagcagtcgggcctgtacttcatcaaaccactaaaagccaaccaacagttcctggtgtactgcgagatcgacggttcgggaaatgggtggaccgtgttccagaaacgcctagatggttcggtagactttaagaagaattggatccagtacaaggagggtttcggtcacttgagccccacagggactaccgaattctggctgggtaacgagaagatccacttaatttctactcaatcggccatcccctacgcgctgagggtggagctagaggactggaatgggcgcaccagcacagccgattacgcgatgttcaaggtgggccccgaggctgataagtaccggctcacatacgcctacttcgcaggcggcgatgccggcgatgctttcgatggcttcgacttcggcgacgatccctccgataaattttttacgtcccataatggtatgcagttcagtacgtgggataatgacaacgacaagtttgaaggcaattgcgccgagcaggatggttccggctggtggatgaataagtgccacgccggccacctgaacggagtgtactaccagggtggcacatactctaaggcctcgactccgaacggttatgacaatggcattatttgggctacgtggaagaccaggtggtactccatgaagaagaccacgatgaagattataccctttaaccgtttgacgatcggcgagggccaacaacaccacttgggcggcgctaagcaagtgagaccggaacacccagcagaaactgagtatgatagtttgtaccctgaggatgatctc

SEQ ID NO: 11352 - DNA, 1359 bp, synthetic construct
  misc_feature 1..1359: note = source = /note="Description of Artificial Sequence: Synthetic coding sequence"
  source 1..1359: mol_type = other DNA
atgtcctggtccctgcatcctcgtaacctcattttgtatttttacgcgctactctttctctcaagcacctgcgttgcgtacgtcgccacacgcgataattgttgcatactggatgagcgcttcggtagctattgtccgacgacctgcggcattgctgattttctgtccacgtatcagaccaaggtagacaaagacctccagtccctcgaagacatcttgcaccaagtggagaacaaaacctctgaggttaagcagctgattaaggcaatccagctcacgtacaacccagatgagtctagcaagcctaacatgatcgatgcagctaccctgaagagccgcaaaatgctggaagagattatgaaatatgaggcgtctattctgacccatgactccagcatccgctacctgcaggaaatctataactcgaataatcaaaagatcgtgaacctgaaggagaaagtggctcagctggaggcacaatgccaggagccgtgtaaggatacggtgcagatccacgacataaccgggaaggactgccaagatatcgctaataagggcgccaagcagagtggcctgtactttattaagcctctgaaagcgaatcaacagttcctggtttattgtgagattgacggttctggcaatggatggaccgtttttcaaaaacgtcttgacggcagcgtcgactttaagaaaaactggattcagtacaaagagggtttcggtcacctgagccctaccggcacgactgaattttggctgggaaatgagaaaatccacttgatcagcactcaaagcgctatcccctatgccttacgcgtggagctggaggactggaacggtagaacctctactgctgattatgctatgtttaaggtgggtcctgaagcggataaatatagactgacctacgcctactttgcaggtggcgacgcgggtgatgcatttgatggtttcgacttcggcgacgacccgagcgataagttcttcactagccataatggtatgcagttcagtacgtgggataacgacaacgacaagtttgaaggtaactgcgctgagcaggacggttcaggttggtggatgaacaaatgtcacgctggtcacctgaacggtgtttattaccagggcggcacgtacagtaaagcaagcactcctaatggctacgataacggaataatctgggccacttggaagacgcgttggtatagcatgaagaagaccaccatgaaaatcattccatttaatcgtctgaccattggtgagggccagcaacaccacctgggtggagcaaaacaggtgcgaccggaacaccctgctgaaactgaatatgactccctgtatccagaggatgacttg

SEQ ID NO: 11353 - DNA, 1359 bp, synthetic construct
  misc_feature 1..1359: note = source = /note="Description of Artificial Sequence: Synthetic coding sequence"
  source 1..1359: mol_type = other DNA
atgtcctggtctctgcaccctcggaacctcatcctgtatttttacgcccttctatttttatcaagtacctgcgtggcctacgttgccacacgggataattgttgcatcttggatgagcggttcggatcttactgtccaactacctgtgggattgcagacttcctgtctacctatcagacaaaggtggataaggacctccagtcactggaggatatcctgcaccaggttgaaaacaagacgtcagaggtgaagcaattaattaaggcaattcagctgacctataaccctgacgaaagttccaagccaaacatgattgacgcagcgaccctgaaatccaggaagatgcttgaagagattatgaagtacgaggcctctatcttgacccacgacagttctatccggtatctgcaggaaatttacaattctaataaccagaaaatagttaacctaaaagagaaagtggcacagctggaagcccagtgccaagaaccatgcaaggatacagtccaaattcacgacattactgggaaggattgccaagatattgccaataagggcgccaagcagtctggactgtattttattaagccactgaaagcgaaccagcaattccttgtgtactgtgagatcgacggcagcggaaacggctggacggttttccagaagcgtctcgatggctcggtagatttcaagaagaattggatccagtacaaagagggattcgggcacctgtcacccacaggaacaaccgagttctggttgggaaacgagaagatccacctcatctccacacagtccgccataccttatgcgctgcgcgtcgagctcgaggattggaacggtaggacctccactgccgattatgccatgtttaaggtgggacccgaggccgacaagtatcgcttaacctacgcatattttgctggcggagatgctggcgacgcctttgatggctttgacttcggagacgatcctagtgataagttcttcacaagccataacggtatgcagttctcgacctgggacaacgataatgacaagttcgaaggaaattgtgccgagcaggacggcagcggatggtggatgaacaagtgccacgctggccatctaaacggcgtgtattatcaaggcggcacctacagcaaagcgtccacacctaatggttatgacaatggtatcatctgggcaacctggaaaactcggtggtattccatgaaaaaaaccacaatgaagatcatccctttcaacagactcactatcggcgagggtcagcagcatcacttaggaggcgccaagcaggtgcggccagagcatccagcagagacggagtatgatagtctctaccctgaagacgacctc

SEQ ID NO: 11354 - DNA, 1359 bp, synthetic construct
  misc_feature 1..1359: note = source = /note="Description of Artificial Sequence: Synthetic coding sequence"
  source 1..1359: mol_type = other DNA
atgtcctggtccctccacccccgcaacctgattctgtacttttatgcgctcctgtttctatcctccacttgtgtggcgtacgttgctactcgggataactgttgcattctggacgaaaggtttggcagctactgtccaacaacgtgcgggatcgcagacttcctgtcaacttatcagaccaaggtcgacaaggatttacaatcgctggaagacatcttgcaccaggtagaaaacaaaacctctgaagtgaaacagttgatcaaggcaatccagttgacatataacccggacgagtccagtaagcccaacatgatagatgcagccactctgaagagccgcaagatgcttgaagaaataatgaagtacgaggcttcaatccttactcatgatagcagcattcgctacctgcaagaaatctacaactccaacaaccaaaagatcgtgaacctgaaggagaaggtggcccagctggaggcacagtgccaagagccttgcaaggacaccgtgcagatacatgatataaccggtaaggactgtcaggacatcgcaaataaaggcgccaaacagagtggcctgtatttcatcaagcccctgaaggcaaatcagcagtttctggtgtactgcgaaattgacggaagtggcaatggctggactgtgtttcagaagcggcttgatgggtctgtggattttaaaaaaaactggatccaatacaaggagggttttgggcacctttcgccaaccggtaccactgagttctggttaggcaacgaaaagatccacttaatcagtacccagagcgcgataccctacgcactgcgagtggaactcgaggattggaatggccggacatccacggctgactatgcaatgttcaaggttggacctgaggccgataagtatcggctcacctatgcctactttgccggaggcgatgccggcgacgcatttgatggcttcgacttcggcgatgacccatcagacaagttcttcactagtcataatggcatgcaattctctacttgggacaacgataacgataagtttgaaggcaattgcgcagaacaggatggttcaggctggtggatgaataagtgtcacgccggccacctgaatggggtgtattatcaaggcggcacttacagcaaggcttccacaccgaacgggtacgataatggaattatatgggcaacttggaagacgagatggtattccatgaagaagactacgatgaaaataatcccttttaatcgtctaacaatcggggagggacaacaacaccacctcggcggagccaagcaggtgcgacctgagcatcctgccgaaactgagtacgatagcctgtatcccgaggatgatctg

SEQ ID NO: 11355 - DNA, 1359 bp, synthetic construct
  misc_feature 1..1359: note = source = /note="Description of Artificial Sequence: Synthetic coding sequence"
  source 1..1359: mol_type = other DNA
atgtcttggagcttgcacccccgcaacctcatcctgtatttctacgccttgctcttcctctcgtccacctgcgtagcctacgtggccaccagagacaattgctgtatcctggatgagagatttgggtcatattgtccgaccacttgcggcatcgctgatttccttagcacctatcagaccaaagtggataaggacctgcagtcgctggaagatattctgcatcaagtggaaaacaagacctccgaagtgaaacagttaattaaggcaatccagctgacgtataacccagatgaaagctccaaacccaatatgattgacgcagcaaccttaaagtcacgtaaaatgcttgaggaaatcatgaagtacgaggcttccatactgactcatgattccagcatccggtaccttcaggaaatctataatagcaacaatcagaagatcgttaaccttaaagaaaaggtagcccagctagaagctcagtgccaggaaccatgtaaggatacagtgcagatccatgatattactgggaaggactgccaggacatagctaacaaaggtgcaaagcagtccgggctgtatttcattaaacccttgaaggcaaaccagcagttcctcgtgtactgcgagatagacgggagtggaaatggctggacagttttccaaaagcgccttgacggtagcgtggatttcaagaaaaactggatacaatataaggaaggctttgggcacctctctccaactggcactactgagttctggctggggaacgaaaaaatccatctgatttccacccaaagcgccatcccctacgcattacgcgtggagctggaggactggaacggaagaaccagtactgcagactacgcaatgttcaaggtcggacccgaagccgacaagtaccgtctgacgtacgcctatttcgccgggggggatgccggcgatgcgtttgatgggtttgactttggagacgacccatccgacaaattctttaccagccacaatgggatgcagtttagcacgtgggacaatgacaatgataagtttgagggcaattgcgcagagcaggacggttcaggctggtggatgaacaaatgtcacgcagggcatctcaatggggtttattatcagggcggaacttactccaaggcaagcaccccaaacgggtatgataacgggattatttgggctacctggaaaacacgatggtatagcatgaaaaagacgaccatgaagataattcccttcaaccgtctaaccatcggtgaaggacagcagcatcacctggggggtgcaaagcaggtgagaccagagcacccagctgaaaccgagtatgatagcctttacccagaggatgatctc

SEQ ID NO: 11356 - DNA, 1359 bp, synthetic construct
  misc_feature 1..1359: note = source = /note="Description of Artificial Sequence: Synthetic coding sequence"
  source 1..1359: mol_type = other DNA
atgtcctggagtctgcaccccagaaatctcatactctatttttacgccctgcttttcctgtcctccacctgtgtcgcttacgttgctacaagggacaattgctgcatcttggatgagaggtttggtagctactgccctaccacctgcggaatcgccgattttctgagcacgtatcagaccaaagttgacaaggacctccagagcctcgaggatatcctccaccaggtggagaataagacctccgaggtcaagcagctgatcaaggctatccaacttacttacaatccggatgaatcctccaaacctaacatgatcgacgctgccacactgaaaagcaggaagatgctggaagaaatcatgaagtatgaagcctcaattctgacacacgactcatccatcaggtaccttcaggagatttataatagcaataaccaaaagattgtgaatctcaaagagaaggtggctcaactcgaggcccagtgtcaggagccctgcaaggacactgtgcaaatccacgatatcacaggtaaagattgtcaggacatcgctaataagggcgcaaagcagagcggactttacttcatcaagcctctgaaagctaaccagcagttccttgtgtactgtgaaatcgacggttcaggcaacggttggaccgtgtttcagaaaaggctcgatggttctgtcgattttaaaaaaaactggatccagtataaggagggtttcggtcacttgtctccaactggaaccaccgagttttggctgggcaatgagaagattcacctcatctccacccagtctgccatcccctatgctctgagagtcgagttggaggattggaacggtagaacgagtacagctgattacgcaatgtttaaagttggaccggaggccgacaaatatagattgacgtacgcctacttcgcaggaggtgacgctggcgacgcctttgacggctttgatttcggagacgaccccagtgataaatttttcacctctcacaatggaatgcagtttagtacatgggataacgataatgacaaattcgagggaaactgtgcagaacaggacggttctggctggtggatgaacaagtgtcacgcgggtcacctgaatggagtctactaccaaggcggaacctatagtaaagccagcacacctaatggctacgacaacggcattatatgggccacttggaagacacgctggtacagtatgaaaaagactaccatgaagataatcccctttaatcgcctgacaatcggcgagggacagcagcatcaccttggaggagctaagcaagttcgcccagagcatcccgccgagactgagtatgattcactgtacccagaggacgatctc

SEQ ID NO: 11357 - DNA, 1359 bp, synthetic construct
  misc_feature 1..1359: note = source = /note="Description of Artificial Sequence: Synthetic coding sequence"
  source 1..1359: mol_type = other DNA
atgagttggtcactgcatccgcgcaatctgatactttatttctatgctctcctgtttctgagctcgacctgtgtggcgtacgtcgccacgcgggataactgttgcattttggacgagcgtttcggaagctactgccctactacttgtggaatcgcggatttcttgtccacctatcagactaaggtagacaaggatctacagtcgctggaagacattctgcaccaggttgagaataaaacttccgaggtgaagcaacttatcaaagcaatacagctcacatacaaccctgacgagtctagcaaaccaaacatgatcgacgccgctacactcaaatctcgaaagatgctggaggagatcatgaaatacgaagcatccatactcacgcacgactcttcaattagatacctgcaggagatctataatagcaacaatcagaagatcgtaaacctcaaggaaaaagtggcgcagctggaggcgcagtgccaggagccttgtaaagatacggtgcaaatccacgatattacagggaaggactgccaggatatcgcgaacaagggcgccaaacaaagcggattgtacttcataaagcccctgaaggccaaccagcagttccttgtttattgtgaaatcgacggctccggcaatgggtggacagtctttcagaagcggctggacggctctgtggacttcaagaagaattggattcagtacaaggagggatttggtcacctgtctccgacaggcacaacagagttctggctaggcaacgagaaaatccatctgatttctacccagagtgctattccctatgctctccgggtagaattagaggactggaacgggcgcacctccaccgccgattacgccatgtttaaagtaggtccggaagccgataagtaccgcctgacctacgcctactttgccggaggtgacgctggtgatgccttcgatggatttgatttcggtgatgacccgagtgacaagtttttcacgtcccataatggaatgcagttctccacctgggacaatgacaacgataaattcgagggcaactgtgcggaacaagacggctctggatggtggatgaacaagtgccacgctggccatctgaacggggtttactaccagggaggaacttactcaaaggcatccactcctaacgggtacgataatggaataatttgggccacatggaagaccagatggtactccatgaaaaaaacaaccatgaaaatcatcccctttaataggctaacaatcggggaaggacagcaacaccatctgggaggcgcgaagcaggttcggcctgagcacccggctgagaccgagtatgatagcttataccccgaggatgatctg

SEQ ID NO: 11358 - DNA, 1359 bp, synthetic construct
  misc_feature 1..1359: note = source = /note="Description of Artificial Sequence: Synthetic coding sequence"
  source 1..1359: mol_type = other DNA
atgtcctggtccctgcaccctcgtaacctgattctgtacttctacgccctgctcttcctttcgtccacttgtgtggcgtacgtggcaaccagagataactgttgtattctggatgagcggtttggttcctattgtcccactacctgtggaatagccgatttcctctccacttaccagactaaagtggacaaagaccttcaatcgctcgaggatattcttcatcaagtggagaataagacctccgaagtgaagcagctcataaaagcaattcaattgacgtacaacccggatgaatcctcgaaaccaaatatgattgacgcagcaactctgaagtcacgcaagatgctggaagagattatgaagtatgaagctagcatcttgactcacgactcgtccattagatacctccaagagatttacaactcgaataaccaaaagattgtgaatctgaaggaaaaagtggcacagctcgaagcacagtgtcaagagccgtgtaaggatactgtccaaatacatgatataaccggtaaggactgccaggatattgcgaataaaggggctaagcagtcgggtctgtactttatcaagccactgaaggcgaatcaacaattcctggtgtactgtgagatcgacggtagcgggaacggatggactgtgtttcagaagagactcgatggatccgtggatttcaagaaaaactggattcaatacaaggagggttttggtcaccttagcccaactggaactaccgaattttggcttggaaacgaaaagatccacctgattagcactcaatcggccatcccatacgcgctgagagtcgaactggaagattggaacggccgaaccagcaccgctgattacgctatgtttaaagtgggtccggaggcagataagtaccgtcttacttacgcgtactttgcgggaggcgatgctggtgatgcattcgacgggtttgattttggcgatgatccgtcggacaagtttttcacttcgcataacggaatgcaatttagcacctgggataatgataacgacaagtttgaaggaaactgcgcagagcaggatggatcggggtggtggatgaacaagtgtcatgcagggcatcttaacggcgtgtactaccagggcggaacctactcaaaggcctcgacgccaaatggatacgataatggaattatctgggcaacctggaaaactcgctggtattcgatgaaaaagaccaccatgaagattattccttttaacagacttaccattggagaaggccaacagcatcatctggggggagcaaaacaagtgcgcccggagcatccagccgaaactgagtacgactccctgtaccctgaagatgatttg

SEQ ID NO: 11359 - DNA, 1359 bp, synthetic construct
  misc_feature 1..1359: note = source = /note="Description of Artificial Sequence: Synthetic coding sequence"
  source 1..1359: mol_type = other DNA
atgtcttggtcacttcaccccagaaacctaatcctatatttctacgccctgctgttcctgtcttctacatgcgttgcctatgtggcaacccgcgataattgctgtatcctggatgagcgcttcggttcgtactgccctactacctgcgggatagctgattttctatccacctaccagacgaaagtagataaggacctacagtcactagaagacattttacatcaggtagagaataaaacttcagaagtgaaacagttgatcaaagccatccagctgacttataatcctgacgaatctagcaagcccaatatgatcgacgcagccacattaaaaagtcggaagatgctggaggaaatcatgaagtatgaggcatccattctcactcatgactcatcaattcgctacctgcaggagatctataactcgaataatcagaagatagtaaatctcaaagagaaagtggcccagctggaagcccagtgtcaggaaccttgcaaagacacagttcaaattcacgacatcacaggaaaggattgtcaagatatcgcaaacaagggcgcaaagcagtcaggtctgtactttattaaaccccttaaggcaaaccagcagttcttggtatactgtgaaattgatgggagtggtaatggttggacagttttccagaaacgccttgacggtagtgtcgatttcaaaaagaactggatccagtataaagaggggttcggtcacctgagtccaacagggaccacagagttctggctgggcaatgaaaagattcatctgatcagcacgcaaagcgccattccttacgccctgagagtcgaacttgaggactggaacggaagaacatcgaccgcagactacgccatgttcaaggtcggtcccgaggccgataaataccggctgacctatgcttatttcgcaggaggtgacgccggagacgcattcgatgggttcgatttcggcgacgacccctcagataagttttttactagccacaacggcatgcagttcagcacttgggataatgacaacgacaaatttgagggtaactgcgctgaacaggacggtagtgggtggtggatgaataagtgtcatgcgggtcatctcaatggggtctactatcaaggcggaacgtattctaaggctagcacacctaacggctacgataacggaattatctgggccacatggaaaaccaggtggtattcgatgaaaaagacaaccatgaaaatcattccattcaaccgtcttaccatcggcgaaggccagcagcaccacctcggaggggccaaacaggtgaggccagaacacccagcagaaacggagtacgattccctgtaccctgaagacgatctc

SEQ ID NO: 11360 - DNA, 1359 bp, synthetic construct
  misc_feature 1..1359: note = source = /note="Description of Artificial Sequence: Synthetic coding sequence"
  source 1..1359: mol_type = other DNA
atgtcctggtcattgcaccctcgaaatcttatactttacttttacgcacttctgttcctttcctccacctgtgtcgcctacgtggccactcgggataattgttgtatcctggacgaaagatttggatcttactgtcctactacctgtgggatagcagatttccttagcacttaccaaacgaaagtcgacaaggatcttcagagcctggaggacattcttcatcaagtcgaaaacaaaacctcggaagtcaagcagctgatcaaagccattcaattgacgtacaaccctgacgaatcatccaagccaaacatgattgatgcggcaacccttaagtcgagaaagatgctggaggagattatgaagtacgaagcatccatactcactcatgattcgtccattagatacctgcaggagatttacaactccaacaatcaaaagatagtgaaccttaaggagaaggttgcacaactcgaggcccagtgtcaagaaccttgtaaagacactgttcaaatccatgatattaccggaaaggattgccaagatattgcaaataagggtgcaaagcagtcgggactttacttcattaagcctctgaaggccaaccaacaatttctggtttactgtgaaattgacggatcgggtaacggttggaccgtgtttcaaaaacgtctggacgggtcagtggactttaagaagaactggatacagtacaaagaaggctttggacacctgtcccctaccggtacgactgaattttggcttggcaacgaaaagatccaccttatatcaacccaatctgcaatcccatacgcactcagagtggaactggaagattggaatggtcggacctcaactgcggactatgccatgttcaaggtcggccctgaagcggacaagtaccgactgacctacgcatactttgccggcggtgatgccggagatgcattcgatggctttgatttcggcgatgacccatcagataagttctttacctctcacaatggcatgcaatttagcacctgggacaacgataacgacaagtttgaaggtaactgtgcagagcaagatggttcaggttggtggatgaacaagtgtcatgccggacatctgaacggggtgtactatcaaggtggtacttacagcaaagcgagcaccccaaacggatacgataacgggattatctgggcaacctggaaaacccggtggtactcgatgaagaaaactactatgaagattattcccttcaataggcttactatcggagaaggtcagcagcaccatctgggtggagccaagcaagtgcgcccggagcatccagctgagactgaatacgatagcctgtatcctgaagatgatctt

SEQ ID NO: 11361 - DNA, 1359 bp, synthetic construct
  misc_feature 1..1359: note = source = /note="Description of Artificial Sequence: Synthetic coding sequence"
  source 1..1359: mol_type = other DNA
atgagttggagtttacatccacgtaatttaattttatatttttatgcacttttatttctttcatctacttgtgttgcttatgttgctactagagataattgttgtattcttgacgaaagattcggaagctattgtcctactacatgcgggattgctgattttctatctacatatcaaacaaaagttgataaagatttacaatcattagaggatattttgcatcaagtagaaaataagacatcagaagttaaacaattaattaaagctattcaattaacttataatcctgatgaaagtagtaagccaaatatgatcgatgcagcaactttaaaatcacgtaagatgttagaagaaattatgaaatatgaagcatcaattcttactcatgatagtagtattagatatttacaagagatttataattcaaataatcaaaaaattgtgaatcttaaggaaaaggttgcacaattagaagcacaatgtcaagaaccatgtaaagatacagttcaaatccatgatataactggtaaagattgtcaagatattgctaataaaggggcaaaacaaagtggattatattttattaaaccattaaaggctaatcaacaatttcttgtttattgtgaaattgatggatcaggaaatggttggactgtttttcaaaaaagacttgacggatctgtagatttcaaaaaaaattggattcaatataaggaaggatttggacatttatcacctactggtactactgaattttggttagggaacgaaaaaattcatcttattagtacacaaagtgcaattccttacgcacttagagtcgaattagaagactggaatggaagaacttcaactgcagattacgccatgtttaaagttggaccagaagctgataaatatcgtcttacctatgcttattttgcagggggagatgctggagatgctttcgacggattcgactttggagacgatccatctgataaatttttcacatctcataatggaatgcaatttagtacatgggataatgacaatgacaagtttgagggtaattgtgctgaacaagatggatcaggttggtggatgaataaatgtcatgcaggacatttgaatggtgtttattatcaaggtggaacttattctaaagcctcaactccaaatggatatgataatggaattatatgggctacatggaaaactagatggtattctatgaaaaaaacaactatgaagattataccttttaacagattaacaatcggagaaggacaacaacatcaccttggtggagctaaacaagttaggcctgaacatcctgctgaaactgagtacgattcattatatcctgaagatgattta

SEQ ID NO: 11362 - DNA, 1359 bp, synthetic construct
  misc_feature 1..1359: note = source = /note="Description of Artificial Sequence: Synthetic coding sequence"
  source 1..1359: mol_type = other DNA
atgagttggtcactgcaccccaggaatttaatactgtatttttacgccctgctgtttctgtcttccacatgcgtcgcatacgtggccactagggacaattgctgcatactggacgagcggtttggcagctactgtcccaccacatgtggcattgcagacttcttgtctacttaccaaactaaagtcgataaggatctacagagcctggaagacatccttcaccaggtggaaaataaaacatccgaggtcaaacagctgatcaaagcaatacaactcacctacaaccctgacgaaagcagtaaaccaaacatgatagatgctgccacacttaagagcaggaaaatgcttgaggagatcatgaaatacgaggccagcatcttgacccacgactccagcatccggtacctgcaggagatatataactcaaataaccagaagatcgtaaacctgaaggaaaaggtcgctcagctagaggcgcagtgtcaggaaccttgcaaggacaccgttcagattcatgatattacaggcaaggactgtcaggatatagctaacaaaggtgctaaacagagtggattgtactttatcaagcccttgaaggctaaccagcagtttttggtctactgtgaaatcgacgggagcgggaatggctggaccgtgttccagaagcggctcgacggttctgtcgattttaaaaaaaactggatacagtacaaggagggcttcggacatctaagtcccaccgggaccaccgaattttggctcggtaatgaaaagatccaccttatcagtactcagtcagcaataccctatgcgctgcgggtggagctcgaggactggaatggcagaactagtacagccgactatgccatgtttaaggtgggcccggaggccgacaagtacagattgacctatgcatatttcgcgggaggcgatgctggcgacgcttttgatggattcgattttggggatgatccttcagacaagttcttcacctctcataacgggatgcaatttagtacatgggacaacgacaatgacaaatttgagggaaattgcgccgaacaagacgggagtgggtggtggatgaataagtgccacgctggacatcttaacggcgtgtactaccagggaggcacgtacagcaaggcctcaacacccaacggctacgacaacggcattatctgggccacttggaaaacgcgctggtattcaatgaagaagaccacaatgaagattattccatttaataggctaacaatcggagagggacagcagcatcacctgggaggagcaaagcaggttagaccagaacatccagccgaaaccgagtatgactcactgtaccctgaggacgatttg

SEQ ID NO: 11363 - DNA, 1359 bp, synthetic construct
  misc_feature 1..1359: note = source = /note="Description of Artificial Sequence: Synthetic coding sequence"
  source 1..1359: mol_type = other DNA
atgagttggtctttacatcctagaaacctgatcctgtacttttatgcccttctcttcctctcttcaacatgcgtagcctatgtcgctactcgagataattgctgtattttagatgagcggttcggcagctactgccccacaacatgtggaatagcggatttcctgtcaacttatcagactaaggtggacaaggaccttcaaagcctggaggatatcctccaccaggtcgagaacaagacatccgaggtgaagcagttgataaaggcaatacagctgacatacaacccggacgagtcctcgaagcctaacatgatcgatgccgccacgctgaagtctaggaaaatgctggaggagatcatgaagtatgaagccagcatcctgacacacgacagtagcatcaggtatctgcaggaaatttataattctaacaaccagaaaattgttaatttgaaagaaaaagtcgctcagctggaggcccagtgtcaagaaccttgcaaagatacagttcaaatacacgacatcacaggtaaggattgccaggatatagccaataaaggcgccaagcagagtggtctgtatttcattaaacctctaaaagccaatcagcagttcctggtttattgtgagattgatgggtcgggcaacggctggaccgtgttccagaaacggctggatgggagcgtagatttcaaaaagaactggattcaatacaaggaaggcttcgggcacctgtcgcccaccgggactactgaattctggctgggcaatgaaaagatccaccttattagtacgcaaagcgccattccgtacgccttgagagtggaactggaggactggaacggtcgcacatctactgccgattatgcaatgttcaaggtgggacccgaagccgacaaataccgcctgacctatgcctatttcgccggaggcgatgcaggggatgcctttgatggtttcgatttcggagatgatccaagtgacaaatttttcacttcacataatggtatgcagttttccacctgggacaacgacaacgataagtttgaaggtaactgtgcagagcaagacgggtctggatggtggatgaacaaatgtcacgccggccatctgaacggcgtttactaccaaggagggacgtactccaaggccagtacaccaaatggatatgacaacggcatcatttgggcaacctggaaaacccggtggtattctatgaagaagaccactatgaaaatcatcccatttaatagactcactatcggagaaggacaacaacatcacctggggggagctaaacaggtacgccccgagcacccagcagagactgagtatgactccttatatcccgaggacgatctc

SEQ ID NO: 11364 - DNA, 1359 bp, synthetic construct
  misc_feature 1..1359: note = source = /note="Description of Artificial Sequence: Synthetic coding sequence"
  source 1..1359: mol_type = other DNA
atgagctggtcgctgcatccccgcaacctcatcctttacttctacgcgctgcttttcctcagctctacttgtgtcgcatacgtggctaccagagataattgttgtatccttgatgaaagattcggatcctactgccctactacctgtggaatagccgatttcctgagcacttaccaaactaaggtggacaaggatctgcagtccctggaggacattctgcatcaggtggaaaacaaaacttcggaagtcaagcaattgattaaggccattcagctgacttacaaccctgacgaaagctccaagccgaacatgatagacgcggcaaccctcaagagccggaagatgcttgaggaaatcatgaagtacgaagcctcgattctcacgcatgattcgtctattagatacttgcaagagatttacaattcaaacaatcagaaaatagtgaaccttaaggaaaaggtggcgcagctggaggcccagtgtcaggaaccatgtaaggacacggtccagattcatgatataactggcaaggactgtcaggacattgcgaataagggggcaaagcaatctggtctttacttcataaaacctctcaaagcgaatcaacagttccttgtgtactgcgaaatagacgggtccggcaatggctggaccgtttttcaaaagcgacttgatgggtccgtggatttcaagaagaactggattcagtacaaggaaggattcggtcatctgtcgccaaccgggaccaccgagttttggcttggtaatgagaagatacatcttatcagcactcaaagcgcaataccttacgcactgcgagtggagttggaagattggaacggaagaacctccactgcagactacgccatgtttaaagtcggacctgaagcagataagtatcgtctgacctacgcatactttgcaggaggtgatgccggagatgcatttgatggatttgattttggtgatgaccccagcgataagtttttcacttcgcataacggaatgcagttttcaacttgggataacgacaatgacaagtttgaaggaaactgcgctgagcaggatggatccggatggtggatgaataagtgtcatgcaggccatttgaatggtgtttactaccagggtggaacctactccaaggcgtccaccccgaatggatatgataacggaatcatttgggcaacctggaaaacccggtggtactccatgaaaaagactaccatgaagatcatcccatttaaccggctgaccattggggagggacaacagcaccatctggggggagcaaagcaagtgcgcccagaacaccctgcagaaaccgagtacgactccctctaccctgaagatgatctg

SEQ ID NO: 11365 - DNA, 1359 bp, synthetic construct
  misc_feature 1..1359: note = source = /note="Description of Artificial Sequence: Synthetic coding sequence"
  source 1..1359: mol_type = other DNA
atgtcttggtcactgcatccacgtaatctaatactgtatttttacgcactcctgtttttgagttccacgtgtgtggcatatgtggcaacccgcgacaactgttgtattcttgatgagcgtttcgggagttactgtccgaccacttgtggtattgccgactttctgtccacctatcagaccaaggtggacaaagatttgcaatccctggaagacatccttcaccaagtcgaaaacaaaacttctgaggttaaacagttgattaaagccattcaactcacgtataatccagacgagagttccaagcccaacatgatagatgccgccacattaaaaagtcgaaaaatgctcgaagaaattatgaagtacgaagcctcaatcttaacccacgattcctcaatacggtatctgcaagagatctataattccaacaatcagaaaattgttaatctgaaagagaaggtggcccaattggaagcgcagtgtcaggagccgtgtaaggatactgtccagatccatgacataaccggcaaggattgccaggacattgccaataagggggcaaaacagtctggattgtactttataaagcccctgaaggccaatcagcagtttctcgtttattgcgagatcgacggctcagggaatgggtggactgtcttccagaaacggctcgatgggagtgtggactttaaaaaaaattggatacagtataaggaggggtttgggcacctgtcacctactggtacaacagagttctggttggggaacgaaaaaattcatctaatctctactcagtctgctatcccttatgccctgcgtgtggaactagaagactggaacggtcgtacctctactgcagactacgccatgtttaaggtgggcccagaagctgacaagtatcgactgacctatgcttatttcgccgggggtgacgctggagacgctttcgacggtttcgatttcggcgacgacccatccgacaaatttttcacgagccacaatggcatgcagttcagtacctgggataatgacaatgataagtttgagggcaactgtgcagaacaggatgggtccgggtggtggatgaacaaatgccacgccggccatttgaatggagtgtattatcagggaggaacctactccaaagcctccactcccaacgggtacgacaatggaattatatgggccacatggaaaacgcgatggtacagtatgaagaaaactactatgaaaataatcccgtttaacagactaaccataggagaaggccagcaacaccacctgggcggggccaagcaggtgcggccagaacacccagctgaaacagaatatgatagtctgtatcccgaggatgatcta

SEQ ID NO: 11366 - DNA, 1359 bp, synthetic construct
  misc_feature 1..1359: note = source = /note="Description of Artificial Sequence: Synthetic coding sequence"
  source 1..1359: mol_type = other DNA
atgtcctggtcgctgcatccccggaacttgattctctatttttatgcgctgttgtttctgagtagcacctgtgtagcgtacgtcgccaccagggataactgctgcattttagacgaacgcttcgggagctactgccccacgacctgcgggatcgcagactttttaagcacttatcagactaaggtagataaagatctccaatcgctggaagacatccttcatcaggtggaaaacaaaacaagtgaagtcaagcaactcattaaagctatacagctgacatataacccggacgaatcctcgaagcccaatatgatcgacgctgccaccctgaaatcacgcaagatgctcgaagaaattatgaagtatgaggccagtatactcacacacgatagcagcatccgatatttgcaagaaatttataattccaacaatcaaaaaattgttaacctgaaagagaaagtcgcgcagctggaagcgcagtgtcaggaaccttgtaaggacaccgtccagattcacgatatcactggcaaggactgccaggacatagccaataagggggccaagcagtctggattgtacttcataaagcctctcaaggcaaaccagcaatttctggtgtactgtgaaattgatggctccggaaatggctggactgtctttcagaagcgattggatgggtctgtggactttaagaaaaattggatacaatataaggagggcttcggacacttatccccaacaggcaccacagagttttggctggggaatgagaagattcatctgatatcaacccagtctgcaattccctatgccctcagagtcgagctggaggattggaatgggcgcacatctacagccgattatgcaatgttcaaggttgggcctgaagcagataagtacaggctcacgtatgcatacttcgccgggggggatgccggcgatgcctttgacggattcgactttggggacgatccttctgataagttctttaccagtcacaacggtatgcagtttagcacctgggataacgacaacgataagttcgagggcaactgcgctgagcaagacggctcagggtggtggatgaataaatgccatgctggccatttgaatggggtatactaccagggggggacctactcaaaggccagcacccctaacgggtacgacaacggtattatttgggcaacttggaagacccggtggtattccatgaaaaaaacgaccatgaaaatcatccccttcaaccggctcaccattggggaagggcagcaacatcacctcgggggggctaagcaggtgcggcctgagcaccctgccgagacagaatatgactccctctatcctgaggacgatctc

SEQ ID NO: 11367 - DNA, 1359 bp, synthetic construct
  misc_feature 1..1359: note = source = /note="Description of Artificial Sequence: Synthetic coding sequence"
  source 1..1359: mol_type = other DNA
atgtcctggtctctgcatcccagaaatctcatactctatttctatgctcttctcttcctttcttcaacctgcgttgcctacgtcgccacacgtgataattgttgtatccttgacgaacgtttcggtagctactgcccaacaacttgcggtatcgctgactttctgagcacttaccagacaaaggtcgataaggacctccagtctctggaagatattctgcatcaggtagaaaataagaccagtgaggtcaaacagctgattaaagctattcagcttacctacaatcctgatgagagttccaagcccaatatgatcgacgcagctacactgaagtctcgcaagatgctcgaggagatcatgaagtatgaggcctctattctgacacacgattcctctatccgctatcttcaggaaatctacaactctaacaatcagaagatcgtcaacttgaaagagaaggtggctcagctggaagcccagtgtcaagaaccttgtaaagatacagtgcagatacatgacatcaccggtaaggactgtcaagacatcgccaacaagggcgccaagcagtcaggactttacttcatcaagcctctcaaagctaaccaacagttcctggtttactgcgaaattgacggttccggaaatggctggactgtatttcagaagagacttgacggatctgtggactttaagaagaactggatccaatacaaagaaggctttggtcacctctctcctaccggaaccacagagttttggctcggaaatgagaagatccacctcatctccacccagtccgccattccctacgctttgagagttgagttggaagactggaatggccgtacatctacagcagactatgccatgtttaaagtcggacctgaggcagacaagtacaggttgacatacgcttatttcgctggaggcgacgccggagacgctttcgatggctttgacttcggtgacgacccctcagacaagttctttacatcacataacggcatgcagtttagcacatgggacaacgacaacgataaattcgaaggaaactgcgctgagcaagacggcagcggctggtggatgaacaaatgtcatgcaggacatcttaacggtgtctactaccagggcggcacatactctaaagcttcaactcccaacggctatgacaacggtataatctgggcaacatggaagaccagatggtactctatgaagaagactaccatgaaaatcattcctttcaatcgccttacaattggtgagggacagcaacaccatttgggtggcgctaagcaggtgaggcctgagcatcccgccgaaactgaatatgacagtttgtatcccgaggacgacctc

SEQ ID NO: 11368 - DNA, 1359 bp, synthetic construct
  misc_feature 1..1359: note = source = /note="Description of Artificial Sequence: Synthetic coding sequence"
  source 1..1359: mol_type = other DNA
atgagttggtccctgcacccaaggaacctcattctgtacttctacgcactgctcttcctttccagcacctgcgtggcgtacgtggcgacccgagacaactgctgcatcttggacgaacgcttcggatcctattgcccgacgacctgcggtatcgctgatttccttagcacctaccagacgaaggtggataaggatctgcagtcgctggaagatatcctgcaccaggtggagaataagaccagcgaagtgaagcaattgatcaaagccattcagcttacttacaaccccgatgaatcctcaaagcctaacatgatcgatgccgccactctcaagtctcgtaagatgctggaggagatcatgaaatacgaagcctccatcctcacccatgactcgagcatccggtacctgcaggagatctacaactctaataaccaaaagatcgtcaacctcaaggaaaaagtggcgcagctggaagcacagtgtcaggaaccatgcaaggacacggtccagatccacgatatcaccggaaaagattgtcaggacatcgccaataagggggccaagcagtcggggctttactttatcaagccgctgaaggccaatcagcagttcctggtttactgcgaaatcgacggtagcggcaatggatggaccgtctttcagaaaagattggacggatctgtggacttcaagaaaaactggatacagtataaagaaggttttggtcatctgtcacctactggcactaccgagttctggctgggaaacgagaagatccacctgatttccacccaatcggcaattccgtacgcgcttcgcgtcgagctggaggactggaacggtcgcaccagcaccgcggattatgcgatgttcaaggtgggcccggaagcagacaaataccggctcacctacgcctacttcgcaggaggggatgctggagacgcattcgacggctttgacttcggagacgacccctccgataagttcttcacctcccataacggaatgcagttttcaacttgggacaacgacaatgacaaatttgagggcaactgtgctgagcaagacggatcaggatggtggatgaacaaatgccacgcggggcacctgaacggagtgtactaccaaggcggaacgtactcgaaggcgagcactcctaacggatatgataatgggatcatctgggctacttggaaaactagatggtactccatgaagaaaaccactatgaaaatcatccctttcaatcgtttgactataggagaaggacaacaacatcacctgggaggcgccaagcaagttcgaccggaacatccagccgaaacggaatacgactctttgtaccccgaggacgacctc

SEQ ID NO: 11369 - DNA, 1359 bp, synthetic construct
  misc_feature 1..1359: note = source = /note="Description of Artificial Sequence: Synthetic coding sequence"
  source 1..1359: mol_type = other DNA
atgagctggagtttgcacccccgtaaccttatcctgtacttttatgcccttctttttctgagctccacctgtgtggcatatgtggctacaagggacaattgctgcatccttgacgaacgctttggctcttattgtcccaccacctgtggtattgctgactttctcagcacttaccagactaaggtggacaaggacctgcagtcactggaggacatcctacatcaggtggaaaacaagacttcagaggtgaagcagctcatcaaagccatccagctgacctataatcctgatgagagctccaaacccaacatgatcgatgccgccactcttaagagccgaaagatgcttgaggagatcatgaaatacgaggcatcaattttgacacacgattctagcatccgttatctgcaggaaatatataactccaataaccagaagatcgtgaatctgaaagaaaaagtggcacaactggaagcccagtgtcaggaaccttgtaaagacaccgtgcagatacatgacatcactgggaaggattgccaggacatcgcaaacaaaggggcaaagcagagcggcctctatttcatcaagcctttgaaggccaaccagcaatttcttgtctactgcgaaatcgatggaagcgggaatggatggaccgtattccagaaaaggctcgatgggagtgtcgacttcaagaagaactggatccagtacaaagaaggatttggacacctgagccctactggcaccactgagttctggcttggaaacgaaaaaatccacctgatttccacacagtctgccatcccatacgccctgagagtggaacttgaggattggaacggacggactagcacggccgattacgctatgtttaaagtggggcctgaggctgacaaatatcggttgacctacgcttatttcgcgggaggcgatgcaggtgatgcctttgatggctttgactttggcgacgaccccagcgacaagttttttacctcgcataacgggatgcaattcagcacctgggacaacgacaacgataaatttgagggcaattgcgctgaacaagacgggagtgggtggtggatgaacaagtgtcacgcgggacacttaaatggagtttattaccaggggggtacatacagcaaggcaagtacacccaacggatacgataacggaatcatttgggcaacttggaaaacccgatggtactccatgaagaaaacaaccatgaagatcatcccatttaaccggctgaccatcggcgagggccaacagcaccatctcggcggggctaagcaagttagacccgagcatcccgccgaaaccgaatacgattctctgtaccctgaggatgacctt

SEQ ID NO: 11370 - DNA, 1359 bp, synthetic construct
  misc_feature 1..1359: note = source = /note="Description of Artificial Sequence: Synthetic coding sequence"
  source 1..1359: mol_type = other DNA
atgtcgtggtcgctacatccgcgtaatttaatactatatttttatgcgttactatttttatcgtcgacgtgtgttgcgtatgttgcgacgcgagataattgttgtatattagatgaacgatttggttcgtattgtccgacgacgtgtggtatagcggattttctatcgacgtatcaaacgaaagtagataaagatttacaatcgctagaagatatactacatcaagtagaaaataaaacgtcggaagtaaaacaactaataaaagcgatacaattaacgtataatccggatgaatcgtcgaaaccgaatatgatagatgcggcgacgctaaaatcgcgtaaaatgttagaagaaataatgaaatatgaagcgtcgatactaacgcatgattcgtcgatacgttatctacaagaaatatataattcgaataatcaaaaaatagttaatttaaaagaaaaagttgcgcaactagaagcgcaatgtcaagaaccgtgtaaagatacggtacaaatacatgatataacgggtaaagattgtcaagatatagcgaataaaggtgcgaaacaatcgggtctatattttataaaaccgttaaaagcgaatcaacaatttctagtttattgtgaaatagatggttcgggtaatggttggacggtttttcaaaaacgactagatggttcggtagattttaaaaaaaattggatacaatataaagaaggttttggtcatttatcgccgacgggtacgacggaattttggctaggtaatgaaaaaatacatctaatatcgacgcaatcggcgataccgtatgcgttacgtgtagaattagaagattggaatggtcgtacgtcgacggcggattatgcgatgtttaaagttggtccggaagcggataaatatcgtttaacgtatgcgtattttgcgggtggtgatgcgggtgatgcgtttgatggttttgattttggtgatgatccgtcggataaattttttacgtcgcataatggtatgcaattttcgacgtgggataatgataatgataaatttgaaggtaattgtgcggaacaagatggttcgggttggtggatgaataaatgtcatgcgggtcatctaaatggtgtttattatcaaggtggtacgtattcgaaagcgtcgacgccgaatggttatgataatggtataatatgggcgacgtggaaaacgcgttggtattcgatgaaaaaaacgacgatgaaaataataccgtttaatcgtctaacgataggtgaaggtcaacaacatcatttaggtggtgcgaaacaagtacgtccggaacatccggcggaaacggaatatgattcgttatatccggaagatgatcta

SEQ ID NO: 11371 - DNA, 1359 bp, synthetic construct
  misc_feature 1..1359: note = source = /note="Description of Artificial Sequence: Synthetic coding sequence"
  source 1..1359: mol_type = other DNA
atgtcatggtcgctgcatccccggaatctgatcctgtacttttacgccctgctcttcctgtcctctacttgcgtggcatacgtggccactcgagacaactgctgcatcctggacgagagatttggatcctactgcccgaccacgtgtggcatcgccgatttcttgagtacctaccagactaaggtcgacaaggaccttcagtcgctcgaagatattctgcaccaagtggagaacaagacctccgaggtgaagcagctgattaaggctatccagctgacttacaatccggacgagtcgtcgaagccaaacatgattgatgcggccaccctgaagagcagaaagatgctcgaagaaatcatgaagtacgaggcttccatcctcactcatgactcctccattcggtacctgcaggaaatctataactctaacaaccagaaaatcgtgaacctgaaggagaaagtggctcagctggaagcacagtgccaggagccgtgcaaggacactgtgcagatccacgatatcaccgggaaagattgccaggatatcgctaataagggagcgaaacagagcgggttgtacttcatcaagccgctcaaggccaaccagcagtttctggtgtactgcgagatcgacgggagcggaaatgggtggaccgtgtttcagaagcgcctcgatgggtccgtcgacttcaagaagaactggatccaatacaaggaaggatttggacacctgtccccgaccggaaccactgaattctggctgggcaatgaaaagatccacctcatctcgacgcaaagcgcgattccttacgcgctgagagtggagctcgaggactggaacggacgcacctcgaccgcagattacgccatgtttaaggtgggacctgaagccgacaagtaccggctgacctatgcctacttcgctggcggagacgcaggcgacgcttttgatggatttgacttcggagacgacccgtctgacaagttctttacttcacacaacggaatgcagttctcgacgtgggacaatgataatgataagttcgagggaaattgcgcagaacaggatggctcaggctggtggatgaacaaatgccacgctggccatcttaacggagtgtactaccaaggagggacttactcgaaggcgtcgacccctaatggctacgataatggcatcatctgggccacctggaaaactcgctggtactcgatgaagaaaactactatgaagattatccctttcaatcgccttaccatcggcgagggccaacaacaccaccttggaggagccaaacaggtgcggcccgaacatccagctgaaactgagtacgactccctctaccctgaagatgacctg

SEQ ID NO: 11372 - DNA, 1359 bp, synthetic construct
  misc_feature 1..1359: note = source = /note="Description of Artificial Sequence: Synthetic coding sequence"
  source 1..1359: mol_type = other DNA
atgagttggagtctacacccccggaatctaatcctttatttttacgcgctgctatttttgagttccacctgtgtcgcctatgtcgctacacgcgataactgttgcattttggatgaacggttcgggtcgtattgcccaactacttgtggaatagcagatttcctgtctacataccagaccaaggtggacaaagatttgcagtccttggaggacatactccatcaggtggagaacaaaaccagtgaggtgaaacagttgatcaaagcgattcagctgacatataatccagacgaaagctcgaagcctaatatgattgacgctgcgactctgaagtcccggaagatgctggaggaaataatgaagtatgaggcttccatcctgacccatgactctagtataaggtatttacaggaaatttataactccaacaatcagaagattgtcaatttaaaagagaaggtggctcagttggaggcacagtgccaggaaccctgtaaagacaccgtccagattcacgacataactggtaaggactgtcaagacattgccaataaaggagccaaacaatccggtttatacttcataaaacctctgaaggcaaatcagcaattcctcgtgtactgcgagatcgacggttcgggcaatggctggacagtgttccaaaaaagactggacgggtccgtcgacttcaagaaaaactggattcagtacaaggaaggctttggacacctgagtccaacaggcacaacagagttttggctggggaacgaaaagattcatcttatttccacacaaagtgctatcccttacgccctcagagtggaactggaagattggaatggtcggactagtactgccgactacgccatgttcaaggtaggtccagaagctgacaagtatcggctgacatacgcatatttcgccggaggcgatgcaggagatgctttcgacgggtttgactttggcgatgacccctccgacaagttcttcacatctcacaatggtatgcaatttagtacctgggacaatgacaacgataagtttgaaggcaactgtgctgaacaagatggctcaggatggtggatgaacaaatgccacgcaggtcacctaaacggcgtgtattaccagggtggtacctactctaaggcatcaaccccgaatggctacgataacgggatcatctgggctacatggaaaacccggtggtacagtatgaaaaaaactactatgaaaatcattcctttcaatcgcctgacaatcggcgaaggccaacagcaccacctgggcggagcgaaacaggtgcggcctgagcatcccgctgaaacagagtacgacagcctttatcccgaagatgatctc

SEQ ID NO: 11373 - DNA, 1359 bp, synthetic construct
  misc_feature 1..1359: note = source = /note="Description of Artificial Sequence: Synthetic coding sequence"
  source 1..1359: mol_type = other DNA
atgagctggtctcttcatccacgtaatctgattctctatttctatgccttgctcttcctaagctccacatgtgtggcctacgtggccaccagggacaattgctgcatcctcgacgaacgctttggatcttattgccctactacatgtggcattgccgatttcctgagcacataccagacaaaggtggacaaagatctccagtctctcgaggacattttacatcaagtcgaaaacaaaacctctgaggtaaagcagctcataaaagcaatccagctgacctataacccagatgaatcttccaagccgaatatgatcgatgctgccaccctgaagtcgcgaaaaatgctcgaggaaataatgaaatacgaggcctccatcctgacccacgactcttccattcgataccttcaagaaatctacaattccaacaatcagaagatagttaaccttaaggagaaggttgcccagcttgaagcacagtgtcaagagccatgtaaagataccgtgcagatccatgacattactgggaaggattgtcaagacattgccaataaaggtgcaaaacagagtggactgtacttcatcaagcccctgaaagcaaatcagcaattcttggtgtactgcgagatagatggcagcggcaacggttggactgtgtttcagaagagactggatggaagcgtcgacttcaagaagaattggatccagtacaaggaagggttcggacatttaagccctacaggaacaaccgagttttggctgggaaatgaaaagattcacctgatctccacgcagtccgcgattccttacgcacttagggtggaacttgaagactggaatgggagaaccagcaccgccgattacgccatgttcaaggttggtccagaagccgataaatatagactcacttatgcctactttgccgggggcgacgctggtgacgcattcgatggattcgactttggggatgatccaagcgataaattttttacatcacataacgggatgcaattcagcacctgggacaatgataacgataaattcgagggcaattgtgcagaacaagacggcagcggctggtggatgaataaatgccacgccgggcacctgaatggcgtgtactaccaaggcggaacctacagcaaggcatcaacgcccaatgggtatgataatggcataatctgggctacttggaaaaccagatggtattctatgaaaaagaccaccatgaagatcattcctttcaaccgcctcacaatcggagaggggcagcagcatcaccttgggggcgcgaagcaggtgcgtccagagcatcccgccgaaacggagtacgacagtttgtaccctgaggatgatctg

SEQ ID NO: 11374 - DNA, 1359 bp, synthetic construct
  misc_feature 1..1359: note = source = /note="Description of Artificial Sequence: Synthetic coding sequence"
  source 1..1359: mol_type = other DNA
atgagctggtccctgcatcctcgcaaccttatcctgtatttctacgcgttgttgttcttgtctagcacgtgcgtggcctacgtggccactcgcgataattgctgcattctggatgaacggttcggatcgtactgcccgactacttgcggaattgcggatttcctttcgacctaccagaccaaagtggacaaagatctccaatcgctcgaagatatcctgcaccaagtggaaaacaaaaccagcgaggtcaaacagcttatcaaagccatccagctcacctacaatccggacgaatcgtccaagccaaatatgattgacgcagccaccctcaagagtagaaagatgctggaggagatcatgaagtacgaagcctcgatcctgactcacgactcaagcatccgctacctgcaggagatttacaactccaacaaccagaagatagtgaatctgaaggaaaaagtggcccaattggaagcacaatgtcaagaaccatgcaaggacaccgtccaaatccatgacatcaccggcaaggattgccaagacatcgctaataagggggccaagcagtccggtctgtactttatcaagccgctgaaggctaaccagcagtttctggtctactgtgagatcgatgggtccggaaacggttggactgtttttcagaagaggctcgatggtagcgttgacttcaaaaagaattggattcagtacaaagaaggcttcggccacctctcccccaccggaactactgaattctggcttggtaatgagaaaatccacctgatctcgacccaatccgcgatcccatacgccctccgggtggagttggaggactggaatggacgcacctccaccgcagattacgctatgtttaaggtgggacctgaagctgataagtatagactcacgtatgcctacttcgccggcggagacgccggggatgccttcgacggattcgattttggagacgacccttcagacaagttcttcacttcccacaatggaatgcaattctcgacttgggataacgataacgataagttcgagggaaactgtgctgaacaagacggatcaggatggtggatgaataagtgccatgccggacacttgaacggggtctactaccaaggaggaacttactccaaagcatcgacccccaacggatacgataacgggatcatctgggccacctggaaaactaggtggtacagcatgaaaaagaccacgatgaagatcattcctttcaatcggcttactatcggagaaggtcaacaacatcacctcggaggtgccaagcaagtccgcccagaacaccctgccgaaaccgagtacgactcgctgtaccctgaggacgatctg

SEQ ID NO: 11375 - DNA, 1359 bp, synthetic construct
  misc_feature 1..1359: note = source = /note="Description of Artificial Sequence: Synthetic coding sequence"
  source 1..1359: mol_type = other DNA
atgagctggtcactccaccctcggaacctcatcctgtacttctatgcactgctgtttctctcttctacttgcgtcgcctacgtggctacccgagacaactgttgcatcctggatgaaaggtttggcagctattgtccaacgacctgcggaattgcagatttcctgtccacctatcagacaaaagtggacaaggacttgcaaagccttgaggacattctccatcaggttgagaataagacttctgaagtcaagcaacttattaaagcgatccagttgacatataatccagatgaatcttccaagccaaatatgatagacgccgccacgcttaagagcaggaagatgctggaggagatcatgaaatatgaggctagtatactgacgcatgactcatccatcagatacttgcaggaaatctataatagcaataatcagaagattgtgaatctcaaagagaaagtggctcagctggaagcccagtgtcaggagccctgcaaggacaccgtgcagattcacgacatcaccggcaaggactgccaagatatcgccaataagggggccaaacaatctggcctgtacttcatcaagccactgaaagcgaaccaacagtttctggtctattgcgaaatagacgggtccggaaatggatggacagtgttccagaagagacttgacgggtccgtagactttaagaaaaactggattcagtataaggaaggatttggtcacctctcacctaccggaaccaccgagttctggctcgggaatgaaaagattcacctgatctcaacgcagtcagctatcccttacgcccttcgagtcgagctggaagattggaatggcagaacaagcactgccgactacgccatgttcaaagtcggcccagaggcagacaagtatcgactgacttacgcatacttcgcaggcggtgatgctggcgatgcattcgatggcttcgacttcggggacgatccaagtgataagttcttcacatcccataacgggatgcaatttagtacttgggacaatgacaacgataagttcgagggcaattgcgcagaacaggatggctccggctggtggatgaacaaatgccacgctggccatctgaatggcgtgtattaccagggcggaacttatagtaaggcttccacgcctaacggttatgacaacggtataatctgggctacatggaaaacgcggtggtattccatgaaaaagacaaccatgaagataatcccctttaatcggcttaccatcggggaagggcagcagcaccatctcgggggcgctaaacaagttcggcccgagcaccccgctgagaccgaatatgatagcctgtatccggaagacgacctt

SEQ ID NO: 11376 - DNA, 1359 bp, synthetic construct
  misc_feature 1..1359: note = source = /note="Description of Artificial Sequence: Synthetic coding sequence"
  source 1..1359: mol_type = other DNA
atgagctggagcctccatccaagaaacctgatcctgtacttctacgctctgctttttctgtcctctacatgcgtcgcttacgtagctaccagggataactgttgcatactggatgaaagatttggaagctactgtcccacaacctgcggtattgctgattttctgagcacctaccagactaaggtggataaagatttgcagtccctcgaagacatactccaccaggttgagaataaaacaagcgaggtgaagcaactgatcaaagccatacagctcacctataaccccgacgagagcagcaagcccaacatgattgacgctgctaccctcaagtcacgcaaaatgctggaggagatcatgaaatacgaagcgagtattctgactcatgactcatcaatcaggtatctgcaggaaatctacaactccaacaaccagaaaatagtgaacctgaaggaaaaggtggcccaactcgaggcacagtgccaggagccttgcaaggataccgtgcagatacacgatatcaccggaaaagactgccaggacatcgctaataaaggggctaagcagtccgggctttacttcatcaagccactcaaagcaaaccagcagttcctggtttactgtgaaatagacggttccggaaacgggtggacagtgttccagaagaggctggatggttctgtggacttcaaaaaaaactggattcagtacaaagagggatttggccatttgagcccaaccggcacaaccgagttttggctcggcaacgagaaaatccacctcatcagcacacaatctgctattccctatgccctcagagttgaactagaagattggaacgggcgcacatctaccgccgattatgcgatgtttaaggtggggcctgaagcagataaatataggcttacatacgcatacttcgcaggaggcgatgccggggatgctttcgatggctttgactttggagacgacccttcggacaaattcttcacttcacacaacggtatgcagttttccacttgggacaatgacaacgataaattcgagggcaactgcgcagaacaggatggatctggatggtggatgaataaatgtcatgcaggacatttgaacggagtgtactatcaaggcggaacctacagcaaggctagcactccaaatgggtatgacaatggaatcatctgggctacatggaaaacgcggtggtacagtatgaagaagactactatgaagatcatcccttttaatcgactgacaatcggtgagggccagcagcaccatttagggggcgccaagcaggttaggcctgagcatccggcagagaccgagtacgatagcctgtatccagaggatgacttg

SEQ ID NO: 11377 - DNA, 1359 bp, synthetic construct
  misc_feature 1..1359: note = source = /note="Description of Artificial Sequence: Synthetic coding sequence"
  source 1..1359: mol_type = other DNA
atgtcctggtccctccatccgcggaatctcatcctttacttctatgcattgctgttcctttcctccacctgtgtggcgtatgtggccacccgggacaattgctgcatcctggacgagcggtttggttcttactgtccaacaacctgcggaatcgcagactttttgagcacctaccagactaaggtggacaaggatctgcagtccctggaggatatcctgcaccaggtcgaaaacaaaacatccgaagtaaaacagttaatcaaggctattcagctcacctacaatcccgacgaatcatctaaacccaatatgatcgacgctgctaccctgaagtccaggaagatgctagaagaaatcatgaagtacgaagcttcaatactaacccacgattcatcgattcgctatttgcaggaaatctataacagcaataatcaaaaaatagtgaatctgaaggaaaaagtcgcccagctagaggcccagtgccaggagccatgcaaggatactgtgcagattcacgacatcacagggaaggattgtcaagacatcgcgaataaaggagcgaaacagtcaggtctctacttcattaagcccttgaaggcgaatcagcagtttctcgtgtactgtgagatagatggttctggaaacggctggacggtcttccagaagagactggatggttccgttgacttcaagaagaattggatacagtataaagaagggtttggtcatttgtcccccacagggaccaccgaattctggctgggtaacgaaaagatacatctcatttcaactcaaagcgcaattccctatgccttgcgggtggagctggaggactggaacggaagaacttccactgccgactacgctatgttcaaggttgggcctgaagcagacaaataccggcttacatacgcctactttgccggtggggacgccggagacgcattcgatgggtttgactttggcgacgatccttccgataaattctttacgtcccacaatggtatgcagttttccacttgggacaacgacaatgataagtttgaaggaaattgtgccgaacaagacgggtccggctggtggatgaacaagtgccacgctggccatctgaatggagtatattaccagggcggcacatactctaaagcatccactcccaatggatacgacaatggcatcatctgggctacgtggaagacccgatggtactccatgaaaaagaccactatgaaaataatcccatttaacaggctcactatcggcgaaggccagcagcaccacttaggcggcgccaaacaagttaggccggaacacccggcggagaccgaatacgacagcctgtatcccgaggacgacctg

SEQ ID NO: 11378 - DNA, 1359 bp, synthetic construct
  misc_feature 1..1359: note = source = /note="Description of Artificial Sequence: Synthetic coding sequence"
  source 1..1359: mol_type = other DNA
atgtcctggtctctgcaccctcgaaatctcattctgtacttttatgcgctgctgttcttatcttctacttgcgtggcctatgttgcaaccagggataactgttgcatattggatgagagatttgggtcctactgtccaactacatgtgggatagccgattttttgagcacttatcaaactaaagtcgataaagatctccagagccttgaggacattctccatcaagtggagaacaagacatcagaagtgaagcagctcatcaaggctattcagttgacttacaaccccgacgaatcctcaaagcctaatatgattgatgctgccaccctgaaaagccgaaaaatgctggaagagatcatgaagtatgaggcaagtatccttactcatgatagttcaattcgatacttacaggagatctataatagcaataaccagaaaatcgtgaacttgaaggaaaaggtcgcccagctggaggcgcagtgtcaggaaccctgcaaggataccgtgcagattcatgacattaccggaaaggactgtcaggacatcgccaacaagggggccaaacagtccggactttattttattaagccgctgaaggctaatcaacagtttctggtgtattgtgaaatcgatgggagtgggaatggctggactgtgttccagaaacgactggatggaagcgtggactttaaaaagaactggattcagtataaagagggcttcggccatctgagccccaccggcaccactgagttctggttaggtaatgaaaagatccatttgatctccacgcagagtgccatcccttacgccctgcgcgtggaacttgaagactggaacggacgcacgtcgacagcggattacgccatgttcaaggttggacctgaggcggataagtaccgactcacctatgcttatttcgccgggggcgacgccggtgacgccttcgacgggtttgactttggagatgatcccagcgataaattctttaccagccataacggaatgcagttttcaacctgggacaatgataatgataaatttgaggggaactgtgccgaacaggatggttccggatggtggatgaataaatgccatgcaggccaccttaacggcgtctattatcagggggggacttatagcaaggcgagcacccccaatggctatgataacggcattatctgggcaacgtggaagacacggtggtattcaatgaagaagaccaccatgaaaataattccatttaatagattgactattggagaagggcagcaacaccacttgggcggcgcgaaacaggtccggccagaacatcctgccgaaaccgagtacgatagtctgtatccagaagatgacctg

SEQ ID NO: 11379 - DNA, 1359 bp, synthetic construct
  misc_feature 1..1359: note = source = /note="Description of Artificial Sequence: Synthetic coding sequence"
  source 1..1359: mol_type = other DNA
atgtcgtggagtctccacccaagaaatttaatactttatttttacgctctcctcttcctgtcttctacttgcgtcgcttatgtagctactagggataactgttgcatattggatgaacgatttgggtcatattgcccaactacttgtggaatcgcagattttctgtctacttatcagactaaagttgataaagatctgcagtcccttgaagatatactgcaccaggtggaaaataaaacatcagaggtcaagcagctcatcaaggcaatccagctgacatataatcccgatgaatcatccaaaccaaacatgatcgatgccgcaactctgaaatcacgaaaaatgctcgaggaaatcatgaaatatgaagcctctatcctcacacacgattcctccattcgctaccttcaggaaatctacaattctaataatcagaaaatcgtgaatctcaaagaaaaggtggctcagcttgaagcacagtgtcaggaaccctgtaaagatacagtccagattcatgatatcacagggaaagactgtcaggatatcgcaaacaaaggggccaaacagtcgggactgtattttatcaaaccccttaaagccaaccagcagttcttggtttattgtgagatcgatggatcgggaaacggatggacggtgtttcagaaaaggttagatgggtccgtagattttaaaaagaattggatccagtataaagaaggattcgggcacctttctcccacaggaacaacagaattctggctcggaaacgagaaaatacatctcatctcaactcagtctgccatcccatacgcacttcgcgtggaattagaagactggaacgggcggactagtacagccgattacgccatgttcaaagtaggaccagaagccgataagtaccgactcacatatgcatattttgctggaggggatgcgggagacgctttcgatgggtttgatttcggagatgatcctagtgataaatttttcacttctcacaatgggatgcagtttagtacatgggataacgataacgataagttcgaagggaattgcgctgagcaggatggatcgggatggtggatgaacaaatgtcacgcgggacatctcaacggagtgtattatcagggggggacttattctaaagcatctacaccaaatgggtatgataacgggataatctgggccacttggaaaactagatggtattctatgaagaaaacaactatgaagatcatccccttcaatcgactgactattggagagggacagcagcaccacctgggaggagctaaacaggtgcggcctgaacatcccgccgaaactgaatatgacagtctatatcctgaggatgatctc

SEQ ID NO: 11380 - DNA, 1359 bp, synthetic construct
  misc_feature 1..1359: note = source = /note="Description of Artificial Sequence: Synthetic coding sequence"
  source 1..1359: mol_type = other DNA
atgtcctggtcgcttcatccaagaaaccttatcttgtacttctacgcacttctttttctctcttcgacgtgtgtggcttatgtggccacccgagacaactgttgtatccttgatgaacggtttggctcgtactgtccaactacttgtgggatcgctgattttctttcgacgtatcaaacgaaagttgataaggatcttcaatcccttgaggacattttgcaccaagtggagaataagacgtcggaagtcaagcagcttatcaaggcaattcaactgacctacaacccagacgaatcatccaaacctaacatgattgatgctgcgactctgaagtcaagaaaaatgctcgaagagattatgaaatacgaggcatccatactgacccacgactcatccatcagataccttcaagaaatctacaatagcaacaaccagaagattgtgaacctcaaggagaaggtggcacaacttgaagcgcagtgtcaagagccgtgcaaagacacggtgcaaattcacgatattaccggtaaggactgtcaggatattgccaacaaaggggcaaagcagtcaggactgtacttcatcaagcctctgaaggccaatcagcagttcctggtgtattgcgaaatagacggctcaggtaatggatggaccgtctttcagaagcgactcgatggctccgtggacttcaagaaaaactggattcaatacaaggagggttttggacatctgagcccgaccggaaccactgaattttggttgggtaatgagaagatccatcttatttcaacccaatcggctatcccttacgccttgagggtcgaactggaagattggaacggtcggacttcaaccgcagattatgcaatgtttaaggtgggacctgaggcagataagtatcgtctgacctatgcctactttgcgggcggtgacgcaggagatgcgttcgatgggtttgatttcggcgatgatccctcagataagtttttcaccagccacaatgggatgcagttttccacttgggataacgataacgacaagtttgaaggtaactgcgcggaacaggatggctccggatggtggatgaacaaatgccatgccggacatttgaacggggtgtactaccaaggaggaacttactcgaaggcatccactcccaacggctacgataatgggattatctgggctacttggaaaacccgctggtactccatgaagaaaaccaccatgaagattatccctttcaatcgccttactattggtgagggtcaacaacaccatctgggaggagcaaagcaagtcagaccagaacatcctgctgaaaccgagtacgattccctctacccggaagatgatctc

SEQ ID NO: 11381 - DNA, 1359 bp, synthetic construct
  misc_feature 1..1359: note = source = /note="Description of Artificial Sequence: Synthetic coding sequence"
  source 1..1359: mol_type = other DNA
atgtcctggtcccttcacccccgaaaccttattctttacttctacgcacttctgtttctctcgtcaacctgtgtggcctacgtcgcaacgagagacaactgttgtattctcgatgagcggtttggaagctactgcccaaccacctgcggcattgctgattttctgtcaacctaccagactaaagtggataaggatctgcagtcccttgaggatatccttcatcaagtggaaaacaagacttcggaggtcaagcagttgataaaggcaatccaactgacttacaatcccgatgagtcgtcaaaacctaacatgattgatgccgccacgctgaaatcacgtaagatgctcgaagaaatcatgaaatacgaagcatcgattcttacccatgactcctcgatccggtacctccaagagatttacaactccaataatcaaaagatcgtgaatctgaaggagaaagtggcacagctggaagcacagtgtcaagaaccttgcaaggataccgtgcagatccatgatatcactggaaaggactgccaggatatcgccaataagggtgccaaacaatccggactgtactttatcaaaccacttaaggcaaaccaacaatttctcgtgtattgcgaaattgacgggtcaggaaacggctggacggtgtttcaaaagagattggatggaagcgttgactttaagaagaactggatccaatacaaggagggttttggtcatctctccccaactggaacgaccgaattttggctgggtaacgagaaaattcatctgatttctactcagtccgcaattccttacgcccttagggtcgaacttgaagattggaatggcaggacctctaccgcagactatgccatgtttaaggtcggcccagaggcagataagtaccgactcacttatgcctacttcgctggaggcgacgctggagatgcatttgatggctttgactttggagacgatccctcggacaagtttttcacttcccataatgggatgcagttttcaacctgggataacgacaacgacaaatttgaagggaactgcgcagaacaagacggctccgggtggtggatgaataagtgtcatgcaggtcacctgaatggggtgtactaccagggtggaacctactcaaaagcatcgaccccaaacggatacgataatggaatcatttgggcgacttggaaaactcggtggtactcgatgaaaaagaccactatgaagataatcccgtttaacagacttactattggggaaggtcaacaacaccatctgggaggagcaaagcaagtgaggccagaacaccctgccgaaaccgaatatgatagcctctatccagaggacgacctg

SEQ ID NO: 11382 - DNA, 1359 bp, synthetic construct
  misc_feature 1..1359: note = source = /note="Description of Artificial Sequence: Synthetic coding sequence"
  source 1..1359: mol_type = other DNA
atgtcctggagccttcatccacggaatctcatcctctacttctacgccctgcttttcctctcatccacttgtgtggcctacgtcgcaacccgcgataactgttgcatccttgacgagagattcgggtcgtattgccccaccacctgtggcattgccgacttcctctcgacctaccagaccaaggtggataaagatctgcagtccctggaagatatccttcaccaagtggagaacaagacttccgaggtgaagcaactgatcaaagcaatccagctgacctacaatccggacgaatcgtcgaagccaaacatgatcgacgcggctacgttgaagtcgcggaagatgcttgaagaaatcatgaagtacgaggcgtcaatactgacccatgattcctcaatccgctacctgcaagaaatctacaactcgaacaatcagaagattgtgaatctcaaggaaaaggtggcgcagctggaggcacagtgccaggagccatgcaaggacaccgtccaaatccacgacatcacgggaaaagactgccaggacatcgcgaataaaggagctaaacagtcgggcctgtacttcattaagcccctcaaagccaaccagcagttcctcgtctactgcgagatcgatggaagtggaaacggttggactgttttccaaaagcggctggatggatccgttgacttcaagaagaactggatccaatacaaagaaggatttggacacctgtcgccaaccgggactaccgagttttggctcggaaatgagaagatccatttgatttcgactcaatccgcaattccgtacgcacttagagtcgaactcgaagattggaacggtcggacctcaacggccgactacgccatgttcaaagtcggtcccgaggcggataagtaccgtctcacttacgcgtactttgcaggtggagacgccggagacgccttcgacggatttgatttcggtgatgatccatcggacaagttctttacctctcacaacggcatgcagttctccacctgggataacgacaatgacaaattcgagggaaactgcgctgaacaagatggcagcggatggtggatgaataagtgccatgcgggccacctgaacggagtgtactaccaaggaggtacctactccaaggcttccactcccaatggatacgacaatggaattatctgggcaacgtggaaaactcgctggtacagcatgaaaaagaccactatgaagattatcccttttaaccgcctgactatcggtgaaggacaacaacatcatttgggaggagccaaacaggtgcggccggaacatccagctgaaactgagtacgattccttgtatccagaagatgacctt

SEQ ID NO: 11383 - DNA, 1359 bp, synthetic construct
  misc_feature 1..1359: note = source = /note="Description of Artificial Sequence: Synthetic coding sequence"
  source 1..1359: mol_type = other DNA
atgagctggtcattgcaccctaggaatctgattctttatttctatgccctgttgtttttgagcagtacgtgcgtggcgtatgtggccacaagagataattgttgcatcctggacgaacgcttcgggagctactgcccgactacctgtgggatcgctgatttcctctcaacttatcagaccaaggtcgacaaggatcttcagagtttggaggacattctgcatcaggtagagaacaaaacctctgaggtgaagcagcttatcaaagcaattcagcttacatacaacccagacgaatccagtaagcctaatatgattgatgctgccactctgaaatctaggaagatgctcgaagagattatgaagtacgaggcatcaatccttacccacgatagcagtatacggtacctccaagagatttacaacagcaataatcaaaaaatcgtgaatctgaaagagaaggtcgcacagctggaagcacaatgccaggagccatgtaaggataccgtacagatccatgatatcactgggaaggattgccaggatatcgcgaacaagggtgctaagcagtctggcctctatttcatcaaacctctgaaagccaatcagcagtttctcgtatactgtgaaatagacgggtctgggaatgggtggactgtgttccagaagagactggacggaagtgtcgacttcaagaagaactggattcagtacaaggagggattcggacacctgtctcccaccggaacaaccgagttctggctcggtaatgagaagatccatttgatcagtactcagagcgcaatcccctacgcgttgagggtcgaattggaggattggaatggccggacctccaccgccgactacgccatgtttaaggtggggcctgaagctgataagtatcgactgacatacgcatactttgccgggggggacgccggtgacgcttttgacggatttgacttcggcgatgacccatcagacaagttctttacttcccacaacgggatgcagtttagtacttgggataatgacaatgacaaattcgaaggaaattgtgccgagcaggatggaagtggatggtggatgaataaatgtcacgcggggcatctgaacggcgtatactaccagggaggtacatatagtaaagctagtacaccaaatggctacgataacggtatcatatgggccacatggaagactcgatggtatagcatgaagaagacaacaatgaaaatcatccccttcaatcgcctgaccatcggcgaggggcagcagcaccatcttggaggagcgaagcaggtgcgccccgagcacccagcggaaacagagtatgatagtttgtatccagaagacgatctg

SEQ ID NO: 11384 - DNA, 1359 bp, synthetic construct
  misc_feature 1..1359: note = source = /note="Description of Artificial Sequence: Synthetic coding sequence"
  source 1..1359: mol_type = other DNA
atgtcctggtcgttgcatccccggaatctgatactgtacttttacgctctgctctttttgtcctccacttgtgtggcatacgtcgccactagagataactgctgcatactcgatgagcggttcggatcgtactgccccaccacttgcgggatcgcagattttctgtccacctaccaaaccaaggtggataaagatcttcagtccctcgaagatattcttcatcaggtggaaaacaaaacctccgaggtcaagcagctgattaaggcaatccaactgacttacaaccctgatgaatcctcaaagccaaacatgattgacgcagcaaccttgaaaagccgcaagatgctcgaagagatcatgaaatacgaagcctctatcctcacgcacgattcatccatcaggtacctgcaagagatttacaacagcaataatcagaaaatagtgaaccttaaggaaaaggtcgctcagcttgaagcccaatgtcaggagccttgtaaggataccgtgcaaattcacgatatcactggaaaggattgtcaggatattgccaacaaaggagcgaagcagtcggggctctacttcattaagcccctcaaagcgaatcaacaattcctggtctactgtgaaatagatggcagcgggaacggctggaccgtgtttcagaaaagactggatggatcggtggatttcaaaaagaactggattcagtacaaggaggggttcggtcatctgtcacccaccggtaccactgaattttggctcggtaacgagaaaatacacctgatttcgacccagagcgcaattccatacgccctcagagtcgagctggaggattggaacggcagaacttcgaccgcagactacgcgatgttcaaggtgggtcctgaagcagataagtatcgacttacttacgcctacttcgcaggcggtgacgccggagatgcatttgatggttttgattttggagacgacccaagcgacaagttctttacctcgcacaacgggatgcaatttagcacttgggataacgataatgacaagtttgaggggaattgcgcagaacaggacggttcaggatggtggatgaacaaatgtcatgcaggtcatcttaacggtgtgtactaccagggtggtacctactcaaaggcgagcacccctaatggctacgacaacggtataatctgggcaacctggaaaacccggtggtactcaatgaaaaagacgaccatgaagattattccttttaaccgcttgactatcggagaaggccagcagcaccacctcggtggggccaagcaggtgcggcccgagcatcccgccgaaactgagtacgactccctttaccccgaagatgacctg

SEQ ID NO: 11385 - DNA, 1359 bp, synthetic construct
  misc_feature 1..1359: note = source = /note="Description of Artificial Sequence: Synthetic coding sequence"
  source 1..1359: mol_type = other DNA
atgtcgtggtcattgcaccctcgaaaccttattctgtacttctatgcacttctgttcctttcctccacctgtgtcgcatacgtggcgactcgagataactgttgtattctggacgagcggttcggctcgtactgtcctaccacctgtggaattgcagactttctctctacctaccagactaaggttgataaagatttgcagtccctggaagatattcttcatcaagtggaaaacaagacttccgaagtcaagcagctgatcaaggcaatccaattgacctacaacccagatgaatccagcaagccgaatatgatagacgccgcaaccctgaagtcccggaaaatgctggaagaaatcatgaagtacgaagcctcaattctcactcatgactcgtcaatccgctatcttcaagaaatctacaactcgaacaaccaaaagattgtgaacctgaaagaaaaggtggcccagctggaggcacaatgccaggaaccatgtaaagataccgtgcagattcatgatattactggaaaagactgccaagatatcgcaaacaagggtgcgaagcagtcaggcctgtatttcatcaagcctctcaaggccaaccaacaatttctggtctactgcgaaattgatggatcaggcaatggatggaccgtctttcaaaaaagactcgatggcagcgttgatttcaagaagaattggattcaatacaaagagggcttcggccatttgtcccctaccgggactactgaattctggctgggaaacgaaaagatacacctgatcagcactcagtcggcaattccttatgcactgcgggtggaactcgaggattggaatggacggacttcgaccgcagactacgcaatgtttaaagtgggaccagaagcagacaagtacaggcttacctatgcctactttgcaggtggtgacgcaggagatgcctttgatggctttgactttggtgatgatccaagtgacaagtttttcacttcccataatggcatgcaattctccacttgggataacgacaatgacaagtttgagggcaattgtgcggaacaggatggatcaggatggtggatgaacaagtgccacgcgggacatctgaacggggtgtactaccagggaggaacctactccaaagcctcgaccccgaatggatacgataatggaattatctgggcaacctggaaaacgagatggtactccatgaaaaagaccacgatgaagatcatcccttttaacagacttactattggggagggacaacaacatcacctgggtggggccaaacaggttcgaccagagcaccctgcagagacggaatatgattccctctaccccgaagatgatctt

SEQ ID NO: 11386 - DNA, 1359 bp, synthetic construct
  misc_feature 1..1359: note = source = /note="Description of Artificial Sequence: Synthetic coding sequence"
  source 1..1359: mol_type = other DNA
atgtcctggagcctgcacccgcgcaacctcatcctgtacttctacgccttgttgttcctttcctcaacttgcgtggcatacgtggcaactcgcgataactgctgcatcctggacgaaaggttcggctcgtattgtccgaccacttgtggaatcgcggatttcctgtcaacctaccagaccaaggtggacaaagacctgcagtcgctggaagatatcctgcaccaagtggagaacaagaccagcgaagtcaagcagctgattaaggccatccaactgacctacaacccggacgaatcgtcgaagcccaatatgattgacgccgccaccttgaagtcccgcaagatgctggaagaaatcatgaagtatgaggcgtccatcctgactcatgactcgagcatcaggtacctgcaggaaatctacaactccaataaccaaaagattgtgaacctgaaggagaaggttgcacagcttgaagctcagtgccaggaaccatgtaaggatacggtccagatccacgacattaccggcaaagactgtcaagatatcgcaaacaagggagccaagcagtcaggcctgtatttcattaagccactcaaggcaaaccaacagttcttggtgtactgtgaaatcgatggaagcggcaacggatggacggtgttccaaaagagactcgatggcagcgtcgatttcaagaagaactggatccaatacaaggaaggtttcggacacctctcgcccactggcaccacggagttctggttgggaaacgaaaagatccacctcatctccactcaaagcgcaatcccatacgctctgcgggtggagctggaggactggaacggaagaacttcaaccgctgactacgcgatgtttaaagtcggcccggaggctgacaaatatcgtctgacctacgcgtatttcgcgggaggagatgccggcgacgctttcgacggattcgacttcggtgacgatccgagcgacaaattcttcacttcccacaatggaatgcaattttctacctgggataatgacaacgacaagttcgaagggaactgcgcagaacaggatgggtccgggtggtggatgaacaagtgtcatgcaggacatctcaacggagtgtactaccagggcgggacgtacagcaaggcgtccaccccgaatggatacgacaatggcatcatttgggcaacctggaaaacgaggtggtactcgatgaaaaagaccactatgaagattataccgttcaaccgcttgaccatcggagaaggacaacagcatcacctcggcggggctaaacaggtgcgcccagaacatcctgcagaaaccgagtacgattcgctgtaccctgaggatgacctg

SEQ ID NO: 11387 - DNA, 1359 bp, synthetic construct
  misc_feature 1..1359: note = source = /note="Description of Artificial Sequence: Synthetic coding sequence"
  source 1..1359: mol_type = other DNA
atgtcctggtccctccatcctaggaacctcatattgtacttttatgcgctcctattcctcagttccacatgcgtagcttatgtggctacaagagataactgctgcatcttagacgagagatttggatcttattgtccaactacttgcgggattgcagacttcttatctacttatcagacaaaagtggacaaagaccttcagtcactagaagatatacttcatcaggttgaaaataaaacttccgaagttaaacagctcatcaaagccattcagttgacatataaccccgacgaatcatccaaacctaatatgatcgatgcggccactcttaaatctagaaaaatgctcgaagaaatcatgaaatacgaagcgtccatccttactcacgattcttccattaggtatctacaggaaatatacaattctaacaatcagaaaattgtgaatctcaaagaaaaagtagcgcagctggaagcccagtgccaggaaccttgcaaagatacagtgcagatacatgacataactgggaaagactgtcaggatatagctaataaaggggccaaacagtcaggactttattttattaaacctctgaaagctaaccagcagttcttagtgtactgcgaaatagatgggtctgggaacggatggacagtttttcagaaacgcctcgatggatctgtggattttaaaaaaaattggatccagtataaagaaggattcggacatctctcccctactgggacaacagaattttggcttggaaacgaaaagattcatctgatatccactcagtctgccatcccatatgcgctaagggtggagttagaagattggaacggaagaactagtacagcagattatgcaatgtttaaagtgggacccgaggccgataaatatcggcttacatacgcttatttcgccggaggggacgccggggacgcattcgatggatttgattttggggatgatccatcggataaattcttcacatctcacaacgggatgcagttttcgacatgggataacgataacgataaatttgagggaaactgtgctgaacaggatgggtcagggtggtggatgaacaagtgtcatgcaggacaccttaatggggtatattaccagggagggacgtattctaaagcgagtactccaaatggatacgataacgggatcatatgggcgacatggaaaacacgatggtactcgatgaaaaaaactacaatgaaaatcattccctttaacagactcactatcggggaaggacagcagcaccatcttggaggggccaaacaggttagacctgagcacccagctgaaactgagtacgattcactctatccagaggatgatctg

SEQ ID NO: 11388 - DNA, 1359 bp, synthetic construct
  misc_feature 1..1359: note = source = /note="Description of Artificial Sequence: Synthetic coding sequence"
  source 1..1359: mol_type = other DNA
atgtcctggtctctgcatccccgaaatttaattctctatttctatgctttgttgttcctttcgtctacatgtgtagcgtacgtagccacccgcgataactgctgtattctggatgagcgtttcgggtcctactgtcctacaacctgcggaatcgccgatttcctgtcaacataccagactaaggtcgataaagacctgcagagcctggaggacattctgcaccaagtggaaaacaaaacttccgaggtgaaacagcttataaaggcgatccagctcacgtataatccggatgagtcatccaaaccgaacatgattgatgcagccactctgaagtcccgcaaaatgttggaagagattatgaagtacgaggcctctattttgacgcatgatagttctatcaggtatctgcaggaaatatataacagcaacaaccagaaaattgtaaatctcaaggagaaggtagcccagctagaagcacagtgtcaggagccctgtaaggatacggttcagatacacgatattacgggcaaggattgccaggatattgccaataaaggggccaagcagagcggtctttactttattaagccacttaaagcgaatcagcagttcctcgtgtactgtgagatcgatgggtcgggcaacggctggacagtcttccaaaagaggctcgatggatcagttgatttcaagaagaattggattcaatacaaggagggcttcggtcacctgagcccgacaggtaccacggagttctggctggggaatgaaaagatccacttaataagtacccaatccgctatcccgtacgccctccgtgtcgagcttgaggactggaacggacgtaccagcacggcagattacgccatgttcaaggtgggcccggaggctgataagtataggctgacgtatgcgtacttcgcagggggggacgctggcgatgcttttgatggcttcgacttcggcgacgacccaagcgataagttctttacgagtcacaatggcatgcaattttccacgtgggacaacgacaacgacaaattcgagggcaactgcgccgagcaggacggaagcggctggtggatgaacaaatgtcacgccggtcatcttaacggcgtgtactaccagggggggacctactcaaaggccagcaccccaaatggctatgataatggcatcatctgggctacatggaaaacaaggtggtactccatgaaaaagaccaccatgaaaatcatacctttcaacagattgaccatcggcgaggggcagcaacatcatttgggcggtgctaagcaggtacggcccgagcatccagcggaaaccgaatatgattcactgtaccccgaggatgatctg

SEQ ID NO: 11389 - DNA, 1359 bp, synthetic construct
  misc_feature 1..1359: note = source = /note="Description of Artificial Sequence: Synthetic coding sequence"
  source 1..1359: mol_type = other DNA
atgagctggtccctgcacccacgcaacctgatcctgtacttctacgctctcctgttcctgagctcgacctgtgtggcatacgtggcgaccagggacaactgttgcatcctggacgaacgcttcggaagctactgtcccaccacctgcggcatcgccgatttcctgtcgacttaccaaactaaggttgataaagatctccagagcctggaggatatcctgcaccaagtggaaaacaagacttcggaggtgaagcaactgatcaaggccatccagctgacctacaatcccgatgagtcctccaagccaaacatgatcgatgcggccaccctcaagtcacggaagatgctggaagaaatcatgaaatatgaggcctcgatcctgacgcacgactcgtcaatccgctatctgcaggagatctacaactccaataaccagaagatcgtgaacctcaaggaaaaggtggcccagctcgaggcgcagtgccaggagccatgcaaggatactgtgcagatccacgatattactggcaaagattgccaggacatcgctaacaaaggcgcgaagcaatccggactctacttcatcaaaccgctgaaggcaaaccaacaatttctggtgtactgcgagatcgacgggtccgggaatggatggaccgtgttccagaagcggctcgacggatcggtggatttcaagaagaactggattcagtataaggaaggattcggccacctgtcaccgacgggcaccaccgaattctggctgggaaacgaaaagatccatctgatctccactcagtcggcgatcccgtatgctctgagagtcgagctggaagattggaacggtcggacctcaaccgcagattacgccatgttcaaagtgggacctgaagcggacaaataccggctcacctacgcctatttcgcaggaggcgatgcgggcgacgccttcgacggtttcgatttcggagatgacccatcggacaagttcttcacttcgcacaacggcatgcagttcagcacctgggacaacgataacgacaaatttgaaggcaactgtgcagaacaggatgggtccggctggtggatgaacaagtgccatgctggtcatctgaatggggtgtactaccaaggaggaacttactcgaaggccagcaccccgaatggatatgacaacggaatcatctgggctacctggaaaacccgatggtactcaatgaaaaagacgaccatgaagatcattcccttcaatagactgaccattggagaaggtcaacagcatcatcttggaggagctaagcaggtgcgcccggaacacccggcagagacggagtacgattccctgtacccggaagatgacctc

SEQ ID NO: 11390 - DNA, 1359 bp, synthetic construct
  misc_feature 1..1359: note = source = /note="Description of Artificial Sequence: Synthetic coding sequence"
  source 1..1359: mol_type = other DNA
atgtcctggagcctccacccacgcaatctgattttgtacttctacgcactgttgttcctgtcatcgacgtgtgtggcctacgtggccactagagacaattgttgcatcctggatgagcgcttcggaagctactgccccactacgtgcggaattgccgatttcctgtccacctaccaaaccaaggtggacaaggacttgcagagccttgaagatatcctgcaccaggtggagaacaaaacttcggaggtgaagcagcttatcaaggccatccaactgacttacaacccggatgaaagctccaagccaaatatgatcgatgctgccactctcaagtcccgcaaaatgttggaagaaatcatgaaatacgaagcgtcgatcttgactcatgatagctccatccgatacttgcaagaaatctacaatagcaacaaccagaagatcgtcaatctcaaggaaaaggtcgctcagctggaagcgcagtgccaagagccttgcaaggataccgtgcagatccatgacatcactggcaaggactgccaggacatcgcaaataagggagcaaagcaatccggactctacttcatcaagccgctgaaggcgaatcagcagttcctggtgtactgtgagattgatgggtcgggaaacgggtggaccgtgttccagaaacggctggacgggtctgtggacttcaaaaagaattggatacaatacaaggagggctttgggcacctgtccccgaccggaactactgagttttggctcggtaacgagaaaatccacctcatctccacgcagtccgccatcccgtacgccttgagggtggaactcgaagattggaacggacggacttcgaccgcagactacgctatgttcaaagtcggcccggaagctgataagtatcggcttacctacgcatacttcgcgggcggtgacgccggagacgcttttgacggatttgacttcggcgatgatccgtcggacaaattcttcacgagccataatggaatgcagttcagcacttgggacaacgacaacgacaaatttgaaggtaactgcgcagagcaggacggctccggatggtggatgaacaagtgccatgccggacaccttaatggtgtgtactaccagggaggcacttactcaaaggcatcaaccccgaacggatacgacaatggaatcatctgggccacttggaaaaccagatggtacagcatgaagaaaaccaccatgaagataattccattcaacagactcactatcggagaaggacaacagcatcacctgggcggagccaagcaagtgcgccccgaacaccccgcggaaacggagtacgactcgttgtacccggaagatgacctg

SEQ ID NO: 11391 - DNA, 1359 bp, synthetic construct
  misc_feature 1..1359: note = source = /note="Description of Artificial Sequence: Synthetic coding sequence"
  source 1..1359: mol_type = other DNA
atgtcgtggtcgctgcacccgcggaacctgatcctgtacttctacgctctgctctttctgtcatccacctgcgtcgcctacgtggcgaccagggataactgttgcatcctggacgaacgctttggatcatactgcccgaccacttgcggaattgctgacttcctgtcgacctaccagactaaagtcgataaggatctccagagccttgaagatatccttcatcaggtggagaataagacctccgaagtgaaacaactgattaaggcaatccagctgacctacaatccagacgagtcctcgaagcctaatatgatcgacgctgctaccctcaagtcccggaagatgttggaagagattatgaagtacgaagcgtccatcctcactcacgactcttcaatccggtaccttcaagaaatctacaattctaacaatcagaagatcgtcaatctgaaggagaaggtcgcccagctcgaagcacagtgccaagaaccatgtaaggacactgtgcagattcacgacatcaccggaaaggactgccaagacatcgccaataaaggtgcgaaacaatcggggctctacttcattaagccgctgaaagcgaaccaacagtttctcgtgtactgcgagatcgacggctcaggcaacggatggacggtctttcaaaagcggctcgatggcagcgtcgacttcaaaaagaactggatccaatacaaagagggatttggacatctgagccctaccggaaccaccgagttctggctgggtaacgaaaagattcacctgatcagcacccagtcagctattccgtacgccttgcgcgtggaactggaagattggaacggccgcacttcgacggcggactatgctatgttcaaggtgggtccggaagccgacaagtacagacttacttacgcctacttcgcgggaggcgatgccggcgacgccttcgacgggttcgactttggggatgacccttcagataagttcttcactagccacaacggcatgcagttttccacctgggataacgacaatgataagttcgaaggaaactgcgctgaacaggacggttcaggatggtggatgaataagtgccacgctggacatctgaacggcgtgtattatcagggcgggacttattccaaagcctcaaccccaaacggatacgataacggcatcatctgggctacctggaaaactcggtggtatagcatgaagaaaacgactatgaaaatcataccgttcaaccgcctcactatcggagagggccaacagcaccaccttgggggagcgaagcaggtgcgccctgaacatccggccgaaactgagtacgattccttgtacccggaagatgacctg

SEQ ID NO: 11392 - DNA, 1359 bp, synthetic construct
  misc_feature 1..1359: note = source = /note="Description of Artificial Sequence: Synthetic coding sequence"
  source 1..1359: mol_type = other DNA
atgtcgtggtccctccatccaaggaatctgattctctatttctacgcactcctgtttttgtcatcgacgtgcgtggcgtacgtcgcgaccagggacaactgctgcatcttggacgagcggttcgggagctactgccctactacgtgcggcatcgcagattttctgagcacttatcagaccaaggtggacaaggatctgcaaagcctcgaagatatactgcatcaggtggagaataagacgtcggaggtgaaacagttgatcaaggcgattcagttgacttacaatcctgacgaatcgtccaagccgaacatgatcgacgccgccaccttgaagtccaggaagatgctcgaagagatcatgaagtacgaagcaagcatcctcacccacgacagctcgattcgctacctgcaagagatctacaacagtaataaccagaaaattgtcaaccttaaggaaaaggtggctcagctggaagcccaatgccaagaaccttgcaaggacacggtgcaaatccacgacattaccggaaaggattgtcaggacattgcaaacaagggggcgaagcagtcgggcctctacttcattaaacccctcaaagcgaatcagcaattcctcgtgtactgtgagatcgatggaagcggcaatggttggactgtgtttcagaagagactggacggatccgttgactttaagaaaaactggatacaatacaaggagggattcggccacctgtcacccactggaaccaccgagttctggttgggtaacgagaaaatccacctcatctcaacccagtccgcaatcccgtacgcactgcgcgtcgagctggaggattggaacgggcggacttcgaccgcagattacgcgatgttcaaagtgggaccagaggctgataagtaccggctgacctacgcctacttcgctggaggagacgcaggggatgcgttcgacgggttcgatttcggtgatgacccgtcagataagtttttcaccagccacaacggcatgcaattctccacttgggacaacgataacgataagttcgaaggtaactgcgcagagcaggacggatccggctggtggatgaacaaatgccatgctggacatctgaatggtgtgtactaccaaggtggaacgtactcaaaagcgtcgaccccgaacggatacgataacggcattatctgggccacttggaaaaccagatggtactctatgaagaaaactaccatgaagatcatcccgtttaatcgcctgactataggagagggacagcagcaccatctgggcggcgccaagcaggttagaccggaacacccggccgagactgagtatgactcactctacccagaggacgatctt

SEQ ID NO: 11393 - DNA, 1359 bp, synthetic construct
  misc_feature 1..1359: note = source = /note="Description of Artificial Sequence: Synthetic coding sequence"
  source 1..1359: mol_type = other DNA
atgtcctggtccttgcacccgagaaaccttatcctctacttctacgccttgctttttcttagttctacctgtgtggcttacgtggccacacgggataactgttgtatcctcgacgagagatttgggtcatactgcccgactacttgcggcattgctgacttcttatccacttaccagaccaaggtggataaagatctgcagtctcttgaggatatactccaccaggtggagaacaaaacttcagaagtgaaacagctgattaaagcgatccagctgacttacaatcctgatgagtcatctaaaccgaatatgattgacgcggccactctcaaatccaggaagatgttagaagaaataatgaaatatgaggcctccatcctgacccacgacagctcaatccgctacctgcaggagatctacaacagcaacaatcaaaagatcgttaatttgaaggagaaagtagcccaattagaggcacagtgtcaggagccctgtaaagacaccgtgcagatccatgatattaccggtaaagattgccaagatattgcaaacaagggggcgaagcaatcaggcttgtattttatcaagcctctcaaggctaatcagcagttcctcgtgtactgcgaaattgatggatcgggcaatgggtggaccgtattccaaaagcgtctagacggaagcgtggactttaaaaagaattggatacagtacaaggagggattcggccatctgtctccaaccggtactactgaattttggctcggaaacgaaaaaatccatctgattagcacccaaagcgctattccatacgctcttcgagtcgagctcgaagactggaacgggagaacaagcactgccgactacgcaatgtttaaagtcggaccggaggctgataaatatcggttaacctacgcctactttgctgggggagatgccggagatgcattcgatgggtttgattttggggacgaccccagtgacaaattcttcacatcccataacggaatgcagtttagcacctgggacaacgacaacgataagtttgaaggaaattgcgctgagcaggatgggtctggctggtggatgaataagtgccatgcggggcacttgaatggggtgtactatcagggtgggacatactctaaagcctctactccgaatgggtacgataatgggatcatctgggccacatggaaaacgagatggtactctatgaagaaaacgactatgaagattataccattcaaccgcctgacaattggggagggtcagcagcatcacttaggcggagccaagcaggtcagaccagagcaccccgctgaaaccgaatacgactctctttatccagaggatgattta

SEQ ID NO: 11394 - DNA, 1359 bp, synthetic construct
  misc_feature 1..1359: note = source = /note="Description of Artificial Sequence: Synthetic coding sequence"
  source 1..1359: mol_type = other DNA
atgagctggtctctgcaccccagaaacttgatcctctacttctacgcccttctgttccttagcagtacttgcgtggcatatgtggccactagggacaattgttgtatattggacgagcggtttgggagttactgccccacgacttgtggtattgcagactttctgagcacttatcagacgaaagtggataaggatctgcaatctctggaggacattctgcatcaggtggagaacaaaacctctgaggtgaaacagttgataaaggctattcaattgacctacaacccggatgaatcgtccaaacccaatatgatcgatgcggccaccctgaagagcaggaagatgctcgaggaaatcatgaagtacgaggcttccatcctgacgcatgattccagcattcggtatcttcaagaaatctataattcgaacaaccagaagattgttaaccttaaagaaaaggtggcacagcttgaggctcagtgtcaggagccctgcaaggacacagttcaaattcatgacattactggcaaagactgtcaagatatagccaacaagggggcgaaacaaagcggattgtatttcatcaagcccctaaaggccaaccagcagtttcttgtctattgcgagatcgacggttctggaaacgggtggaccgtgtttcagaagcgcttggacggctctgtcgacttcaagaagaactggatccaatacaaggaaggattcggacacctatcaccaaccgggacgacagaattttggctgggcaatgaaaagatacacctgatttctactcaatccgcgattccatacgcactgagagtcgaattagaggattggaacggtcgaactagtaccgccgactacgccatgtttaaggttggaccggaggcggataaatatcggctgacttacgcttactttgctgggggtgatgctggggatgcgttcgacggtttcgacttcggcgatgaccccagtgacaagttttttaccagccacaacggaatgcagttttccacttgggataatgacaacgataagtttgaggggaactgcgcggagcaggacgggagcggatggtggatgaataaatgccatgccgggcacttgaacggtgtttattaccaggggggcacctactctaaagcctcgacccccaatgggtatgataatggaatcatttgggccacatggaaaacacgctggtatagcatgaaaaaaaccaccatgaagattattcctttcaaccggctgacaatcggggagggccagcagcaccacttgggaggcgctaagcaagtgcgcccagaacaccccgccgagacagagtatgattctttgtaccctgaagatgacctc

SEQ ID NO: 11395 - DNA, 1359 bp, synthetic construct
  misc_feature 1..1359: note = source = /note="Description of Artificial Sequence: Synthetic coding sequence"
  source 1..1359: mol_type = other DNA
atgagctggtccttgcaccccagaaacctcattctgtacttttatgccctgctattcctaagttccacctgcgtcgcttacgtagcaacacgcgataattgctgtattctggacgagcggtttgggtcctactgtccgactacctgcggtatcgctgacttccttagcacttatcagactaaagtggataaagacttacagagtctggaagacattctgcatcaggtggagaataagacctcagaggtcaaacaactcataaaggctatccagttaacatataatccagatgagagctcaaagccaaacatgatcgacgctgctaccttaaagtctcgcaagatgcttgaggagatcatgaaatacgaagcgtctatcctcacgcacgacagtagtattcggtacctacaggagatctacaacagcaacaaccagaaaatagtgaatttaaaggagaaggtcgcgcagctggaagcacagtgccaggagccttgcaaggacaccgttcaaattcacgatatcacagggaaggactgtcaggacattgcgaataaaggtgcgaagcaatcaggtctttatttcatcaagcccctcaaggccaatcagcagttcctcgtctattgtgaaatcgatggatctggcaacgggtggaccgttttccaaaagcggctggatggctctgtagatttcaagaagaattggatccagtacaaggagggcttcggacatttgagccctaccggaaccactgagttctggctgggcaacgagaagattcacctcatatctacacagagtgccataccatacgccctgcgtgttgaactggaggactggaatggccggacgagtactgcagactatgccatgtttaaagtggggcccgaagcagataaataccgcctgacatacgcttactttgcaggcggcgatgctggggatgcttttgatggcttcgactttggagatgatcccagcgataaattttttacatcccacaacggtatgcagttttccacatgggacaacgacaacgataagtttgaaggtaactgcgcagagcaagacggcagtggctggtggatgaacaagtgccacgcgggccacctgaatggggtttactaccaggggggaacttatagtaaggcatccacgcctaacggatatgataatggcatcatttgggcgacatggaagacccgatggtattcaatgaagaagacaaccatgaaaatcattcccttcaaccgactgaccataggcgaaggccagcagcatcatctgggcggcgcaaaacaagttagaccagagcatcccgccgagactgaatacgattcactgtaccctgaggacgacttg

SEQ ID NO: 11396 - DNA, 1359 bp, synthetic construct
  misc_feature 1..1359: note = source = /note="Description of Artificial Sequence: Synthetic coding sequence"
  source 1..1359: mol_type = other DNA
atgtcctggtccctgcatccacggaatctgatcctctacttttacgcacttctgttcctgagctccacctgcgtggcgtacgtcgccaccagagataactgttgtatcctcgatgagcggtttggatcctactgcccaaccacctgtggaatcgcagatttcctctcgacttaccaaaccaaggtcgataaagacctccagtcactcgaagatattctgcatcaggtggaaaacaaaacgtcggaagtgaagcaactgattaaagccatccaactgacgtacaaccctgacgaatcttcaaaacccaatatgattgatgcagcaacccttaagagcagaaagatgctggaagagattatgaaatatgaagcgtcgattctcacccacgattcctcgattcgatacctgcaggaaatctataacagcaacaaccagaaaatcgtgaaccttaaagaaaaggtggcacagcttgaggcccaatgtcaagaaccttgcaaggatacggtgcaaattcatgatataaccggtaaagattgtcaggatattgcgaataaaggcgctaaacagagcggtctgtacttcattaaaccactgaaggccaatcaacaattccttgtgtactgcgaaatagatggatcaggaaatggatggaccgtctttcagaagcgcctggatggttcggtcgacttcaagaagaactggatacagtataaagaaggatttggacatctgtctcctactggtaccaccgaattttggctgggtaacgaaaagatccacctgatctccactcaaagcgccattccttacgcactccgcgtggaactggaagattggaacggtcggacctccactgcagattacgcaatgtttaaggtgggacccgaggcagataagtaccgactgacctacgcttactttgcaggaggagacgcaggggacgcctttgatgggtttgattttggggacgatcctagcgacaaattctttaccagccataatggtatgcagttttccacttgggacaacgataacgataagttcgagggtaactgtgcagagcaggacgggtccggctggtggatgaataagtgtcacgcgggacatctgaacggagtgtactaccagggtggcacgtactcaaaggcttcgactcctaacggatacgacaatggcattatctgggcaacctggaaaacgaggtggtattcgatgaagaaaaccactatgaaaatcataccctttaaccggctgactatcggtgagggccagcaacatcatctgggaggtgcaaagcaagtaagacccgagcatcctgcagaaaccgagtacgactcactttaccctgaggatgatctt

SEQ ID NO: 11397 - DNA, 1359 bp, synthetic construct
  misc_feature 1..1359: note = source = /note="Description of Artificial Sequence: Synthetic coding sequence"
  source 1..1359: mol_type = other DNA
atgtcgtggagcctccacccgcgaaacctgattctgtatttctacgcgctgctgttcttgtccagcacttgcgtggcatacgtcgctacccgcgacaactgttgtatactggatgagcgattcgggtcgtactgcccgaccacgtgcgggatcgcagatttcctgtccacttatcaaactaaggtcgacaaggacctccagtcgctggaagatatcctccaccaggtggagaacaagaccagcgaagttaagcaactgattaaggcgatacagctgacgtacaaccctgacgagtcctcaaaacctaacatgatcgacgccgccactctgaaatcaagaaaaatgctcgaggagattatgaaatacgaggcatccatcctcacccatgactcatcgattaggtatctgcaagaaatctacaattcgaacaaccagaaaatcgtgaatctcaaagagaaggtggcccagctcgaggcgcagtgccaagaaccatgcaaggatactgtccagatccatgacatcaccggtaaagattgccaagatattgctaacaagggagcaaagcaatccggactgtacttcatcaagccgctgaaggcaaaccaacagttccttgtgtactgcgaaatcgacggttcaggcaatggctggaccgtgtttcagaagcgcctggatggatcggtcgactttaagaaaaactggatacagtacaaggaaggattcgggcacctctcgccaaccggcactactgaattctggttgggaaacgaaaagatccatctcatttccacccagagcgccattccgtacgcgttgagggtggaactggaagattggaatggtcgcacctcgacggccgactacgcgatgttcaaggtgggaccggaggctgacaagtacagactgacttatgcatacttcgccggcggggacgccggagacgcgtttgacggcttcgactttggagacgacccctcagacaagttctttaccagccataatggcatgcaattcagcacctgggataatgataacgacaaatttgaaggtaactgcgcagaacaggacggcagcggatggtggatgaacaaatgtcacgccgggcacctgaatggagtgtactaccagggagggacttactccaaggcttcgaccccaaatggctacgataacggaatcatctgggccacttggaaaacccggtggtactccatgaaaaagacgactatgaagatcatcccattcaatagactgaccatcggagagggtcagcagcatcacctgggcggagctaagcaggtcagacccgaacacccggctgaaactgagtatgattctctctacccggaagatgacctt

SEQ ID NO: 11398 - DNA, 1359 bp, synthetic construct
  misc_feature 1..1359: note = source = /note="Description of Artificial Sequence: Synthetic coding sequence"
  source 1..1359: mol_type = other DNA
atgtcttggtccctccacccccgcaatctcatcctttacttctatgctctcctgttcctgtcctccacatgtgtggcctatgtggccactagagataattgttgtattctggatgagcggttcggctcctattgtccaacaacttgcggcatagcagacttcttgagtacgtatcagactaaggtcgacaaggatctgcagagccttgaggacatactccatcaggttgaaaacaagacctccgaagtgaaacagttgataaaggctatccaactgacctataatcccgatgaaagctcaaaaccaaatatgattgacgccgccaccctgaagagccggaaaatgctggaagagataatgaagtacgaagcctctatcctgacacacgattcatcaatccggtatctccaggaaatttacaatagcaacaatcaaaagattgtgaaccttaaggaaaaagttgctcaactggaagcccagtgtcaggaaccgtgcaaggacacggttcagattcatgatatcacaggaaaagattgccaagatattgcaaataagggagccaaacagtccgggctgtatttcataaaacccctgaaggctaaccagcaattcctggtgtattgcgagatcgatggatctgggaatggctggaccgtgttccagaaacgactggacggatcagtggattttaagaagaactggattcagtataaagaggggtttggacatctgagccctacaggcacaactgaattctggcttggaaacgagaagattcacctgatttccacgcaatccgcaatcccatacgccttgcgcgttgaactcgaggattggaacggccggacttcaactgcagactatgccatgtttaaagtaggtccggaggccgataagtacaggctgacctacgcttacttcgccggaggcgacgcaggcgatgcattcgacggcttcgatttcggtgatgacccaagcgataagttcttcacctcacacaacggaatgcagttctcaacctgggataacgacaacgacaaattcgaaggcaactgtgcggaacaggatggaagtgggtggtggatgaacaagtgccatgccgggcatctgaatggcgtgtactaccaaggaggaacctatagcaaggcctcaacccctaatggttacgacaatggtattatttgggccacctggaaaacacggtggtatagtatgaagaagacaacaatgaagattatccctttcaatcgcctgacgattggagaggggcagcagcatcatttgggaggagcgaaacaggtgcgcccagaacacccagccgagacagaatatgattccctctatcctgaggacgacctt

SEQ ID NO: 11399 - DNA, 1359 bp, synthetic construct
  misc_feature 1..1359: note = source = /note="Description of Artificial Sequence: Synthetic coding sequence"
  source 1..1359: mol_type = other DNA
atgtcctggagcttgcatcctaggaatctgatcctttacttctacgctctgctgttcttatcttccacgtgcgtagcctatgtggctacccgggataattgttgtatcctagacgagaggttcggatcatattgcccaactacatgtggtatcgctgactttttatctacttaccaaactaaggttgacaaggacctgcagtccctagaagatatccttcatcaagtcgagaataagacaagtgaagtcaagcaactcataaaagcaattcaactgacttacaaccctgatgagagttccaagcctaacatgattgacgccgcgaccctgaaaagtcggaagatgctggaggagattatgaagtacgaagcctctatactcacccacgatagctccattaggtaccttcaagagatttataactccaacaaccagaagattgtaaacttgaaagagaaggtggctcagctggaggctcagtgccaggagccttgcaaagatacggtacagattcacgacataactggaaaggactgtcaggatattgccaataaaggggctaaacagagtggcctgtacttcatcaaacctctgaaggccaaccagcagttcctcgtgtactgtgagatagacggctctggcaatggttggacagtctttcaaaagagactggatggctccgtagattttaaaaaaaattggattcagtataaggaggggtttgggcacctcagccccaccggcactaccgaattctggcttggcaacgagaaaattcacttaatcagtacacagtccgccatcccttacgcccttcgggtcgaactcgaagactggaacggccgcacctctaccgccgactatgccatgtttaaagtggggcctgaagcggacaagtaccggctaacatacgcttatttcgcaggtggtgacgcaggcgacgcgttcgacgggtttgatttcggtgacgaccctagcgacaagtttttcacctcccataacgggatgcagttttcaacctgggataacgataacgataagtttgagggtaactgtgccgaacaggatggcagcggttggtggatgaataaatgtcacgccggacatctgaacggtgtgtactaccagggtggcacatactccaaggcctccactccaaacggctatgacaatggcatcatttgggctacatggaagacccggtggtactccatgaaaaagacaacaatgaaaattatcccctttaacaggctgactatcggggagggccagcagcatcacttgggaggagctaagcaggtgaggccggaacaccccgcagagacagaatacgacagcttgtaccctgaggacgacctg

SEQ ID NO: 11400 - DNA, 1359 bp, synthetic construct
  misc_feature 1..1359: note = source = /note="Description of Artificial Sequence: Synthetic coding sequence"
  source 1..1359: mol_type = other DNA
atgtcgtggtctcttcatccccggaatctcattctttatttttacgctctcctgtttctttcctccacttgtgttgcctatgtcgccaccagagataactgctgtattcttgatgaacggtttggttcctattgccctaccacatgcggtattgctgactttctgagtacatatcagactaaggtggacaaggatttacagagcttagaagatatactccaccaagttgaaaataagacctcagaggttaagcaactgattaaggctattcaactaacctacaacccggatgagtcttccaaacctaatatgatagatgcagctactctgaaatccagaaagatgttggaggaaatcatgaagtatgaggctagcattcttacccacgattcttcgattcgctatctgcaagaaatctataacagcaacaatcagaagattgtgaacctgaaagagaaggtggctcagttagaagcacagtgccaggagccgtgtaaagatactgttcagattcacgatataacaggcaaagattgccaggatatagcaaataagggcgcaaagcaatcaggtctttacttcatcaagccactgaaagccaatcagcagttcttggtttattgtgaaattgatggctctggaaacggttggactgttttccaaaagaggcttgatggaagtgtagatttcaagaagaactggatccagtacaaggaaggatttggtcatctaagtccaactggcactacagagttttggttggggaacgaaaagatccatttgatcagtacccagagcgctataccctatgcgcttcgggtcgagttggaggattggaatggccgtacttccaccgccgattatgcaatgttcaaggtcggccctgaagccgataagtataggcttacttatgcatactttgccggtggagatgcaggagacgcttttgatggcttcgatttcggcgatgatccatccgacaaattcttcacatcccacaacggcatgcagttctccacctgggacaacgataacgataaattcgaggggaattgtgctgagcaagatggttccggctggtggatgaacaagtgtcatgctggccatctcaacggcgtttactatcaaggaggcacatatagtaaggcctccactccgaatgggtacgataatggaattatttgggcaacttggaagaccaggtggtattcaatgaaaaaaactaccatgaaaattatcccttttaataggcttactataggtgaaggtcagcagcaccacttgggaggcgcaaaacaggtacgaccagaacatcctgctgaaacagaatatgattccttatatcctgaagatgacttg

SEQ ID NO: 11401 - DNA, 1359 bp, synthetic construct
  misc_feature 1..1359: note = source = /note="Description of Artificial Sequence: Synthetic coding sequence"
  source 1..1359: mol_type = other DNA
atgtcctggtcactgcatccaaggaacctgatcctctacttctacgccctcctcttcctgtcgtccacttgcgttgcgtacgtggcgaccagggataactgttgcatcctggacgaacgctttggatcctactgtcccaccacttgcggaatcgcggacttcctctcgacgtaccagactaaagtggataaggatctccaaagcctggaggatatactccaccaggtggagaataagacgtccgaagtgaagcaactgatcaaggccatccaattgacttacaatccagacgaaagcagcaagcctaacatgatcgacgctgcgaccttgaagtcccgcaagatgctggaagagatcatgaagtacgaagcctccatcctgacccacgactcaagcatccgctacctccaagaaatctacaactccaacaatcagaagatcgtcaacctgaaggaaaaggtcgcacaactggaagcccagtgccaggagccgtgtaaagataccgtgcaaattcacgatatcactggaaaggattgtcaggacattgcaaacaaaggagcaaagcagagcggactctacttcattaaaccattgaaagcaaaccagcagttcctggtgtactgcgaaatcgatggaagcgggaatggatggacggtgtttcagaagcggcttgatggaagcgtcgatttcaagaagaattggatccagtacaaggaaggattcggtcacctgtcgccgaccgggactaccgaattctggttgggtaacgaaaagatccacctgatttcaacccagtccgccatcccttacgcgctgagagtggagctcgaggactggaatggacggacctcaaccgcggattacgcgatgttcaaggtgggccccgaggccgataagtacaggcttacctacgcctatttcgcaggaggagacgccggagatgcattcgatggcttcgattttggcgacgatccgtcggacaaattcttcacgagccataacggcatgcagttttccacctgggacaacgataacgacaagttcgagggaaactgcgccgaacaggacggatcgggatggtggatgaataagtgtcacgccggacacctgaacggtgtttactaccaggggggtacttactctaaagcctccactccgaacggttacgacaacggcatcatatgggcgacctggaaaacccgctggtactccatgaagaaaaccactatgaagattatcccattcaaccgcctgaccatcggtgagggtcaacaacatcatctgggaggggccaagcaggtgcggcccgaacacccagcagagactgaatacgattccctgtacccggaagatgacctg

SEQ ID NO: 11402 - DNA, 1359 bp, synthetic construct
  misc_feature 1..1359: note = source = /note="Description of Artificial Sequence: Synthetic coding sequence"
  source 1..1359: mol_type = other DNA
atgagttggagcctccacccccgtaacctgatcctttacttctacgccctgctgtttctatcatcgacatgcgtggcatatgtcgccactcgcgacaactgctgcattctcgatgaacgattcggttcttactgtcctactacgtgtggcatcgccgacttcttgtccacctaccagaccaaggtggataaggatttgcagtcactggaggatattctacatcaagtcgaaaataaaacctcagaggtgaaacagttgatcaaggccattcaattgacctataaccctgacgagtcctccaagccaaacatgatcgacgctgccaccctaaagtcaaggaaaatgcttgaagaaattatgaagtacgaagccagcattctgactcacgattctagcattcggtatcttcaagaaatttacaacagtaataaccaaaaaattgttaatctgaaagagaaggttgcacaactagaagcccagtgccaggagccatgtaaagataccgtacagatccacgatataacgggcaaagactgccaggacatagctaacaaaggggccaaacaaagtggcctgtattttatcaaaccactgaaggccaaccaacagtttctcgtatactgcgaaatcgatggctctggcaacggctggaccgttttccaaaaacgccttgatggatcggtcgatttcaagaaaaattggattcagtataaagaaggattcggccatctgagtccaaccggaacaaccgagttctggctgggaaacgaaaagattcatctgatcagtacccagtcagcgatcccatacgcacttcgcgtggagttggaggactggaatggtcgtacttctaccgccgattatgctatgttcaaggtaggtcctgaagctgataagtacaggttgacctacgcctattttgctggaggggacgccggggatgcctttgacggattcgacttcggcgatgatcccagcgataagttctttaccagccacaacggaatgcagttctctacttgggataatgataacgacaagttcgaaggaaactgtgccgagcaggatgggtctgggtggtggatgaacaaatgtcacgcaggtcatcttaatggagtgtattatcaggggggcacatactccaaggcttccaccccaaatgggtacgataacggcatcatctgggccacctggaagactcgctggtacagtatgaaaaaaaccacaatgaagataatccctttcaacagactcacaataggggaaggccagcagcatcacttaggtggtgccaagcaagtccgtccggaacacccagccgagactgagtacgattctctatacccagaagatgatctg

SEQ ID NO: 11403 - DNA, 1359 bp, synthetic construct
  misc_feature 1..1359: note = source = /note="Description of Artificial Sequence: Synthetic coding sequence"
  source 1..1359: mol_type = other DNA
atgagctggagcctgcacccgcgaaatctgattctgtacttctacgctttgctcttcctctcctccacttgcgtggcttacgtggctaccagagacaattgctgcatcctcgatgagcggtttggatcgtactgccctacgacctgtggaatcgcggacttcctgtcgacttaccaaaccaaggtggacaaggacctccaatcattggaggatatcttgcaccaagtggaaaacaagaccagcgaagtgaagcagctgataaaagccatccagctgacctacaacccggatgaatcctcgaagccaaatatgattgatgccgctacccttaaaagcagaaaaatgctggaagagatcatgaagtacgaggcgagcatcctgacccatgacagctcaattagatatctgcaggagatctacaactcaaacaaccaaaagatcgtcaatctcaaggaaaaggtcgcccagttggaggcgcagtgtcaggagccatgtaaggatacggtccaaatacatgacattactggaaaggactgccaagacattgcaaacaaaggagcaaaacagtcgggactctatttcatcaaaccgcttaaggccaatcaacagttcctggtttactgcgagatagacggatcgggcaacggttggactgtgtttcagaagcgcctggacggatccgtggactttaagaagaactggatacagtataaggaaggcttcggacacctctcaccaaccgggactactgagttctggctgggtaacgaaaagatccacttgatctcaacccaatccgctatcccgtacgccctgcgggtcgaacttgaggactggaatggacggactagtacggcggactacgccatgtttaaggtggggccggaggcagataagtaccggctcacgtacgcatacttcgcggggggagacgccggggatgcatttgacggtttcgatttcggcgacgacccctccgacaagttcttcacctcacataatggcatgcagttctcgacctgggacaacgataacgataagttcgagggcaactgcgccgagcaggatgggtccggctggtggatgaataagtgtcacgccggacacctgaatggcgtctattaccagggaggaacctactctaaagcctccacccctaacggatacgataatggcatcatctgggctacttggaaaacccgctggtactcgatgaaaaagacgactatgaagatcattccgttcaataggctgaccatcggagagggtcaacaacatcatttgggcggcgcgaagcaggtaaggcctgagcacccggcggagactgaatacgattcgctgtaccctgaggatgacctg

SEQ ID NO: 11404 - DNA, 1359 bp, synthetic construct
  misc_feature 1..1359: note = source = /note="Description of Artificial Sequence: Synthetic coding sequence"
  source 1..1359: mol_type = other DNA
atgtcctggtcccttcaccctaggaatcttattctgtatttttacgctttgctgttcctcagctccacatgcgttgcttacgtggcaacccgagacaactgctgtatcctcgatgagcggttcggttcgtactgccccactacatgtgggattgctgacttcctctcaacctatcaaacgaaagtcgataaggacctgcagtccttggaggacatattgcaccaggtcgagaataaaacctccgaagtcaaacagcttattaaggccatccaactgacctataacccagacgagtcttccaagccaaatatgatcgatgcggccaccctgaagtccagaaagatgctggaggaaattatgaagtatgaagcgtccattcttacccacgactctagcataaggtacctgcaggaaatctataactccaacaaccagaagattgtgaatttgaaggagaaggtggcacaattggaggctcaatgtcaggagccatgtaaggacacagtacagatccatgatatcactggcaaagattgtcaggatattgcgaataagggggcgaaacagtcaggcctatatttcattaaaccactcaaggccaaccagcaatttttggtgtactgtgaaatcgatggcagcgggaatggatggacagtctttcagaaacgtcttgacggatccgttgacttcaaaaagaactggatccagtacaaagaggggttcggacatctcagcccaactggcactactgagttttggctggggaacgagaagatccatttaataagtacccagagcgccataccgtatgctctgagagtggaactggaggattggaatgggagaaccagcacagcagactacgctatgttcaaagtcggtcccgaagccgataaataccggttgacctatgcttattttgctggcggagatgccggagacgcttttgacgggttcgacttcggggacgacccatccgacaagttcttcacctcccataacgggatgcaattctcaacctgggataatgacaatgacaaatttgaaggaaactgcgccgaacaggacgggtcaggttggtggatgaacaagtgtcatgcaggccacttaaacggagtgtattaccaaggcggaacctatagcaaggctagcaccccaaatgggtacgacaacggcataatctgggcgacctggaaaacaaggtggtattcaatgaagaaaacaaccatgaaaatcatccccttcaacaggctcactattggagaaggacagcagcatcatctcggtggagcaaagcaggtgaggcccgagcaccctgctgagacagagtacgacagtctgtatcccgaagatgatttg

SEQ ID NO: 11405 - DNA, 1359 bp, synthetic construct
  misc_feature 1..1359: note = source = /note="Description of Artificial Sequence: Synthetic coding sequence"
  source 1..1359: mol_type = other DNA
atgtcgtggagcctgcatccgcgaaacctcattctgtacttctacgcactgctttttctctccagcacgtgcgtggcctacgtcgccacccgggacaactgctgcatcctcgatgaacgatttgggtcctattgtcctaccacttgtgggatcgcggattttctgagcacctaccagaccaaggtggataaggatcttcaatccctggaggatattctgcatcaggtcgaaaacaaaacctcggaggtgaaacaattgattaaagcaattcaactcacctataacccagatgaaagttcgaagcccaacatgatcgatgccgcaactttgaagagcaggaaaatgctggaagagattatgaagtacgaagcatccatcctcactcatgacagctccataagatacctccaagaaatctacaattcgaacaatcagaaaatcgtgaacctgaaggagaaggtcgcacagctggaagcccaatgccaggaaccatgtaaggacaccgtccagattcatgacattactggtaaggactgtcaagatattgcgaacaaaggagccaagcaatccggactgtacttcattaaaccgctgaaggctaatcaacaattccttgtctactgtgagatagatgggagcggaaatggatggactgtctttcaaaagcggcttgatggttcagtcgatttcaagaagaattggattcaatacaaggaaggatttggccatctctcgccgaccggcaccactgaattctggcttggcaacgagaaaatccatctcatatccactcaatccgcaattccttacgcactgagagtcgaactggaggattggaacggtcggactagcaccgctgactacgcgatgtttaaggtgggtcctgaagcggacaaataccgtctgacttacgcgtacttcgcaggaggtgacgcaggggatgccttcgacggctttgatttcggagatgacccatccgataagttctttacgagtcataatggaatgcaattttcgacttgggataacgacaacgataagtttgagggtaactgtgcagaacaagatgggtccggatggtggatgaacaagtgtcacgcaggacatctgaacggagtgtactaccaaggaggaacctactcaaaggcgtctacccctaatgggtatgataatggtatcatttgggcgacctggaaaactagatggtactcgatgaaaaagacgaccatgaagatcatcccctttaatcgtcttaccataggagaaggacagcagcaccacctgggcggtgcaaaacaagtcaggcccgaacatcctgcggaaactgagtacgactccctgtacccagaagatgacctt

SEQ ID NO: 11406 - DNA, 1359 bp, synthetic construct
  misc_feature 1..1359: note = source = /note="Description of Artificial Sequence: Synthetic coding sequence"
  source 1..1359: mol_type = other DNA
atgagttggagcttgcacccaaggaatttgatcctctacttttacgcgctgttatttctgtctagtacctgtgtcgcttacgttgctacaagagacaactgctgcatcttggacgagaggtttggcagttactgtcctactacatgcggcatcgctgacttcctgtccacttaccaaaccaaggtagataaagatttgcagtcgctggaagatatccttcaccaggtggaaaacaagacctccgaagttaaacagctgatcaaggcaattcagttaacttataatcccgacgaaagcagcaaacctaacatgattgacgccgctaccctgaaaagcagaaagatgttagaagaaattatgaaatatgaggcgagcatactgacccatgactcttccatccgttacctgcaggaaatctataacagcaacaaccagaaaattgtgaatctaaaggaaaaggtggcccagctcgaagcccagtgccaggaaccctgtaaggataccgtgcagatacacgacataacagggaaggactgccaggatatcgccaataaaggcgcaaagcagtctggcctgtactttatcaagcccctgaaggccaatcagcagttccttgtgtactgcgagatagatggatcgggaaacggatggactgttttccagaagcggcttgacggcagtgttgacttcaaaaaaaactggattcagtacaaggagggcttcgggcacttaagtccaacgggaacaacggaattctggctgggcaacgaaaagatccacctcatcagcacacagtcggcgatcccatacgccttacgggttgagttagaagattggaacggccggacaagcacagccgactacgctatgttcaaggttggtccggaggctgacaagtaccgccttacctatgcctacttcgccgggggggatgcaggcgatgcctttgacgggtttgattttggcgacgaccctagcgacaagtttttcacctctcataacggcatgcagttctcaacctgggataacgataacgacaagttcgaagggaattgtgcagaacaggatggcagtggatggtggatgaacaagtgtcatgctgggcatctaaacggcgtgtactaccagggcgggacttacagcaaagcttcaacaccaaacgggtatgataatgggattatctgggcaacttggaagaccagatggtactccatgaaaaaaacgacaatgaaaatcattccatttaatcgactcacaattggcgaaggacagcagcaccatctgggaggcgctaagcaggtacgcccagagcatcccgctgaaacagaatacgactccctctatcccgaggacgatttg

SEQ ID NO: 11407 - DNA, 1359 bp, synthetic construct
  misc_feature 1..1359: note = source = /note="Description of Artificial Sequence: Synthetic coding sequence"
  source 1..1359: mol_type = other DNA
atgagctggtccctgcatcccaggaacttgatactctacttttatgcccttctctttttgtcgtcgacctgtgtggcatacgtggcaactcgggataattgctgtattcttgacgaacgctttggttcgtactgtcctaccacctgcgggatcgcagattttctgtccacctaccaaaccaaagtcgataaggacctgcaatcactcgaggacattctgcaccaagtcgagaataagacgtccgaagtgaaacagctcataaaggcgatccagctcacctacaacccggatgagtctagtaaacctaatatgattgacgctgcaactctgaagtcaaggaaaatgctggaagaaatcatgaagtacgaagcaagcattctcacccatgattcgtcgatccggtacctgcaggagatctacaattcaaacaaccagaagatcgtcaaccttaaggagaaggttgcccagctggaagcacaatgtcaagagccatgcaaagatactgtgcaaatccatgatattactggaaaggattgtcaagatattgcaaataagggtgcaaaacaatcgggactgtactttatcaagccacttaaggcaaaccaacagttcctcgtttactgtgaaattgatggatccggcaacggatggactgtgtttcaaaagcgtctcgacggatccgtggatttcaagaaaaactggatacagtacaaagaaggatttggtcatcttagcccgaccggcactaccgagttttggctgggtaacgagaaaatccatcttatctcgacgcaatccgctatcccttacgcactccgggtcgaactcgaagattggaacggtaggacttcaaccgctgattacgcgatgtttaaggtgggacccgaagcagacaaatacaggcttacctacgcatactttgcaggtggcgatgcgggggacgcttttgatggctttgacttcggggatgatccttcggacaagtttttcacctcccataacggtatgcagttttcgacttgggataatgataacgacaaatttgaaggaaactgtgcagagcaagatggatcgggatggtggatgaataagtgccatgcaggacacctgaatggggtgtactaccaaggggggacttacagcaaagcctcaactcccaacgggtacgataatggtatcatctgggcaacgtggaaaacccggtggtacagcatgaagaaaactactatgaaaatcattccattcaaccgtttgacgattggtgagggacagcagcatcatctgggaggtgcaaagcaggtcagaccggaacaccctgcagagacggagtatgattcgctgtatcctgaagatgatctg

SEQ ID NO: 11408 - DNA, 1359 bp, synthetic construct
  misc_feature 1..1359: note = source = /note="Description of Artificial Sequence: Synthetic coding sequence"
  source 1..1359: mol_type = other DNA
atgagctggtcgctgcatccccgcaacttgattctgtacttttacgcacttcttttcctgtcctccacctgtgtggcgtacgtggctaccagagacaattgttgtattcttgatgaacgatttgggtcctactgtccaactacttgcggaatcgctgatttcctgtctacgtatcagacgaaagtggataaggatctgcagtcactggaggacattttgcaccaagtcgaaaacaagacctcggaggtgaagcaactgattaaagccattcagctgacctacaaccctgatgagtcatcaaaaccgaacatgatagatgcagcaacgttgaagtcgaggaaaatgctggaagagattatgaagtacgaagcgagcatcttgactcacgactcgtccatcagataccttcaagaaatctacaactcgaacaatcaaaagattgtgaatcttaaggaaaaggtggcacaacttgaagcacaatgtcaggaaccatgcaaggacacggtccagatccatgacatcaccggtaaggattgccaggatattgctaacaaaggggcaaagcaaagtgggctgtacttcataaaaccattgaaggcaaaccaacagtttctggtctactgtgaaattgatggttcgggtaatgggtggaccgtgtttcaaaaaaggcttgatggcagtgtggacttcaagaagaattggattcagtacaaagaaggatttgggcacctgtcccctaccggtactaccgagttttggcttggaaacgaaaagattcatctgatctccacccagtccgctattccttacgcgcttcgggtggaacttgaagattggaacggccgcaccagcactgccgattacgctatgtttaaggtgggtccagaggctgataagtacaggctcacttacgcgtacttcgccggaggtgatgcgggtgatgcctttgatggatttgactttggggacgatccatccgacaaattcttcacttcacataacggcatgcaatttagcacttgggataacgacaatgataagtttgaaggtaactgcgccgaacaagacggatcgggttggtggatgaacaagtgtcatgcaggacatcttaacggcgtctattatcaaggtggaacctattctaaagcatccaccccaaacggctacgataatgggatcatttgggccacttggaaaacccggtggtactccatgaaaaagaccactatgaaaatcatcccttttaacagactgaccataggggaggggcagcagcatcatctcggcggagctaagcaagtcagacccgaacatccagctgagacggagtacgacagcctttacccggaggatgatctc

SEQ ID NO: 11409 - DNA, 1359 bp, synthetic construct
  misc_feature 1..1359: note = source = /note="Description of Artificial Sequence: Synthetic coding sequence"
  source 1..1359: mol_type = other DNA
atgtcctggtcgctgcatccgcgcaacctgatcctgtacttttacgcgcttctcttcctgtcatcgacctgtgtggcatacgtggccaccagagacaattgctgcatcctcgacgaacgcttcggttcctactgcccgaccacctgcgggatcgccgattttctctcaacgtaccaaaccaaggtggacaaagatctccagtccctggaggatattctgcaccaagtagaaaacaagacttccgaggtcaagcaattgatcaaggccatccaactgacttacaatcccgatgagtcgtcgaaacctaacatgatcgacgcggcgactctgaaatcccgtaaaatgctggaggagattatgaagtacgaagcgtcgatccttactcacgactcgtccatccgatacctccaggagatatacaattctaacaaccagaaaattgtcaacctgaaagagaaagtggcccagctggaagcccaatgtcaggagccgtgcaaggatactgtgcaaatccacgacatcaccggaaaggactgccaggatatcgcaaataagggggcaaagcaaagtggcctgtatttcatcaaaccactcaaggcaaatcagcaattcttggtgtactgcgagatcgatggcagcggtaatggatggactgtgttccagaagcgcctcgatggctctgtcgacttcaagaagaactggatccaatacaaagaaggttttggacatctttcgccgactggaaccaccgagttttggttgggaaacgaaaagatccatctcatctcaacccagtcggcgatcccttacgccctgagagtcgaactggaggactggaacgggagaacctcgaccgcagactacgcaatgttcaaggtcggacccgaggctgacaagtacaggctgacttacgcctatttcgctggaggggatgcgggcgatgcctttgatggattcgacttcggtgacgatccttcagacaagttcttcacttcacataacggtatgcaatttagcacttgggacaacgacaatgacaagttcgaaggaaactgcgccgaacaagacggaagcggctggtggatgaacaagtgtcatgcgggccatctcaatggagtgtactaccagggaggtacctactccaaagcatctaccccgaacggatacgacaacggaatcatctgggcgacctggaaaacgcggtggtactccatgaaaaagactaccatgaagataatcccattcaaccggctcaccatcggtgagggtcagcagcatcatctcgggggcgctaagcaagtgcgcccggaacatccggccgaaacggagtacgactccctgtacccagaggacgatctg

SEQ ID NO: 11410 - DNA, 1359 bp, synthetic construct; identical to SEQ ID NO: 11359
  misc_feature 1..1359: note = source = /note="Description of Artificial Sequence: Synthetic coding sequence"
  source 1..1359: mol_type = other DNA

SEQ ID NO: 11411 - DNA, 1359 bp, synthetic construct
  misc_feature 1..1359: note = source = /note="Description of Artificial Sequence: Synthetic coding sequence"
  source 1..1359: mol_type = other DNA
atgtcctggtcgctgcacccaaggaacctcatcctctacttttacgccctgctcttcctgtcgtcaacctgcgtggcgtacgtcgcaactcgtgataactgctgcatcctggatgagagatttgggtcttattgtccaactacttgtggaatcgcggacttcctcagcacctaccaaaccaaggtggacaaggatctccaatcgctggaagatatcttgcatcaggtggagaataagacgtcagaggtgaagcagctcatcaaggcgatccagctgacctacaatcccgacgaatcaagcaagcccaacatgatcgatgccgctactctcaagagccgcaaaatgctcgaagagatcatgaagtacgaagcctcaattttgacccatgactcctcgattcgctacttgcaggagatctataactcaaacaatcaaaagatcgtgaacctgaaagaaaaggtcgcgcaactggaagctcaatgccaggaaccgtgcaaggacacggtccaaatccatgacatcactggaaaggactgccaggacattgcgaacaaaggcgccaaacagagcggactgtacttcatcaagccgctgaaggcaaaccaacaatttctggtgtactgtgaaattgacggatccggaaacggctggactgtgtttcaaaagaggctcgacggttccgtggacttcaagaagaattggatccagtacaaggaaggattcggacatctgagcccaacgggaaccaccgagttctggctgggaaatgaaaagatccacctcatctccacccaatcggccatcccatacgctcttcgggtggaacttgaggactggaacgggcgcactagcaccgccgactatgccatgttcaaggtggggccggaggccgacaaataccgcctgacttatgcatacttcgcaggtggagatgcaggcgatgcctttgacggctttgatttcggagatgacccatccgacaaattcttcacttcgcataatggaatgcagttctcaacttgggataacgacaatgataagtttgaaggcaactgcgcagagcaggatgggtcaggatggtggatgaacaagtgccacgcgggtcacctgaatggcgtctactaccaagggggaacttacagcaaggcctccacgccgaacggctacgataatggtatcatctgggccacttggaaaacgaggtggtactccatgaagaaaactaccatgaagattatccctttcaacagactcactattggcgaaggacagcagcaccacttgggaggagcaaaacaggtgcggccggagcatccagcggaaaccgaatacgactcgctgtaccctgaggatgatttg

SEQ ID NO: 11412 - DNA, 1359 bp, synthetic construct
  misc_feature 1..1359: note = source = /note="Description of Artificial Sequence: Synthetic coding sequence"
  source 1..1359: mol_type = other DNA
atgtcttggtcattgcatcctcggaaccttatcttgtacttctacgcactgctctttctttcgtcaacttgtgtcgcatacgtcgcgacccgagacaactgctgcatcctggatgaacgatttggatcatattgtcccaccacctgtgggattgcagactttctctccacctaccagaccaaggtggataaagacctgcagagcctggaggacatactccatcaagtggaaaacaaaacttccgaagttaaacagctgattaaagcgatccagcttacctacaaccccgatgaatccagcaagcccaatatgattgatgccgccaccttgaaatcacgcaagatgctcgaggagatcatgaagtatgaggcctcaatccttacgcacgattcctccattagatacttgcaggagatttacaattcaaataaccagaaaattgtgaacctcaaagagaaggtggcgcaacttgaagcgcagtgtcaggaaccgtgcaaagatacggtgcaaattcatgacataacggggaaggattgtcaagatatagcgaataaaggtgcaaagcaaagtggtctttacttcattaagcccttgaaggcgaaccagcaatttcttgtgtattgtgaaattgacggatcgggtaatggatggaccgtgttccagaagagactcgacggttcggtggatttcaagaagaactggatccaatacaaggagggatttggccacctgagccctaccggcaccaccgaattctggctcggaaatgaaaagatccacctgatctcaacgcagtccgcaataccatacgccctgcgagtcgaacttgaagattggaacggtcggactagcaccgcagactacgccatgtttaaggtgggacctgaagctgacaaatacagactgacttacgcatactttgctggcggtgacgccggcgacgcattcgacggtttcgattttggagatgatcctagcgacaagttctttacctcgcataacggaatgcagttcagcacttgggataatgacaatgataagttcgagggcaattgcgcagaacaggatggatcgggttggtggatgaataagtgccatgccggacatctgaacggagtctactaccaggggggcacctactcgaaggcgagcactcctaacggatacgacaacgggatcatttgggcaacttggaaaacccggtggtacagcatgaaaaagacgactatgaagattatcccatttaacagacttaccattggagagggccagcaacatcaccttggaggtgctaagcaggtgcgtccagaacatcctgcagaaacggagtacgattcgctttacccagaggacgacttg

SEQ ID NO: 11413 - DNA, 1359 bp, synthetic construct
  misc_feature 1..1359: note = source = /note="Description of Artificial Sequence: Synthetic coding sequence"
  source 1..1359: mol_type = other DNA
atgtcctggtcgttgcatccgagaaatctcatcctgtatttctatgccctcctcttcctgtcctcgacttgcgtggcgtacgtggcaacccgggataattgctgcatcctggacgaaaggttcggatcatactgtccaaccacctgtggtattgccgatttcctctcgacttaccagaccaaggtcgacaaggacctgcagtccctggaggacatcctccaccaggtggaaaacaagactagcgaagtgaagcaactgatcaaggcgatccagctgacttacaatccagatgaatcctcaaagccgaacatgattgatgccgccacgctgaagagccgaaagatgcttgaggaaatcatgaaatacgaagcgtcaatcctgacccatgatagctcaatcagatacctgcaggaaatctataattcgaacaaccagaagatagtcaatcttaaggaaaaagtggcacagttggaggcgcagtgtcaagaaccgtgcaaggatactgttcagattcatgacatcactggaaaggactgccaggacatcgccaataaaggcgcaaagcaatcgggattgtactttatcaaaccactcaaggcaaaccagcaatttctcgtctactgcgagatcgatggatcgggaaacggatggacggtgttccaaaagcgcctcgacggaagcgtggacttcaagaaaaattggatccagtacaaggagggattcggccacctgagccccactggaaccaccgaattctggctcgggaacgagaagatccacctgatctcaactcagtccgccatcccttacgctctgcgggtcgaactggaagattggaatggtcgcacctcgactgccgactacgcgatgtttaaggtgggcccggaggcagataagtacagactgacctacgcttactttgccggaggagatgctggcgacgcgttcgacggatttgatttcggggacgacccgtccgacaaattcttcacttcccataacgggatgcagttctcaacttgggacaacgataatgacaagttcgagggcaactgcgctgagcaagacggcagcgggtggtggatgaacaaatgccacgccggacacctgaacggagtgtactaccaaggtggcacctactcgaaggcatctacccccaacggttacgacaacggtatcatctgggccacttggaaaacccggtggtacagcatgaagaaaaccacgatgaaaatcattccttttaaccgcctgaccattggcgagggacaacaacatcacttggggggagctaaacaggtccgccctgaacacccggccgagacggaatacgactccctttacccagaggatgatctc

SEQ ID NO: 11414 - DNA, 1359 bp, synthetic construct
  misc_feature 1..1359: note = source = /note="Description of Artificial Sequence: Synthetic coding sequence"
  source 1..1359: mol_type = other DNA
atgtcatggagccttcatcctcggaacctcatcctgtacttctacgccctcctgttcctgtcaagcacttgcgtggcttacgtggctactcgggacaactgttgcatcctggatgaaagattcggttcctactgcccaaccacctgcggcatcgcggacttcctgtctacgtaccagactaaggtcgataaggacttgcaatcgctcgaagatatccttcaccaggtcgaaaacaaaaccagcgaagtgaagcagctgataaaggccattcagctgacgtacaatccggatgaatcttcgaagccaaacatgatcgacgccgcgacgctcaaatcacggaaaatgctggaagaaatcatgaaatatgaggcttcgatcctgacgcacgactccagcatcagatacctccaagaaatctacaactccaataaccagaagatcgtgaatcttaaggagaaggtggcgcagttggaggctcaatgtcaagagccatgcaaagataccgtacaaatccacgatatcactggaaaggactgccaagatatcgcaaacaagggtgctaagcagtcgggactctacttcatcaagccgctgaaggccaaccagcagttcctcgtctactgcgaaatcgatgggagtggaaacggatggaccgtttttcagaaacgcctggatggttccgtggactttaagaaaaactggatccaatacaaggaaggtttcgggcacctttccccgactggaactacggagttctggctgggcaacgaaaagatccatctgatctcaactcagtctgccatcccttacgcgcttcgcgtggaattggaggactggaatggaaggacttccactgccgattacgctatgttcaaagttggtccggaggccgacaaatatcgcctcacttatgcatacttcgccggaggagatgccggcgatgcgtttgacggttttgacttcggagatgacccgtctgacaagttctttacgtcccataatggaatgcagttttccacctgggacaatgacaatgacaaattcgaggggaactgcgcagaacaggatggtagcggatggtggatgaataagtgtcatgcgggacacctgaacggcgtgtactaccaaggaggaacgtactcaaaggcctccaccccaaatggatacgacaatggcatcatctgggccacttggaaaacccgctggtattccatgaaaaagactaccatgaagatcatcccatttaaccggctcaccatcggagaaggccagcagcaccacctgggcggggccaagcaggtgcggcccgagcaccctgccgagactgagtacgactcgctgtaccccgaggacgatttg

SEQ ID NO: 11415 - DNA, 1359 bp, synthetic construct
  misc_feature 1..1359: note = source = /note="Description of Artificial Sequence: Synthetic coding sequence"
  source 1..1359: mol_type = other DNA
atgtcctggtcactgcatcctaggaaccttattctttacttttacgcgctgctcttccttagctccacctgcgtggcctacgttgccactagggacaactgttgtatcctcgatgaacggttcggatcatattgtcctaccacctgcgggattgccgattttctttccacctaccagaccaaggtggacaaggatctgcaatcactcgaggacattctccatcaagtggagaacaagacttcggaagtcaaacaactgatcaaggcaatccagcttacgtacaacccagatgagagctcaaagccaaacatgattgacgctgcaactcttaagtcgcgcaagatgctggaggaaatcatgaagtacgaagcatccattctgacccatgactccagcattagatacctgcaggagatatacaactccaataatcagaaaatagtcaacctgaaagagaaggtggcgcagttggaagcgcaatgtcaggagccttgtaaggacactgtccagattcacgacattactggcaaggattgtcaagatattgctaataagggagcaaaacagtctgggctgtacttcattaaaccacttaaagcgaaccagcagttccttgtctactgcgaaatcgatggatccggcaatggctggaccgtttttcagaagaggctggatggttccgtggacttcaaaaagaattggatccagtataaggaggggttcgggcacctctcacctaccggcacgactgagttttggcttgggaatgaaaagatccacctgatctccacccaaagcgcaattccgtatgcactgagggtggaactggaagattggaacggacgcacctcaaccgctgactacgcaatgttcaaagtgggacctgaggcagacaagtacaggctgacctacgcttacttcgcaggtggcgacgcaggggatgccttcgatggatttgatttcggagacgatccctccgataagttctttacttcacataacggcatgcaattttccacctgggacaatgacaacgacaaatttgaaggaaattgtgcagagcaagatggatcaggttggtggatgaacaagtgccatgcagggcatctgaacggcgtgtactaccaaggcggtacttactcaaaggccagcacccccaatggttacgataatggaatcatttgggctacttggaaaacgcgctggtactcgatgaagaaaactaccatgaagattatacctttcaatcgtttgactattggagaaggtcaacaacaccatctgggaggggccaagcaggtcagacctgaacatcctgcggaaaccgaatacgattcgctctacccagaggacgatctg

SEQ ID NO: 11416 - DNA, 1359 bp, synthetic construct
  misc_feature 1..1359: note = source = /note="Description of Artificial Sequence: Synthetic coding sequence"
  source 1..1359: mol_type = other DNA
atgtcctggagcctgcacccaagaaatcttatactctatttctacgcactgttgtttctttcgtccacttgtgtcgcatacgtcgccactagagataactgttgtattcttgatgaaagattcggctcgtactgcccgactacttgcggtattgctgatttccttagcacctaccaaactaaggtggacaaggatcttcagtccctggaggatattctgcaccaagtggagaacaagacctccgaggtcaagcagctgattaaggcaatccaactcacttacaaccctgatgaatcatcgaagccgaacatgattgatgcagccacgctcaagtcgagaaaaatgctcgaagagattatgaagtacgaggccagcatcctcactcatgattcctcaatccgataccttcaagaaatctataactcgaacaaccaaaagattgtcaaccttaaggagaaggtggcccagctcgaagcacaatgtcaagaaccttgtaaggataccgtgcaaattcatgatatcactggaaaggattgtcaagacatagcaaacaaaggtgcaaaacagtccggtctttactttatcaagcctcttaaggcaaaccaacaatttctggtgtactgcgaaattgacggaagcggtaacggttggactgttttccaaaaaaggctggatggttcggtggacttcaagaagaattggattcagtacaaagaggggtttggtcacctttcgccaactggaactaccgaattctggctgggaaacgagaagattcacctgattagcactcagtcagccatcccttacgctctgcgggtggagcttgaggactggaacggccgaacctcgaccgcagactacgcgatgtttaaggtgggtccagaagctgataagtacagattgacttacgcatactttgcaggcggagacgcaggcgacgcatttgacggatttgattttggagacgatccttcagacaagttctttacttcgcataatggtatgcagttttcgacctgggataatgacaacgacaaatttgaaggtaactgtgcagagcaggacggtagcggatggtggatgaacaagtgtcacgcaggacatctcaacggtgtgtactaccaaggaggaacctacagcaaagcatccacgccaaacggttacgataacgggatcatttgggcaacctggaaaacgcgctggtactcaatgaagaaaaccactatgaaaatcatcccgtttaacaggcttacgattggtgaaggacagcaacatcaccttggtggagcgaagcaggtgcgccccgaacaccctgccgaaactgaatacgattccctctaccctgaggatgatctt

SEQ ID NO: 11417 - DNA, 1359 bp, synthetic construct
  misc_feature 1..1359: note = source = /note="Description of Artificial Sequence: Synthetic coding sequence"
  source 1..1359: mol_type = other DNA
atgtcgtggtcgctgcatccacgcaatctcatcctctatttttatgcgctgctgttcctttcctctacatgcgtggcctacgtggcaacaagggacaattgctgtatcctcgacgagcgttttggaagttattgtcctactacctgtggaattgctgatttcctgagcacctatcagaccaaagtggacaaagacttgcagtccctcgaggacatcctgcaccaagttgagaacaagacaagcgaggttaagcagcttattaaggcgattcaactcacctacaaccccgacgagtcctccaagccaaacatgatcgacgcagccaccttaaaatcccgcaagatgttagaggagattatgaaatacgaggcatcaatcctaacccacgactcttcgatcaggtacttgcaagaaatttacaattcaaataatcagaagattgtgaatctgaaagagaaggtagcccagctggaggctcaatgtcaggagccctgtaaggacactgttcagatccatgatattactggaaaggattgtcaagatatagccaacaagggggcaaaacagagtggactgtattttattaagccattgaaggcgaatcaacaatttttggtctattgcgaaattgatgggtcaggcaacggttggacggtctttcagaaacggctagacggttccgtcgactttaaaaagaactggattcagtacaaggaggggtttggccatctctcaccaacaggaacaaccgaattctggttgggcaatgagaaaatccatctgatctccacacagtccgccattccatacgccctgagagttgaactggaggactggaatggacgcacttctaccgccgattacgcaatgtttaaggtgggccctgaagctgacaaatatagactaacgtatgcctatttcgccgggggcgacgctggcgatgcctttgacggttttgatttcggcgacgacccttctgataaattttttacctctcataatggaatgcagttttcgacctgggataatgacaatgacaaatttgagggcaactgtgctgagcaggatggctcaggctggtggatgaacaagtgtcatgctgggcatctgaatggagtgtattaccagggcggaacctattccaaggcatccactcctaacgggtacgacaatggaattatatgggcaacctggaaaaccagatggtatagcatgaaaaagacgactatgaaaatcatcccttttaatcgactcacgattggagaagggcagcaacaccacttaggaggtgcgaaacaggtcagacccgagcatcctgccgagacggagtacgactccctgtatccagaagatgacctt

SEQ ID NO: 11418 - DNA, 1359 bp, synthetic construct
  misc_feature 1..1359: note = source = /note="Description of Artificial Sequence: Synthetic coding sequence"
  source 1..1359: mol_type = other DNA
atgagttggtcgctgcatccccgcaacctgatcctgtacttctatgcgttactgtttctttccagtacttgcgtagcctatgttgccacaagagacaattgctgcatcctggatgaacggtttggcagttactgtcctaccacctgcgggattgctgatttcctgtccacttaccagactaaggtggacaaagacttacagtcactggaagatatattacaccaggtcgaaaataaaacctccgaagtaaaacagttaatcaaggcaatccagctgacatataacccagatgagtcttcaaaaccgaacatgatcgatgctgccaccctgaagtcccgtaagatgctggaggaaattatgaagtacgaggcctccatactgactcacgattcttccattagatacttgcaggagatctacaatagcaataaccaaaagattgtcaacctgaaggagaaggtggcccaactggaggcacagtgtcaagagccttgtaaagacacagtgcaaatacatgatattacagggaaggattgtcaggacattgccaataaaggcgccaagcaatctgggctctatttcatcaaaccgctgaaagccaatcagcagtttctcgtgtattgcgaaatcgacggcagcgggaatgggtggacagtgttccaaaagagactcgatggatcagtcgactttaagaagaattggatacaatataaagaggggtttggccacttatcccctacagggacaacagagttctggctggggaacgaaaaaattcacttgattagcacgcagagcgcaattccatacgcactaagggtggagttggaggactggaatggcagaacttcaaccgctgactatgctatgtttaaggtcggccctgaggcagataaatacaggcttacatatgcctactttgccgggggtgacgcgggagacgccttcgatgggttcgactttggggatgatccctctgacaaattctttacgtcacacaatggaatgcagttcagcacatgggataatgacaatgataagtttgaaggtaactgcgctgaacaggatggttcaggttggtggatgaacaagtgccacgcggggcatttgaacggtgtgtactaccaggggggaacctatagtaaggcatcaaccccaaacggctacgataacggtataatttgggcaacctggaaaactcggtggtattcaatgaaaaagacaactatgaagattatcccctttaaccgcctaacgataggcgaagggcagcaacatcatctaggcggagctaagcaggtcaggcctgagcaccccgctgaaaccgagtacgattccttgtaccctgaagacgacctt

SEQ ID NO: 11419 - DNA, 1359 bp, synthetic construct
  misc_feature 1..1359: note = source = /note="Description of Artificial Sequence: Synthetic coding sequence"
  source 1..1359: mol_type = other DNA
atgtcctggtcgctgcatccgcgaaaccttatcctgtacttctacgcactgctgtttttgtcgtcgacttgcgtggcctacgtcgctacgcgggacaattgctgcatcctcgatgagaggtttggatcctactgccctaccacctgtggcattgcggacttcctgagcacttaccagaccaaagtggacaaggatctccagtccctcgaggacatcctccaccaagttgagaataaaacttcagaggtcaaacagttgattaaggcaatccaactgacttacaaccctgacgagtcctccaagccgaacatgattgatgccgccaccttgaagagcaggaaaatgctcgaggaaatcatgaaatacgaagcgtcgatccttactcacgattccagcatccgctatctgcaagaaatctacaactcgaacaatcagaagatcgtgaaccttaaggaaaaagtggcccagcttgaggcacagtgccaagaaccgtgcaaagatacggtgcagatccatgatatcactggaaaggactgccaggatatcgccaacaagggcgcaaagcaaagtggcctgtactttatcaagccgctgaaggccaaccagcaattcctcgtgtactgtgaaatagatggatcaggtaacggttggaccgtctttcagaagagactggatggctcggtcgacttcaaaaagaattggattcaatacaaggaaggcttcggacatctgagcccaaccggtaccactgaattctggctcggaaacgagaaaatccacctgatctcaactcagtcagccatcccctacgctctgcgcgtggaactggaagattggaacggaagaacctcaactgctgactacgccatgttcaaggtcggacccgaagcggacaagtaccgcctgacctacgcttacttcgcaggaggcgacgccggcgacgccttcgatggattcgacttcggcgacgatccttccgacaagttcttcacctctcataatggtatgcaattttcgacctgggacaatgataatgacaagtttgagggaaactgtgctgaacaggacgggagcgggtggtggatgaataagtgccacgcggggcatctgaacggagtgtattaccaaggaggcacttacagcaaggcgagcactccaaacggatacgacaatggaatcatctgggccacctggaaaacgcgctggtattccatgaaaaagaccacgatgaagatcatcccgttcaaccggctcaccattggggaagggcagcagcaccacctgggaggagcgaagcaggtgcggccggaacacccagcagagactgagtacgattcgctctacccagaggacgacttg

SEQ ID NO: 11420 - DNA, 1359 bp, synthetic construct
  misc_feature 1..1359: note = source = /note="Description of Artificial Sequence: Synthetic coding sequence"
  source 1..1359: mol_type = other DNA
atgtcatggtcactgcacccaaggaatctcatcctgtacttctatgccttgctgttcttgagctccacctgcgttgcttacgtcgccaccagggacaactgctgtattctcgacgaacgctttggctcctactgtccaacaacttgtggtatcgctgacttccttagcacttaccagacaaaggtggataaggatctgcaaagtctggaagatatccttcaccaggtagaaaacaagacatctgaggttaaacaactcatcaaggcaatacagctgacctacaacccagacgagtcttctaagccaaacatgatcgacgcagctactctgaagtctcgcaagatgctggaggagatcatgaagtacgaggcttctattctgacccacgactcctccatacgctacctccaggaaatctataactccaacaaccagaaaattgtgaacttgaaggaaaaagtggcccagttggaagcacagtgccaagaaccttgcaaagacacagtccagatacacgatattaccggtaaggattgccaagatattgccaacaaaggcgccaagcaatccggactgtatttcatcaagcccctgaaagcaaatcaacaattcctggtgtattgcgaaatcgacggttctggtaacggctggactgtcttccaaaagcgtctggatggttcagtcgacttcaagaagaattggattcaatacaaagaaggctttggccacctgagccctaccggtaccactgagttttggttgggtaacgagaagattcacctcatttctacccaaagtgccattccttatgccctgcgtgtggagctggaggattggaacggtcgcaccagcactgctgattatgctatgttcaaggtgggaccagaggccgacaagtacagactgacttacgcttatttcgcaggtggcgacgcaggagacgcttttgacggttttgacttcggcgatgatccttcagataagtttttcacatctcacaacggcatgcagttttcaacttgggataatgataacgataagttcgagggcaattgtgccgaacaagacggttccggctggtggatgaacaaatgccacgcaggacacctgaatggagtttactaccaaggaggtacatactcaaaagcatcaacacccaatggctacgataacggtatcatttgggctacttggaaaacaagatggtattctatgaaaaaaaccactatgaagataatccccttcaacaggcttactatcggcgaaggacagcagcatcacctgggtggtgccaaacaagtaagaccagagcatcctgctgaaaccgagtacgactctttgtaccccgaggacgatctg

SEQ ID NO: 11421 - DNA, 1359 bp, synthetic construct
  misc_feature 1..1359: note = source = /note="Description of Artificial Sequence: Synthetic coding sequence"
  source 1..1359: mol_type = other DNA
atgagctggtcattacatcctcggaatttgattttgtatttttatgcattgcttttcctgagcagcacatgtgtcgcatatgtggcgacgcgggacaactgctgcatacttgacgaaaggtttgggtcgtattgccccaccacatgtggtattgccgatttcctttccacctatcagacaaaagtcgacaaggacctgcaatctttagaagatatcctccatcaagttgagaacaagacttctgaggtcaagcagctaatcaaggctatccaactgacctacaatcccgacgagtcctcaaaacccaatatgatcgatgccgctacactgaagtcgaggaagatgctggaggaaatcatgaagtacgaggcctcaatcttaacgcatgattcttcaattcgctacctgcaagaaatttacaactcgaataatcagaagatcgtcaacctaaaagagaaagtagcccagctcgaggctcagtgccaagaaccatgtaaagatacagtccagatccacgacatcacaggtaaagattgccaggacatagccaataaaggggcaaagcagagtgggctgtattttattaagccactaaaggcaaatcagcagtttttggtatactgtgagattgacggcagcggaaacgggtggaccgtgttccagaagcgcctcgatggctcggtggatttcaaaaaaaattggatccagtataaggaaggatttggtcatcttagcccaacgggaactactgagttttggttgggaaatgagaagattcatctgatctccacacaatctgcaattccttacgcattacgtgtggagctggaagactggaacggaaggacatcaactgctgactatgccatgttcaaagtcggcccagaggcggataaataccgcttaacgtacgcctattttgctggcggtgacgctggagacgccttcgatgggttcgacttcggggatgaccctagcgacaaattctttacaagtcacaatggcatgcagttctcaacgtgggataatgacaacgataagttcgagggaaattgtgccgaacaggatggttctggctggtggatgaacaagtgccacgccggccatttgaatggcgtgtactatcagggcggcacgtacagcaaggcaagcaccccgaacgggtacgacaacgggatcatttgggctacctggaaaactaggtggtactcaatgaagaagacaacaatgaaaattatcccatttaatcgcctgacaattggagaaggtcagcagcatcacttgggcggcgcaaaacaggttcgccctgaacatccagcagagacagagtacgattccctctacccagaggatgatttg

SEQ ID NO: 11422 - DNA, 1359 bp, synthetic construct
  misc_feature 1..1359: note = source = /note="Description of Artificial Sequence: Synthetic coding sequence"
  source 1..1359: mol_type = other DNA
atgagttggtcccttcacccccgtaaccttatcctctacttttacgccctgttatttctaagttcaacttgcgtggcatacgtggcgacgcgggacaactgttgtattctcgatgagagatttggtagttattgccccaccacatgtgggattgccgacttcctgtccacttaccaaaccaaggtcgataaggatttgcagagtctggaggacatcctccaccaagtcgagaacaaaactagcgaagtgaagcaactgattaaagctatccagctgacctacaatcctgatgaaagctccaaaccgaacatgatcgatgccgccaccctcaaaagcaggaaaatgctggaagagattatgaaatacgaggccagcatcctaacccatgactcttccataaggtatcttcaggaaatctataactcgaataatcagaagatagtgaacctcaaagagaaagtcgcccaactcgaggcacagtgtcaggagccatgtaaggacaccgtgcagatccacgacattacaggcaaggactgccaggacattgcaaacaaaggtgccaagcaaagcggtctgtacttcataaaaccactgaaggctaaccagcaatttcttgtttattgtgaaatcgacgggagcggcaatggatggaccgtcttccagaagcgtttagatggtagtgttgacttcaaaaaaaactggatacaatacaaagagggcttcggacacctgagccctactgggacaacagagttctggctgggcaacgagaaaatccacttgattagcacacagtccgctattccttatgccttgagagttgaactcgaggattggaacggccgcacgtcaacagctgactacgccatgttcaaggtaggaccagaagcagataagtataggttgacatacgcatattttgccggaggagacgcgggcgatgcgtttgacgggtttgattttggggacgatccttcagacaaatttttcacaagccacaatgggatgcagttctcaacttgggataacgataacgacaaattcgagggtaactgcgccgagcaggacggatctggctggtggatgaacaagtgtcatgctggacacctgaacggagtgtattaccagggcggaacatattcaaaggctagtacccctaacgggtacgacaatggaattatttgggccacctggaagacccgatggtatagcatgaagaaaactacaatgaagataatccctttcaacaggctcaccatcggtgaagggcagcagcaccacctggggggtgcgaaacaggttaggccggaacatccagccgagacggagtatgatagcctgtatcccgaagacgatttg

SEQ ID NO: 11423 - DNA, 1359 bp, synthetic construct
  misc_feature 1..1359: note = source = /note="Description of Artificial Sequence: Synthetic coding sequence"
  source 1..1359: mol_type = other DNA
atgtcttggtccctccatcctcgcaatcttattctctatttttatgcacttctgttcttaagttccacatgtgtggcttacgtcgcgactcgcgacaattgctgcatcctggatgaaaggttcggcagctattgtccgacgacatgcgggattgcagacttcctttctacataccaaacaaaagtcgataaagacttgcagagtttggaagatatcttgcatcaggttgagaacaaaacatctgaagtaaaacagttaattaaagccattcaattaacgtacaatccggatgaatcgtcgaaaccgaatatgatagatgcagcaacattgaagtcaaggaaaatgttagaggaaattatgaagtacgaggcatcaattttaacgcacgatagctcgatccgttacttacaagagatttacaattctaacaatcaaaaaattgttaacctcaaagaaaaagtagcacaattggaagcgcagtgccaggaaccttgtaaagacactgtccaaatccatgacatcacaggcaaagattgtcaagatatcgcgaataagggagccaagcaaagtggtctctactttatcaaaccgcttaaagcaaatcaacagttcttggtctactgcgagattgatggttccggcaatggctggacggtctttcagaagagacttgacgggagtgtggatttcaagaaaaattggatccagtataaagaaggctttggtcatttgtcaccgacaggaaccaccgaattttggctcggcaatgaaaaaattcatttgattagcacccaatccgcaattccgtatgcgttgagagtggagttggaggactggaatggtcgaacatcaaccgcagattatgcaatgtttaaagtaggtcctgaggcagacaaatatagattaacctatgcgtatttcgcaggaggggacgcgggtgacgcattcgatggttttgattttggagatgatccatcggacaaattctttacgagccataatggcatgcaatttagcacatgggacaatgataacgacaaattcgaaggtaattgcgcagagcaggatggatctggctggtggatgaacaaatgccatgccggacacctgaacggggtctactatcaaggcggaacctatagcaaagcttctactccaaatggctatgataatgggattatttgggcaacctggaaaacacgctggtatagcatgaagaaaaccaccatgaaaattataccatttaatcgcttgacgatcggtgaaggccaacagcatcatctagggggggccaagcaggtcaggcccgagcacccagcagaaacagaatatgactccctgtatccagaggatgaccta

SEQ ID NO: 11424 - DNA, 1359 bp, synthetic construct
  misc_feature 1..1359: note = source = /note="Description of Artificial Sequence: Synthetic coding sequence"
  source 1..1359: mol_type = other DNA
atgtcctggtccttgcaccctagaaacctgatcctttatttctatgccttactgttcctttcaagcacctgtgttgcttatgtcgcaacacgggacaactgctgtattcttgatgagcggtttggctcgtattgccctaccacgtgtggcatcgcagactttttgtctacatatcagaccaaagtggacaaggacctgcagtcacttgaggatattcttcaccaggtggagaataaaactagtgaggtgaaacagttgataaaggcaatccagctgacatacaatccggacgagagctcaaaaccaaatatgattgatgccgcgacgctgaagtcaagaaagatgttggaagagattatgaagtacgaggcctctattctgacccacgattcctcaatccggtacttacaggaaatttataacagtaacaaccagaagatcgttaatttaaaagaaaaggttgcccagttggaggcacagtgtcaggagccatgcaaagacacggtacagattcacgatatcacggggaaagactgccaggatatagccaacaagggagcgaagcagtccggattgtactttatcaaacccttaaaagccaaccagcagtttcttgtgtactgcgaaattgacggcagtggcaatggctggactgtgttccagaagaggctagacggctccgtcgatttcaagaagaactggatccagtacaaggaaggttttggacatctgtcccccacaggaacaacagagttctggcttggtaacgaaaagatccacctcataagcacacagagcgctatcccgtacgccttaagagtcgagttagaggactggaacgggagaaccagcaccgccgactatgcgatgttcaaagtgggcccggaagctgataaatataggttaacgtatgcctactttgctgggggcgacgcaggggacgcatttgatggttttgactttggggacgatccatccgacaagttcttcacatctcacaacggaatgcagttctctacttgggacaatgacaatgacaagtttgagggcaattgtgctgagcaggatggcagtggctggtggatgaataagtgccacgctggacacttgaatggggtttattaccaggggggcacatactcaaaggcgagcaccccaaatgggtatgacaatgggataatatgggccacatggaaaacccgatggtattccatgaagaaaaccaccatgaagatcattccttttaatcgactaaccattggtgagggccagcaacaccacctcggtggggcaaaacaggtgaggccagaacatcccgccgagaccgaatacgactcactgtatccagaggacgatctc

SEQ ID NO: 11425 - DNA, 1359 bp, synthetic construct
  misc_feature 1..1359: note = source = /note="Description of Artificial Sequence: Synthetic coding sequence"
  source 1..1359: mol_type = other DNA
atgtcctggagtcttcacccgagaaatttgatcttgtacttttatgcacttttattcctgagttctacttgtgttgcctatgtggcgacccgagacaactgctgcatcctggacgagaggtttgggagctattgtcccacaacttgtggcatcgctgattttctttcgacgtatcaaacaaaggttgataaggacctccagagcctggaagacattctgcatcaagtggaaaacaagacgtcagaagttaaacagctgattaaggcaattcagctgacctataatccagatgagagctcaaagcccaacatgattgatgccgcgacccttaagtcacgtaagatgctcgaggagatcatgaaatacgaagcctccatactgacgcatgacagttcgattcggtatctgcaagagatctacaactcaaacaaccagaaaatcgtaaacctgaaagaaaaggtggctcagctcgaggcacagtgccaagagccatgcaaggacaccgtgcagatccatgacataaccgggaaggactgtcaagacatcgccaacaagggagcgaagcagtccggactctatttcatcaagcccttgaaggcaaatcagcagtttctggtttactgtgagatcgatggaagcggaaacggatggacagtgtttcagaagcggctggacgggtccgtggacttcaagaagaattggattcaatataaggaagggttcggccacctctcccccactggtaccacagaattctggcttggaaacgagaaaatacatctgatcagtactcaatccgcgatcccatatgctctacgggtggagctggaagattggaatggccgaacaagcacagcagactacgctatgttcaaggtaggcccagaggctgacaaataccgcctaacatatgcgtacttcgccggaggggatgcgggggacgccttcgacggctttgattttggcgacgaccccagtgataaattctttacctcacacaatggaatgcagttttctacatgggacaatgataatgacaagtttgaaggcaactgcgcagaacaagatgggagcgggtggtggatgaacaagtgccatgccggccatttaaatggcgtctactatcaaggcggcacatacagtaaggcaagcacccctaatggatatgacaacggcattatatgggcaacgtggaagacacggtggtattccatgaagaaaaccaccatgaaaatcatacccttcaataggctgactatcggcgaagggcagcagcaccacctcggtggcgctaagcaagtgagacccgaacaccccgcagaaacagagtacgattccctatatcccgaggatgatctc

SEQ ID NO: 11426 - DNA, 1359 bp, synthetic construct
  misc_feature 1..1359: note = source = /note="Description of Artificial Sequence: Synthetic coding sequence"
  source 1..1359: mol_type = other DNA
atgtcctggagcctgcaccctcgcaatctcatcctttacttctacgccctcctcttcttgagtagtacctgtgtcgcctacgttgccaccagagacaactgctgtatcctcgacgagaggttcggctcctactgtccaaccacttgcgggattgcggacttcctctctacataccagactaaagtggacaaggaccttcagagcctggaagatatcctgcatcaggttgagaataagacaagcgaggtgaagcagctgataaaggctatccagctcacctacaatccagacgagtccagcaagcccaacatgatagacgccgccactctgaaaagtcgaaagatgttggaggagatcatgaagtatgaagcatcaatcctgacacacgacagctccatccgctatctgcaggaaatttacaattctaataaccagaagatcgtcaacctgaaggagaaagtagcccaactcgaggcacaatgccaggagccctgtaaggacaccgtacagattcacgatattactggtaaggattgccaagacatcgccaacaagggtgcaaaacagtccggtttgtacttcatcaagccgctgaaagccaaccaacaattcctggtttactgtgaaatcgatggctctggcaatggctggactgtcttccagaagcgactggacggaagcgtcgacttcaaaaagaattggatacagtataaggaggggtttggacatctgtccccaaccggaacgactgaattctggctgggaaacgagaagattcatctgatcagcacccagtccgcaattccctatgcactcagagtggaattggaggactggaacggccgcacatccacagctgattatgcaatgttcaaggtgggacccgaggctgataagtataggctgacttatgcctatttcgccgggggtgatgctggggacgcttttgatggattcgactttggagacgacccatctgataagtttttcacgagtcacaacgggatgcaatttagtacctgggacaacgataatgacaaattcgagggaaattgcgccgaacaggatggcagcggttggtggatgaacaaatgccatgccggccatctgaatggggtatattatcaggggggcacttattccaaggctagtactcctaatggttatgacaacggtattatctgggccacctggaagactaggtggtattctatgaagaaaactaccatgaaaatcatcccgtttaaccgactgacgatcggggagggtcagcagcatcatctcgggggggcgaaacaagtgcggcccgaacatcctgcggagactgaatacgatagcctctatccagaagacgatctg

SEQ ID NO: 11427 - DNA, 1359 bp, synthetic construct
  misc_feature 1..1359: note = source = /note="Description of Artificial Sequence: Synthetic coding sequence"
  source 1..1359: mol_type = other DNA
atgagttggtctctgcaccctagaaatctaattttgtacttttatgccctgctttttctgtcgtctacttgcgtggcatacgtggcaactagagacaattgttgcattttggacgagcggttcggatcatattgccctaccacttgcggaatagcagactttctgtccacctatcagacaaaggttgataaggatttgcagagcctcgaggatattctccaccaggtcgagaataaaacatcagaggtcaagcagttgattaaagccatacagttgacttataaccccgatgagtccagcaagcctaatatgatcgacgccgccacactgaagtctcgcaagatgttggaagagatcatgaagtatgaagctagtattctcacccacgattcatcgatccggtacctgcaagagatatataatagtaacaaccagaaaatcgtgaatttgaaggagaaggtagcacagctagaggcccagtgtcaggagccttgtaaggatactgtacagattcacgacattacaggaaaagattgccaggacattgcgaacaaaggcgccaaacagagcggcctgtactttatcaagccgctaaaagccaaccagcagttcctcgtatactgtgagatcgacggatccgggaacggctggaccgttttccagaaacgtctcgatggctctgtagacttcaaaaagaactggatccagtataaggaagggtttgggcacctaagtcctaccgggactacggagttttggcttgggaacgagaaaatccacctcatctctacccagagtgcaattccctatgcgctgcgggtagagttagaggactggaacggtagaacctcgacagccgattacgcaatgttcaaggtgggcccggaggcggacaaatatcggctgacttatgcctactttgccggcggcgacgcaggggatgccttcgacggatttgatttcggagatgatccttccgacaagttttttacttctcacaacggcatgcagttcagtacatgggataacgacaatgacaagtttgagggtaactgtgcggagcaagacggatcaggttggtggatgaataaatgtcatgcaggccaccttaatggagtttactaccagggcggcacgtactccaaagccagtacccctaacgggtacgataatggtattatatgggctacatggaaaacaaggtggtattctatgaaaaaaaccacaatgaagataattccttttaatcggctgactattggtgaaggtcaacaacaccacttgggcggggccaagcaagttcgtccggaacaccctgctgaaactgagtatgattcattataccccgaggatgacttg

SEQ ID NO: 11428 - DNA, 1359 bp, synthetic construct
  misc_feature 1..1359: note = source = /note="Description of Artificial Sequence: Synthetic coding sequence"
  source 1..1359: mol_type = other DNA
atgtcttggtcgctacacccccggaacctcatcctgtatttttacgctttgctgtttctatcaagcacatgcgtggcttatgtggccacacgcgacaactgctgcattctagacgaaagatttgggtcatattgccctactacctgtggcattgccgatttcctgtccacctaccagacgaaagtcgataaagacttgcagagcctggaagatatcctgcatcaggtcgagaataagacctccgaagtgaaacagcttataaaagctatccagctgacatataatcccgacgagtcctccaagccaaacatgattgacgccgctacactgaagtccaggaagatgctcgaggagattatgaagtatgaggcttctattctgacccacgattccagcatccggtacttacaggagatctataactcaaacaaccagaagattgtgaatctgaaggagaaggtggcccagcttgaagcgcagtgtcaggagccatgtaaggataccgtgcagattcacgacatcacggggaaggactgccaagatattgctaacaagggcgcaaagcagagcgggctgtactttatcaagccactcaaagccaaccaacagttcctggtgtactgtgaaattgatggatcgggcaacggttggacagtgtttcaaaagcggctagatgggagcgtggattttaagaaaaactggattcagtataaggaaggctttgggcaccttagccccaccggcactacagaattttggctcggaaacgaaaagatacatctgatcagcacgcagtccgccataccttatgccttgagggtggagttagaagactggaatggaaggacctcaaccgctgactatgcaatgttcaaagtgggacctgaggcagataagtaccgtctgacttatgcctattttgccggaggagatgccggggacgccttcgacgggtttgattttggagatgatccttcagacaagttttttacttctcacaacggcatgcagttttcaacatgggacaacgacaacgacaagttcgagggaaattgtgccgaacaggatggcagcggctggtggatgaacaaatgtcacgccggccacctgaatggagtgtactaccagggagggacatactccaaagcgtctacgcctaatggttacgacaatgggatcatctgggccacgtggaaaacaaggtggtactctatgaagaagactacaatgaaaatcatcccgttcaacagactcacgatcggcgaagggcagcagcaccacttgggtggtgctaagcaagtcaggcccgagcatcccgccgaaacggaatacgatagtttgtaccctgaggatgacttg

SEQ ID NO: 11429 - DNA, 1359 bp, synthetic construct
  misc_feature 1..1359: note = source = /note="Description of Artificial Sequence: Synthetic coding sequence"
  source 1..1359: mol_type = other DNA
atgagttggtcattgcatcctaggaacctcatcctgtatttttacgccctcctctttttgagctcaacctgtgtagcttacgtggccacccgggacaattgttgcatcctggatgaacgcttcggctcatactgcccaaccacctgtggtatcgcagactttttgtcaacctaccagaccaaggtcgacaaggacctccaatcgctggaagacatcctacatcaagttgaaaataaaacatcagaggtgaaacagctgatcaaggctatccaattaacttacaacccagatgagagtagtaaaccaaatatgatcgacgcggcaactcttaagagccgtaagatgctggaggagatcatgaaatacgaggcttccatcctgacccacgattcaagcatcagatacctgcaggaaatctacaattccaacaaccaaaaaatagtgaaccttaaggaaaaggtggcccaactcgaggctcaatgccaggaaccatgcaaagataccgttcagatccacgacattaccggcaaagattgccaagatattgcgaataagggtgctaaacagtctggactttattttataaaaccacttaaggcaaaccagcaatttctcgtgtactgcgagatcgatggtagcgggaacggctggactgtcttccagaagcgccttgatgggtctgtcgacttcaaaaagaactggatccagtataaagaggggttcggtcacctgagcccaacgggaacaactgagttctggctcgggaacgaaaagatccatctgatcagcacccaatccgccatcccgtatgcactgcgcgttgagctggaggactggaacggaaggacatctactgccgattacgcaatgttcaaggtcggaccagaggctgataagtacagactgacttacgcttacttcgctgggggggacgctggcgatgccttcgacggattcgattttggagacgatccttccgataaattctttacatcacacaacggcatgcagttcagtacctgggataacgacaacgacaagttcgagggcaactgtgccgagcaggatggcagcggctggtggatgaacaaatgtcacgcaggccacctgaacggagtttactaccaggggggcacctacagtaaggccagcacccccaacgggtatgacaatggcatcatctgggccacttggaaaaccagatggtattccatgaagaaaactactatgaaaatcatcccctttaatcgccttacaatcggggaaggccagcagcaccacctgggaggagccaagcaggtgagaccagaacatccagccgaaacagagtatgatagcctgtaccctgaagatgatctt

SEQ ID NO: 11430 - DNA, 1359 bp, synthetic construct
  misc_feature 1..1359: note = source = /note="Description of Artificial Sequence: Synthetic coding sequence"
  source 1..1359: mol_type = other DNA
atgagctggtccctccacccgcggaatcttattctgtacttttatgcacttctcttcctgtccagcacctgcgtggcctacgtagcaaccagagacaattgctgtatcctggatgaaaggttcggatcgtactgccccaccacctgcgggatcgctgactttcttagcacctaccagacgaaggttgataaggatctgcagagcctcgaggacatactgcaccaggttgagaataagacttccgaggtgaagcagctaattaaggcaatacaactgacctacaatccggacgagagcagtaagccaaacatgattgatgctgccacactcaaatctcggaaaatgctagaggaaataatgaaatacgaagcgagtattctgacacatgattccagcataagatacctgcaagaaatctataatagtaacaaccagaaaatcgtgaatctgaaggaaaaagtggcacagcttgaagcacagtgtcaggagccttgcaaggacactgtccagatacatgacatcactggaaaagattgccaggacatagcgaacaagggagcaaagcagagcggactctatttcataaaacccctcaaagccaatcagcagttcctcgtttattgcgagattgatggaagcggaaacggttggactgtgtttcagaagcggctcgacggctccgtagatttcaaaaaaaactggatccagtacaaggaaggttttggtcatctgtcccctactggaaccacagagttttggttgggaaacgagaagatccatcttatctccacccagagcgccattccttatgcccttagagtggagctagaagactggaatggacgcacgtcaactgcggattatgccatgttcaaagtgggccctgaagcagacaagtatcggctgacctatgcatattttgctggcggagatgctggagacgccttcgacggttttgatttcggagacgatcctagcgataagtttttcacatcacacaacgggatgcagttcagcacatgggataacgacaatgacaagtttgaggggaattgcgcggagcaggacggatcaggatggtggatgaataagtgtcacgctggtcacctgaacggcgtctattaccagggaggaacctactcaaaagcctctactcctaacggctacgataatggtatcatatgggcaacatggaaaacacgctggtactccatgaaaaaaaccacaatgaagatcatacccttcaaccgattgaccataggcgaagggcagcaacaccacttagggggggcgaagcaggttcggccagaacaccctgcggagacggagtacgatagtttgtacccagaggatgatctt

SEQ ID NO: 11431 - DNA, 1359 bp, synthetic construct
  misc_feature 1..1359: note = source = /note="Description of Artificial Sequence: Synthetic coding sequence"
  source 1..1359: mol_type = other DNA
atgtcatggtctttgcatcccaggaatctgatcttgtacttctatgctctcctcttcctctcttcgacttgcgttgcctacgtggccacacgagacaattgttgcatcttagatgaaagattcgggtcctactgtcctaccacctgtgggattgccgatttcttatcaacataccagaccaaagttgataaggacctacagagtcttgaggacatcttgcaccaagtcgagaataagacgtcagaagtgaaacaactgattaaggctatccagctgacctataacccggatgaatcttcaaagcccaacatgatcgacgccgccacactgaagtcgcgtaagatgcttgaggaaatcatgaagtacgaggctagcatccttacccacgattcgtccatccgatacctacaggaaatctacaacagcaacaaccagaagattgtcaatctcaaagagaaagtggcacagttggaagctcagtgtcaggagccttgcaaggataccgtccaaatccacgacatcactggcaaggactgtcaagacatcgcaaacaagggcgctaagcagtccgggctctacttcattaaacccctgaaggctaaccagcagttcttagtgtattgcgaaattgatggctcaggaaatggctggactgtgtttcagaaaaggctggatggatccgtggacttcaaaaagaactggatccagtacaaagagggcttcggccatctaagtcccaccggtactacagagttctggcttggcaacgaaaaaatccacctcatctctacgcaaagcgctataccctatgctctccgggtggagctcgaagattggaatgggaggacctctacagccgattacgctatgtttaaggtgggtcctgaggccgacaagtatcggctgacctacgcttattttgcaggaggggacgccggggatgcatttgatggattcgactttggggacgacccttctgacaagttctttacaagccacaacggaatgcagttttcaacatgggataacgacaatgacaagttcgagggtaattgcgcagagcaggacggttcgggatggtggatgaataaatgtcacgctgggcatctcaacggcgtctactaccagggtggcacctactcgaaagcgtctacaccaaacggttatgataacgggataatctgggccacttggaaaactagatggtattccatgaaaaagaccaccatgaaaataatcccgtttaacaggcttactattggcgaggggcagcagcatcacctcggcggtgcaaagcaagtgagaccagaacatcccgctgaaacagagtatgactctttgtaccctgaggatgacctc

SEQ ID NO: 11432 - DNA, 1359 bp, synthetic construct
  misc_feature 1..1359: note = source = /note="Description of Artificial Sequence: Synthetic coding sequence"
  source 1..1359: mol_type = other DNA
atgagctggagcctgcatcctcgaaacctgatcctctacttctacgccctgctgttcctgtcatccacatgtgtggcttatgtcgctacaagggacaattgttgcatcctggacgagcgctttggatcatactgccccaccacatgtgggatcgctgacttcttaagcacatatcagaccaaggtagacaaagacctacaaagtctcgaggacattctccaccaggtagagaataagactagcgaagtcaagcagttgatcaaggccatccaattgacatataatcccgatgagtcctctaagcctaacatgatcgatgccgccactttaaaatcacggaagatgcttgaggagatcatgaaatacgaagcttccatactgacacacgactccagtattcgttacttgcaggaaatctataattctaacaatcagaagatcgttaacctgaaggagaaggttgcgcagcttgaagcccagtgccaggaaccttgcaaggatacggtccagatccacgatatcactggcaaggactgccaggatattgccaataagggggcaaagcagagtgggctttacttcattaaacctctaaaagccaatcagcaattcctggtgtactgcgagatcgacggtagcggcaacgggtggaccgtcttccagaagagactcgacggatcggtcgatttcaaaaagaactggattcagtacaaagaaggatttggccatctctccccaacaggcactaccgagttttggcttggcaacgagaagatccatctgattagtacccaatcagctatcccatatgccctgcgggtggaattggaagactggaacggccgcacttccacggccgactatgccatgttcaaagtgggcccagaagctgacaagtatagactgacttatgcatacttcgctggaggcgatgctggtgatgccttcgacggctttgacttcggggatgatccgagtgacaagttcttcaccagtcataacggcatgcagttctccacttgggataatgataatgataaattcgaaggcaactgtgccgaacaggatggtagtggatggtggatgaacaagtgtcatgctggccacctgaacggcgtttattatcagggaggcacgtactcaaaggcctccactcccaatggatacgataatggaataatctgggccacatggaaaactcgctggtactctatgaagaagacaaccatgaaaattattcccttcaaccgactaacgattggggagggtcaacagcaccaccttgggggcgctaagcaggtccgtcccgagcatcctgccgagacagagtacgacagcctatatcccgaggacgatctg

SEQ ID NO: 11433 - DNA, 1359 bp, synthetic construct
  misc_feature 1..1359: note = source = /note="Description of Artificial Sequence: Synthetic coding sequence"
  source 1..1359: mol_type = other DNA
atgagttggtcactacatccaagaaacttgattctgtacttttacgccctgttgtttctgtcctcaacctgtgtggcatacgtagccacgcgcgataactgctgcatactcgacgagcggtttggctcatactgtccaactacttgcggtattgcagattttctatcaacttaccagaccaaggtcgataaggacctccagagcctggaagacattctgcaccaggttgaaaacaaaactagcgaagtcaaacagttgatcaaggccatccagctaacatacaaccctgacgagtcttcgaagccgaatatgatcgacgctgcaaccttgaaatcacgaaagatgctcgaggaaataatgaagtatgaggcctctatactcacccacgactcttccataaggtatctccaggagatttataactctaacaaccagaaaattgttaacttgaaggagaaggtggctcaattggaggcccagtgtcaggagccatgtaaggataccgtccagattcacgatataacgggcaaggactgtcaggacattgctaacaaaggagcaaaacagtccggcctgtacttcatcaagccgctgaaggctaaccaacagttcttggtttattgtgaaatagacgggagcgggaacggttggactgtctttcagaagagacttgatggaagcgttgatttcaaaaaaaactggattcagtataaagaaggctttggccacctctccccgactgggactacagagttctggctgggaaacgaaaaaatacatttgatctccactcaaagtgctataccttacgcactgcgggtcgagctggaggactggaacgggaggacatctactgcggattacgctatgttcaaagttggcccagaggccgataagtatcgactgacctacgcctatttcgccggaggagacgccggcgatgcctttgatgggtttgattttggagatgatccctctgacaaattcttcacatcccataatggaatgcagttctctacatgggataacgacaacgacaagtttgagggtaattgcgccgagcaggacggctccggatggtggatgaataaatgtcatgctggacatcttaacggggtctactaccaaggcggcacttatagcaaagcctccacgcctaacggctacgataacggtattatttgggccacatggaagacacgatggtatagcatgaagaagaccactatgaagattattccttttaacagactgacaattggggaaggtcagcagcaccatctgggcggcgccaagcaagtgaggccagaacatcccgcagagactgaatatgattccctatatcctgaggacgaccta

SEQ ID NO: 11434 - DNA, 1359 bp, synthetic construct
  misc_feature 1..1359: note = source = /note="Description of Artificial Sequence: Synthetic coding sequence"
  source 1..1359: mol_type = other DNA
atgagctggtccctgcacccgaggaatctgatcctctacttttacgcattactttttctttcgagtacctgtgtggcttatgtcgctactcgtgataactgttgcatccttgatgagaggttcgggtcctactgccctaccacatgcggaattgccgatttcctgtccacttatcagactaaagtggacaaagatctccagagcctggaagacatcttgcatcaagtggaaaacaagacgtccgaggttaagcagctgatcaaggcaatccagttgacttacaatcccgatgagagtagtaaaccgaacatgattgatgccgctacactcaaatccaggaagatgttggaagaaatcatgaagtacgaagcttctatcctgactcacgacagttccattagatatctccaagagatctacaactctaataatcagaaaattgtcaatctgaaggaaaaggtggcccagttggaggcacaatgtcaggaaccgtgtaaggacactgtgcagattcatgatatcaccggaaaagattgccaggatattgccaacaagggagcgaaacaatccgggttgtactttatcaagcccttgaaagcgaatcagcagtttctggtgtactgcgaaatcgacgggtcaggcaatggctggaccgtatttcagaaacggttagatgggtcagttgatttcaagaagaactggatccaatacaaagagggattcggccacctttcgcccaccggaacaacagagttctggctgggaaacgaaaagatccacctcatcagtacacagagcgctatcccctacgctttgagagtggaactggaggactggaatggcaggacgtctacagccgactatgccatgtttaaagttgggcccgaggccgataagtataggctgacgtacgcatatttcgcgggcggcgatgccggtgacgcctttgacggcttcgatttcggagacgatccctccgacaaattcttcactagtcacaacggcatgcagttctccacatgggataatgataatgacaaattcgagggcaattgtgccgaacaggatgggagcggctggtggatgaacaagtgtcatgctggccacctgaatggtgtgtattatcaagggggtacgtactctaaggcgagcacccctaacggctatgacaatgggattatatgggcaacgtggaagaccaggtggtattccatgaagaaaacaaccatgaaaattatcccgttcaaccgacttaccataggggaagggcaacaacaccacctaggcggggctaaacaagtcagaccagagcatccagccgagaccgaatacgattccctgtatccggaagatgatctc

SEQ ID NO: 11435 - DNA, 1359 bp, synthetic construct
  misc_feature 1..1359: note = source = /note="Description of Artificial Sequence: Synthetic coding sequence"
  source 1..1359: mol_type = other DNA
atgagctggagtctgcacccacgaaacctgattttgtatttttacgctctgctctttctcagctctacatgcgtggcatatgtcgccactcgagacaattgttgcattcttgatgagaggtttggcagttattgcccaacgacatgtggcatcgcggactttctctcaacctaccaaaccaaggttgataaggacctgcagtctctggaggatatccttcaccaagtagaaaacaaaacttccgaagtgaaacagctgattaaagctatccagttgacctataatcctgacgaaagctcaaagccaaacatgattgacgccgcaactttaaaaagtcgaaagatgctagaagagatcatgaagtatgaagcaagcatcctgacccacgattcatcaattcgttatctccaggagatttataattcaaataatcaaaaaatagtgaacttgaaagagaaggtggctcaattggaggcacagtgtcaggaaccctgtaaagatacggtccagatccacgatataactgggaaggactgccaggatattgccaacaagggcgctaagcagagtggtctgtattttattaagccgctgaaggcaaaccagcagtttcttgtgtactgtgagatcgacgggtccggcaatgggtggacggtgttccagaagcgtcttgatggctcagtggattttaagaaaaattggattcagtacaaagagggatttggacacctgagtccaacagggactaccgaattctggctcggtaacgaaaaaatacacctgattagtacccaatctgctatcccttatgctctacgcgttgagctggaagattggaacggccgcaccagtaccgcggattacgctatgttcaaggtgggcccagaggctgacaagtacaggctgacctacgcttattttgcaggtggcgatgcgggcgacgcgtttgacggttttgatttcggggatgatccctctgataaattttttacctcccataatggaatgcagttttctacatgggataatgataacgacaaattcgagggcaactgcgcagaacaggacggcagcgggtggtggatgaacaagtgccacgctggacatctgaacggcgtgtactaccagggcggtacctattcaaaagcctcaactcccaacgggtacgataacgggatcatctgggctacatggaagactagatggtatagcatgaagaagacaaccatgaagatcatacccttcaaccgtctgaccatcggggagggtcagcagcatcaccttggtggagctaagcaagttcgtcccgagcaccccgctgagaccgaatatgatagtctttaccctgaggacgacctg

SEQ ID NO: 11436 - DNA, 1359 bp, synthetic construct
  misc_feature 1..1359: note = source = /note="Description of Artificial Sequence: Synthetic coding sequence"
  source 1..1359: mol_type = other DNA
atgtcttggagcctgcacccgcgaaacctcattctgtatttctatgcactgttgttcttgtctagcacttgcgtggcgtatgtggctaccagggacaactgctgtattttggacgagcggttcggcagctactgtccaaccacatgtggtattgccgattttctgagcacctatcaaactaaagtggataaagatctccagtctctggaggacatactccatcaagtggaaaacaaaacctcagaagttaagcaactcattaaagctattcagctcacttacaatcctgatgaatcttccaagcccaatatgatcgatgctgcaacactcaagagtagaaagatgctggaagaaatcatgaaatacgaggccagcattcttactcacgactcaagtatcagatacctgcaagaaatctacaattccaataatcaaaagatcgtaaacctgaaggagaaagtcgcacagctggaagctcagtgtcaggagccctgcaaagataccgtccagattcacgacatcactggaaaggattgccaagacattgcaaacaagggcgccaagcagtctggcctgtacttcatcaagcctctcaaagcaaatcagcagtttctggtctactgtgagatcgacggctctggcaatgggtggactgtgttccagaaaagactggatggatccgttgactttaagaagaattggatccaatataaggagggctttggtcatctcagtcccaccggcacaactgaattttggctcggaaatgagaaaatccatctgatatctactcagtcagcgatcccgtacgcacttagggtggagctcgaagactggaatgggcgaaccagcactgcggactatgcaatgtttaaggtgggacccgaggccgataagtacaggcttacctatgcttactttgcagggggcgacgccggcgacgcctttgacgggtttgactttggcgatgatccctccgataaattctttactagtcacaacggtatgcagttcagcacatgggacaacgataatgacaagttcgaggggaattgtgccgagcaggacggttctggatggtggatgaacaagtgccacgcgggtcacctcaatggcgtgtactatcagggaggaacatacagcaaggccagtactccgaatgggtacgataacgggattatttgggccacttggaaaacccgatggtactcaatgaaaaagacgactatgaaaatcattccgtttaacagacttacaattggcgagggacagcagcaccatctgggcggagcaaaacaggtaagaccggagcaccctgccgaaaccgaatacgactccctgtacccagaagacgatctc

SEQ ID NO: 11437 - DNA, 1359 bp, synthetic construct
  misc_feature 1..1359: note = source = /note="Description of Artificial Sequence: Synthetic coding sequence"
  source 1..1359: mol_type = other DNA
atgtcttggtctttacatccaaggaatttaattttatatttttatgcacttttatttttatcatcaacttgtgttgcatatgtcgctaccagagataattgttgtattcttgatgaaagatttggaagttattgtccaacaacatgtggaattgcagattttctttcaacatatcaaacaaaggttgataaagatttacaatctttagaagatattcttcatcaagttgaaaataagacaagtgaagtaaagcaattaattaaagcaatacaacttacatataatccagatgaatcttctaaaccaaatatgattgatgctgctactcttaaatcaagaaaaatgttagaggaaattatgaaatatgaagcatccattttaactcatgattcatctattcgttatttacaagaaatatataattcaaataatcaaaaaattgtaaatcttaaagagaaagtagcacaacttgaagcacaatgtcaagaaccatgtaaagatactgttcaaatacatgatattacaggaaaagattgtcaagatattgcaaataaaggtgctaaacaatctggtttatattttattaaaccacttaaagctaatcaacaattcttagtatattgtgaaatagacggatcaggaaatggatggactgtatttcaaaaaagacttgatggatcagtcgattttaaaaagaattggattcaatataaagaaggattcggacatttatcacctacaggtactactgaattctggttgggtaatgaaaaaattcatttaatttcaactcaatctgcaattccatatgctttaagagttgaattagaagattggaatggtagaaccagtacagcagattatgcaatgtttaaggttggacctgaagcagataagtatagattgacatatgcttattttgcaggaggagatgcaggagatgcattcgatggttttgattttggtgatgatccatctgataaattttttacatcacataatggaatgcaatttagtacatgggataatgacaatgataaattcgaaggaaattgtgcagagcaagatggatccggatggtggatgaataagtgtcatgctggacatcttaatggagtttattatcaaggtggaacatattctaaagcatctactccaaatggatatgataatggaattatttgggcaacatggaaaacaagatggtattcaatgaaaaaaacaaccatgaaaattattccatttaatagattaacaataggagaaggacaacaacatcatcttggaggagcaaaacaagttagaccagaacatccagctgaaacagaatatgatagtctttatccagaagatgatttg

SEQ ID NO: 11438 - DNA, 1359 bp, synthetic construct
  misc_feature 1..1359: note = source = /note="Description of Artificial Sequence: Synthetic coding sequence"
  source 1..1359: mol_type = other DNA
atgtcatggtcactccatccaaggaatctgatcctctatttttatgccctcctattcttatcttctacatgcgtggcatatgtcgcgacacgcgataattgctgtatcttagatgagaggtttggatcctattgccctactacatgtgggattgccgattttttatctacatatcagacaaaagtggataaagaccttcagtcccttgaagacatcttacaccaggttgaaaacaaaacatccgaagtaaaacagctcatcaaagccatccagctaacatataaccccgatgaatcctcgaaacctaatatgatcgatgcggctacacttaaatctaggaagatgcttgaagaaatcatgaaatatgaggctagtatacttacacatgatagttccattaggtatttgcaggagatatataactcaaataaccaaaaaatcgtgaatctgaaagagaaagtggcacagctcgaggctcagtgccaggaaccctgtaaagatactgtgcagatacatgatattacagggaaagattgccaggatatcgcaaataaaggagctaaacagtcaggactatatttcataaaaccacttaaagcaaatcagcagtttctggtgtattgtgaaatcgatggaagtggaaatggatggactgttttccagaaacgtctcgatgggagtgtcgattttaagaaaaattggatccagtacaaagaaggattcggacacctgtcccccacaggaacaacagaattttggttagggaatgaaaaaatccacctaatctccactcagtccgcaattccctacgctttgagggtggaactggaagattggaacggaagaacaagtacagccgattatgcaatgttcaaagtagggccagaagctgataaatatcgccttacttatgcctatttcgcaggaggagatgccggggatgcattcgatggatttgatttcggagacgacccctccgacaaattcttcacttcccataatggaatgcagttttccacatgggataatgataacgacaaattcgaaggaaattgcgccgaacaggatggatccgggtggtggatgaataaatgccacgcaggacaccttaatggggtgtattatcaggggggaacatattctaaagcctctactccaaacggatacgataatgggattatatgggctacatggaaaactcggtggtattccatgaaaaaaactacaatgaaaatcatcccgttcaaccgactaacaataggagaagggcagcagcatcatctcgggggagccaaacaggttaggcctgaacatcctgctgaaacagaatatgattccctgtaccctgaagacgacctt

SEQ ID NO: 11439 - DNA, 1359 bp, synthetic construct
  misc_feature 1..1359: note = source = /note="Description of Artificial Sequence: Synthetic coding sequence"
  source 1..1359: mol_type = other DNA
atgtcttggtcactccatcctaggaatctaatcctatacttttatgccctgctcttcctcagctcaacctgcgtggcatacgtggctactagagataactgttgcattcttgacgagcgattcgggtcctactgcccgaccacctgcggcatcgctgatttcctgtccacataccagaccaaagtggacaaggatcttcagtcactggaggacattctccatcaggtggagaataagactagcgaggtcaaacagttaatcaaagccatccagctgacatacaatcccgacgaatcttctaagcctaatatgatcgacgccgcgaccctaaagtcccgtaaaatgctagaagagataatgaaatacgaggcttcaatactgacgcatgactcctccattcgctatctgcaggagatatacaactcaaataatcagaaaatcgtgaacctgaaggaaaaagtggcgcagctggaagcccagtgccaggagccatgcaaggacacggtccagattcacgatattaccggcaaggattgccaggacatcgccaacaagggggccaagcagtccggcctgtatttcattaaaccacttaaggcgaatcagcagtttctcgtttactgtgagatagacggatctgggaatggatggacggtgttccaaaaaaggctggacggatccgtcgactttaagaagaattggatccaatacaaagaggggttcgggcacctctccccaaccggaacgaccgagttttggctgggcaatgaaaaaatacacctgatctctacacagagcgccatcccctatgcccttcgcgtggaactggaagactggaacgggaggacatccaccgcagattacgcgatgtttaaagtggggcccgaggccgacaaataccgtctaacatacgcatatttcgcgggcggcgacgcgggagacgccttcgacgggttcgatttcggagatgatccttctgacaagttcttcaccagccacaacggtatgcaattctctacgtgggacaacgacaacgataagttcgaagggaactgcgcagaacaggatggcagcgggtggtggatgaacaagtgtcatgccggacatctgaatggagtgtactaccaagggggcacatattctaaggcaagcaccccaaatggctatgataatggcataatctgggcaacctggaagacccgatggtactcgatgaagaagaccacaatgaagattatcccctttaatagactgaccatcggcgagggacagcaacaccacctgggcggcgccaaacaggttcgacccgagcacccagccgagaccgagtatgactctctgtatccagaagatgacttg

SEQ ID NO: 11440 - DNA, 1359 bp, synthetic construct
  misc_feature 1..1359: note = source = /note="Description of Artificial Sequence: Synthetic coding sequence"
  source 1..1359: mol_type = other DNA
atgtcatggtcactccaccctcgaaaccttatcctttacttttatgctctgttgttcttaagttcaacttgcgtggcttatgttgcaacacgtgacaactgctgcatattggatgaaagatttggctcttactgcccaactacttgtgggatagccgacttcctgagtacttaccaaactaaagtcgacaaggatttacagtcattagaagacatccttcaccaagttgagaacaagacatctgaagttaagcagcttataaaggcaattcagcttacttataacccagatgagtcctcaaagcctaacatgattgacgcagcaactcttaaaagcaggaagatgttggaggagattatgaagtacgaggcttcaatcctcacccatgattcctcgataaggtatctccaagagatctacaattctaacaatcaaaaaattgttaaccttaaggaaaaagttgcccagttagaggcgcaatgtcaggaaccttgtaaggatacagtgcaaattcatgacattacagggaaagactgtcaagacattgcaaataaaggtgctaagcaatcaggactttactttattaagcctttgaaggccaaccagcagttccttgtttattgtgagatcgacggtagcggcaatgggtggacagtgtttcaaaaaaggcttgatgggagtgtcgattttaagaaaaattggatacaatataaggaggggtttggacatttatcgccaacaggaacaaccgagttttggcttggtaatgaaaaaatccaccttatttctacccaaagcgctattccgtatgctcttagggtcgagcttgaagactggaacggaaggacctcaacagcagattacgctatgtttaaagtgggacctgaagctgacaagtacaggcttacatatgcctattttgcgggaggtgatgctggggacgcattcgatggttttgattttggtgatgatccttcagataagttcttcacctcgcataatggtatgcagttttcaacttgggacaacgataacgacaagtttgaggggaactgcgcagagcaagacgggtcaggatggtggatgaacaaatgccacgctggacatctgaacggggtgtattatcagggagggacgtattcgaaagctagtacacctaacggctatgataatggcatcatctgggctacttggaagactcgctggtacagcatgaagaaaaccactatgaagatcataccttttaacaggcttactattggggaaggtcagcaacaccatttgggtggggcaaaacaggtccgtcctgaacatcctgcagagaccgaatacgactctttgtaccctgaggatgatctg

SEQ ID NO: 11441 - DNA, 1359 bp, synthetic construct
  misc_feature 1..1359: note = source = /note="Description of Artificial Sequence: Synthetic coding sequence"
  source 1..1359: mol_type = other DNA
atgtcgtggagccttcacccacgcaatttgatcctttatttctatgccctgttatttcttagtagcacatgcgtggcgtatgttgcaaccagggacaactgttgtatattggacgagcgcttcggatcgtactgccctacaacctgcggtatagctgacttcctgtcaacctatcagacaaaggtcgacaaagacctccagtcactggaagatattttgcatcaggttgagaataagacaagcgaagtcaaacaactgattaaagcgattcagctaacctacaatcccgatgaaagcagtaagcccaacatgatcgatgcggctacattaaagagccgcaagatgctggaagagattatgaaatacgaggcaagcatcctgacccatgacagtagtattcgctacctccaggagatctacaatagcaataatcagaagattgttaacctgaaggaaaaagtggcccaattagaagcacagtgtcaggaaccttgtaaggataccgtgcaaattcatgacattaccggcaaggattgccaagacatcgccaacaagggcgcgaaacaaagtggcctctatttcattaaacccctcaaggctaatcagcagtttctggtgtactgtgaaattgatgggagcggcaatggatggaccgtcttccagaaacgactggacgggagcgtggacttcaagaaaaattggattcagtacaaggaaggcttcggtcacctgtcccctacaggcacaacagaattctggctgggcaatgaaaagatccacctgatatctacacagtctgcaattccctacgctctgcgggtggagctcgaagactggaatggtcgcacgtctaccgcagattacgccatgttcaaggtcgggcctgaggctgacaagtatcgtctgacctacgcttatttcgctggtggggacgccggggatgctttcgacggattcgactttggtgatgacccttcagacaaatttttcactagccataacggcatgcagttttccacttgggataatgataatgataagtttgaaggaaattgtgcagaacaggatgggtcaggttggtggatgaacaaatgccatgcaggacacctgaacggggtttattaccagggcggtacttacagcaaagcttctactccaaatggctatgacaacggcattatttgggcaacttggaagactaggtggtacagcatgaagaagacgactatgaagattatcccctttaataggctgactataggcgagggccaacagcatcatttgggcggcgcaaagcaggtccgcccagaacatccggcagaaacagagtatgactcattatacccggaagacgatctt

SEQ ID NO: 11442 - DNA, 1359 bp, synthetic construct
  misc_feature 1..1359: note = source = /note="Description of Artificial Sequence: Synthetic coding sequence"
  source 1..1359: mol_type = other DNA
atgagctggagcctgcatcctaggaatctcatcctgtacttctatgccctgctcttcctctcctcaacctgcgtagcttacgtcgccacccgcgataattgttgcattctggacgaaaggtttggtagctactgtcccactacttgtggtatcgctgactttctctcaacttaccaaaccaaagtggataaggacctgcagtctctggaggacattttgcatcaggtggagaacaagacatccgaagttaaacagctgatcaaggccatacagttgacatataaccctgatgaatcatcaaagcctaatatgatcgatgctgctactctcaagagcaggaagatgctggaagaaatcatgaaatatgaggctagcattctgactcatgactccagcatcaggtatctgcaggagatttacaattctaacaatcagaaaatcgtcaacttgaaagaaaaagtggctcagctggaagcgcagtgccaagagccctgtaaggacactgtccaaattcacgatatcactggaaaagactgccaggacatcgcgaacaagggcgccaaacagagcggactgtatttcatcaagcctttgaaggccaatcaacaattcctggtgtactgcgaaatcgatggatccggtaacggatggacggtattccagaaaaggctcgatggctcagtggacttcaagaagaactggattcaatataaagaaggattcggacacctttctccgacgggcacgacagagttctggctcggcaacgagaaaatccacctcatctccacccagtctgccatcccatatgcattgagggtcgagttggaagattggaacggtagaactagcactgctgattacgccatgttcaaggttggccctgaggcggacaagtacagattgacttacgcctacttcgccggaggagatgccggcgacgcatttgacggtttcgacttcggcgacgatccatctgataagttcttcactagccataacggtatgcagtttagcacttgggacaacgataacgacaagttcgagggcaactgcgctgagcaggatggatcaggatggtggatgaacaagtgccatgcaggtcacttgaacggagtgtactaccaaggtggtacatactcaaaggcatctactcccaacggatacgacaacggtatcatttgggctacctggaagaccaggtggtactctatgaaaaagactacaatgaagatcataccatttaatcgcctcactattggtgagggccaacagcaccatctgggaggtgccaaacaagtgaggccagagcacccagctgagaccgagtatgattccctgtaccctgaggacgacctt

SEQ ID NO: 11443 - DNA, 1359 bp, synthetic construct
  misc_feature 1..1359: note = source = /note="Description of Artificial Sequence: Synthetic coding sequence"
  source 1..1359: mol_type = other DNA
atgtcctggtcgctgcacccaaggaatcttatactgtatttctacgcattactgttcttgtctagcacctgcgtggcctatgtagccacaagggataattgttgcatcctggacgagcgctttggaagctactgcccgaccacatgcgggatagcagacttcctatccacataccagaccaaggtagataaagacctgcagtccctggaggatatcctgcaccaggtcgaaaataaaacctccgaggttaaacagctgattaaagccattcagctcacatacaaccctgatgaatcgtcaaaaccgaatatgatcgatgcggccacattaaagagtcggaagatgctggaggaaattatgaagtacgaggcctccatactgacccacgactctagtatcagatacttgcaggaaatctacaactctaacaaccagaaaatcgtgaatttgaaagagaaggtggctcagctggaagcccaatgccaggaaccctgtaaagataccgtgcagattcatgatatcactggcaaagattgtcaggacattgccaacaagggtgccaagcagagcggcctctacttcattaaaccattaaaagctaatcagcagtttctggtgtactgtgagattgatggatcggggaacggttggaccgtctttcagaaaagacttgacggctcagttgactttaaaaagaactggatccagtacaaagaaggcttcgggcatctatcaccgaccgggaccacggaattttggctgggcaatgagaagatccacctgatcagcacacagtcagcaataccgtatgcacttcgagtcgagttagaagactggaacgggcgcaccagtaccgccgactatgcaatgttcaaggtgggacctgaagccgataagtaccgattaacctatgcctacttcgccggaggtgacgcgggagacgcatttgacgggttcgacttcggcgatgatccctcggataagttctttacttcgcacaatggaatgcagttttccacttgggacaatgataatgataaatttgagggaaactgcgcagaacaagacggatcgggctggtggatgaacaaatgtcacgcagggcatctgaatggtgtgtactaccagggcggtacctattccaaggcttctacccccaatggatacgacaacggcattatctgggccacctggaagacaaggtggtactccatgaagaaaacaacgatgaagatcattccctttaatcgccttaccataggcgagggacagcagcatcacctcggcggggcgaagcaagtgcggcccgagcacccagccgaaactgagtacgacagcctctaccccgaagatgatttg

SEQ ID NO: 11444 - DNA, 1359 bp, synthetic construct
  misc_feature 1..1359: note = source = /note="Description of Artificial Sequence: Synthetic coding sequence"
  source 1..1359: mol_type = other DNA
atgtcttggagtctgcaccccagaaaccttatcctgtacttttacgcccttctattcctgtcctcaacttgcgtggcgtatgtggcgacaagggataattgctgcatcctggatgagcgatttgggagctactgtccaactacctgcgggattgctgactttctgtccacgtaccaaaccaaggtggataaagatcttcagagtttagaggacatccttcatcaggtggagaataagaccagcgaggtgaaacagctgatcaaggccatccagctgacttataaccccgacgaatctagcaaacccaatatgatcgacgcggcaacactcaagtcccgcaagatgctcgaggagatcatgaagtacgaggcgagcatactgacccatgattccagtatccggtatctccaggagatctataactctaataatcagaagatcgtgaacctcaaggagaaggttgcccagcttgaagctcagtgtcaagagccctgcaaggacaccgtgcagattcacgatatcaccgggaaggattgtcaggacattgccaataagggtgcaaagcagtcaggactctactttattaaacctttgaaagcaaatcagcagtttctggtctattgcgagatcgacggatcaggcaacggctggacggtattccaaaagagacttgacgggagcgtggactttaaaaagaattggatccagtataaggaaggtttcggtcacctctccccgacaggcacgactgagttttggctcggtaatgagaagattcaccttatttccacacagtcagcgattccttacgctctgagagttgagctagaggattggaacggcagaactagcacggcagactacgcgatgttcaaagtgggtccagaagcagacaagtacaggctaacgtatgcgtatttcgccggtggggatgcgggcgacgcctttgatggcttcgatttcggggacgatccaagcgacaaatttttcacctcacataacgggatgcagtttagcacttgggataatgataatgataagttcgaaggaaattgtgcggaacaggacgggtctggctggtggatgaataaatgccatgcgggccatcttaacggagtttattatcaggggggcacatactcaaaagcctccaccccgaacggttatgacaacggcatcatttgggccacctggaaaacccgctggtacagcatgaagaagactactatgaagattataccctttaaccggctgaccatcggggaggggcagcaacatcacctgggcggcgcaaaacaggtgcgtcccgagcatccagccgagactgagtacgattctctgtatcctgaggacgatctc

SEQ ID NO: 11445 - DNA, 1359 bp, synthetic construct
  misc_feature 1..1359: note = source = /note="Description of Artificial Sequence: Synthetic coding sequence"
  source 1..1359: mol_type = other DNA
atgagctggtctctgcaccctcggaatctaatactctacttctatgctctgctctttttgagctccacttgtgtagcgtacgttgcaactagagacaactgctgcattctagatgagagattcggttcctattgcccgacgacttgtggcattgctgactttctgagtacgtatcagaccaaagtcgacaaggatcttcagagtctggaggatatacttcaccaggtggagaacaaaacaagtgaggtgaagcagttgattaaggccatacagctgacctataatccagacgaatcatctaagccaaatatgattgatgcagctaccctgaaatcaagaaagatgctggaggagattatgaaatatgaggctagcattctgacccatgatagtagcatccggtacctgcaggagatatataacagcaataaccagaagatcgtgaacttgaaagagaaagtggcacagctcgaagcccagtgccaggagccatgcaaggacaccgttcaaattcacgatatcaccggcaaggactgccaggatatagcgaacaagggtgcaaaacagtctgggctctacttcataaaacctctgaaagctaaccagcagttcctggtgtactgtgagatcgacggaagcggaaacgggtggactgtcttccagaagagactcgatggatctgtggacttcaaaaaaaattggatccaatataaagagggctttggccatttatcgcccacaggcactaccgagttttggctgggcaatgaaaagatccacctgataagcacccagagtgctatcccatacgcgttgagagtcgagctggaggattggaacggccgtacgtcaaccgctgattatgccatgtttaaggtcggcccagaggcagataagtaccgactcacctacgcttatttcgccggtggggatgctggtgacgcttttgatggcttcgactttggagatgacccaagcgacaaatttttcactagccacaacggaatgcagttctccacctgggataatgataacgacaagtttgagggaaactgcgcggagcaggacgggtccggctggtggatgaataagtgccacgcaggccacctgaacggcgtctactatcagggagggacttacagcaaggcctctaccccgaatggatatgacaatggcattatttgggctacttggaaaacaagatggtactctatgaagaagacaacaatgaagattatcccctttaacaggctcactatcggcgagggccagcagcaccatctggggggagcaaaacaagttcgccccgagcacccagccgaaacggagtatgatagcttgtaccccgaggatgatctg

SEQ ID NO: 11446 - DNA, 1359 bp, synthetic construct
  misc_feature 1..1359: note = source = /note="Description of Artificial Sequence: Synthetic coding sequence"
  source 1..1359: mol_type = other DNA
atgtcgtggagcctgcacccacggaacctgattctgtatttctatgcattactatttctgagcagcacctgcgtggcatacgttgctacacgtgacaattgctgcattcttgatgaaagattcggctcatattgcccgacgacctgcggcattgcggattttctgagcacttatcagaccaaggtcgataaggacctgcaatccctggaggacatcctgcaccaggtcgaaaacaagacctctgaggtgaaacagctgatcaaagctattcaattgacctataatccggacgagagctctaaacctaatatgatcgacgccgcgacgctgaagagccgcaagatgctggaggaaattatgaaatacgaggcgagcatccttactcatgatagctctattcgctatctccaagaaatctacaattccaataaccaaaagatagtcaacttgaaggagaaagtggctcagctggaggcacagtgccaggaaccttgtaaggataccgttcagattcatgatatcacaggcaaggattgtcaggacatcgctaataagggggcgaagcagtctggcttgtatttcatcaagcctctgaaggcgaatcaacagttcctggtgtactgcgaaattgatggctctggcaatggatggacggtttttcagaaacgattggacggtagcgtggatttcaagaaaaattggatccaatacaaagaaggctttggccatttgagtccgaccggtaccacggagttctggctggggaatgagaaaatccacctgatctctacacaaagcgccatcccatatgctttgagggtcgaactggaggactggaacggccgtacgagcactgcggactatgcaatgtttaaagtcggtcctgaggcggacaaataccgcttgacctatgcgtactttgctggcggtgacgcaggcgacgccttcgacggttttgatttcggtgatgatccaagcgataagtttttcacttcgcacaatggcatgcagttttctacctgggacaatgacaacgacaagttcgagggtaactgcgcagaacaggacggtagcggctggtggatgaacaaatgccatgccggtcacttgaacggagtctactaccagggtggtacctacagcaaagcttcaaccccgaatggttacgacaacggtatcatctgggcgacttggaagactaggtggtacagcatgaagaagaccacgatgaaaatcatcccgtttaaccgactgacgatcggtgagggtcagcagcatcaccttggtggagcgaagcaagtccgtcctgagcatccagctgaaaccgaatacgatagcctgtatcctgaagatgactta

SEQ ID NO: 11447 - DNA, 1359 bp, synthetic construct
  misc_feature 1..1359: note = source = /note="Description of Artificial Sequence: Synthetic coding sequence"
  source 1..1359: mol_type = other DNA
atgagctggtccctacatccgcgcaatctgatattgtacttttatgccctgcttttcctatcctcaacttgcgtggcctacgtcgctacacgggacaactgctgcattctcgacgagcgcttcggaagctattgcccaacaacctgcggaattgcggacttcttgtctacctatcagaccaaggtcgacaaggacctgcagtctctggaggacatcctgcaccaggtggaaaacaaaacatcggaggtcaagcagctgatcaaagcaattcagctgacctacaatcccgatgagagctccaagcctaacatgatcgacgccgcaacccttaaatccaggaaaatgctcgaggaaatcatgaaatacgaagccagcatactgacccacgattcatctatacggtacttgcaggagatttacaattccaataatcagaagatagtgaacctgaaagaaaaagtggcccagctggaggcccagtgtcaggagccatgcaaggacaccgttcagattcatgatatcactggtaaggattgccaggatatcgccaataaaggcgccaaacagtctggcttgtactttataaaaccactcaaagccaatcagcagttcctggtgtactgtgaaatagatggctcgggaaatggatggaccgtgttccagaagcgtctggatgggtcggtcgacttcaaaaaaaactggatccaatataaagagggcttcggacatctgtcacctacaggcacgaccgagttctggctgggcaatgaaaagattcatctgatttctacccagagcgctattccctatgctttgcgtgtggagctggaagattggaatgggcggactagtaccgctgactatgctatgttcaaggtgggaccagaagctgataagtatcgcctgacgtacgcctacttcgcggggggggacgctggtgatgccttcgatgggtttgattttggagatgacccctctgacaagttcttcacttcacataacggaatgcaattttcgacctgggataacgataacgacaagttcgagggaaactgcgccgaacaagacggtagcgggtggtggatgaataagtgccatgcaggacatctaaacggcgtttactaccagggcggaacatatagcaaagcgagcacacccaacggttatgacaatgggattatctgggccacatggaagacccggtggtattctatgaaaaagacgaccatgaagatcattcccttcaatcgcttgaccatcggggagggccagcaacaccacctggggggtgcaaaacaggtccggccagagcaccccgctgaaacggagtatgattctctatacccggaggatgatttg

SEQ ID NO: 11448 - DNA, 1359 bp, synthetic construct
  misc_feature 1..1359: note = source = /note="Description of Artificial Sequence: Synthetic coding sequence"
  source 1..1359: mol_type = other DNA
atgtcttggagtttgcatcctagaaacctgattctctacttctatgctctgctgttcttgtccagtacttgcgtggcctacgttgcgactcgggataattgttgcatcttggacgaaagattcggttcatattgccctactacctgtgggattgccgatttcctgtccacgtaccagacaaaggtggataaggacctgcagtctctggaggatatcctccaccaggtggaaaacaaaacttcggaagtcaagcagctgattaaggctattcaacttacctacaatcctgatgaaagctccaagccgaacatgatagacgcggccacgcttaaatccagaaagatgttggaagagattatgaagtatgaagcctctatactgacccatgattcatccatccgatatctgcaggagatatataacagcaacaaccagaaaattgtgaacctaaaggaaaaagttgctcagttggaggcccaatgccaggaaccatgcaaagatactgttcagatccatgatatcacagggaaggactgccaggatatagctaataagggggcgaagcagagcgggttgtatttcattaagccactcaaggcaaatcagcagttcctggtgtactgtgagatagatggtagtggtaacggctggaccgtctttcagaaacggctcgacggcagtgttgattttaaaaaaaattggattcagtataaggaaggctttgggcatctctctcctactggcaccaccgagttttggctgggaaatgaaaagattcatctaatcagcacccagtctgccattccctatgcattacgtgtcgagttagaggattggaatgggcggacctctaccgccgactacgcaatgtttaaagtgggccccgaagccgataaatatagattgacctacgcgtatttcgcaggaggcgacgctggagacgcattcgatggcttcgatttcggggacgatccatcagacaaattctttaccagccataatgggatgcagttcagtacgtgggataacgataacgataagttcgagggtaactgtgccgaacaagatgggtccggatggtggatgaataaatgccatgccggacatctgaacggagtctattatcagggtgggacctattccaaggcgtctactccgaacggctatgataatggcatcatttgggctacgtggaagacgagatggtacagcatgaagaagaccacaatgaaaattatcccgttcaaccgactgaccatcggggagggccagcaacaccacttaggcggggcaaagcaagtgcgacctgaacacccagcagaaacagagtatgatagtctctatcctgaagatgatctg

SEQ ID NO: 11449 - DNA, 1359 bp, synthetic construct; identical to SEQ ID NO: 11427
  misc_feature 1..1359: note = source = /note="Description of Artificial Sequence: Synthetic coding sequence"
  source 1..1359: mol_type = other DNA

SEQ ID NO: 11450 - DNA, 1359 bp, synthetic construct
  misc_feature 1..1359: note = source = /note="Description of Artificial Sequence: Synthetic coding sequence"
  source 1..1359: mol_type = other DNA
atgtcatggtctctccaccctaggaatcttatattatatttttatgcactccttttcttgtcgtccacatgcgtggcttacgttgctactcgcgataattgttgtatccttgacgaacgattcggtagctactgtccgacaacctgcggtatcgccgacttcctaagcacataccagacaaaggtagacaaagatcttcaatcgttagaggatatacttcaccaggttgaaaataagacgtcagaggtcaaacaacttataaaggctatccagcttacttacaatccagatgagtcgtctaaaccaaacatgattgatgctgctactcttaaatctagaaaaatgcttgaagagatcatgaagtacgaggcaagtattctaactcatgacagttccatcaggtatcttcaagaaatttataactccaataatcagaaaatagtgaatttgaaagaaaaagtagcccaattggaagctcagtgtcaggaaccgtgtaaagatactgttcaaatacatgatattactggcaaggattgccaggacatcgcaaataagggagcaaaacaatcgggcctttatttcatcaaaccacttaaagccaaccagcaatttctggtttattgtgaaattgatggatctggtaacggctggactgttttccagaaacgattggatggatctgtagatttcaagaaaaattggatccagtacaaagagggattcggacacctatccccaaccggtaccaccgaattctggcttggaaacgagaagattcacctcatttcgacgcaatcagcaattccctatgctttacgcgtcgaacttgaagattggaacggacgtacttcaacagctgactatgccatgtttaaagttggaccagaagccgataagtatcgtttaacgtacgcttacttcgcaggaggcgacgcaggagacgcattcgacggatttgattttggagatgatccatcagacaaattctttacatcccacaatggaatgcaattctccacatgggataacgacaacgacaagtttgagggaaactgtgcagaacaagacggttcaggatggtggatgaataaatgccatgcaggacatttgaacggagtgtattaccaaggaggaacttactctaaggcaagtacgccaaacggatatgacaacggaattatttgggctacttggaagactagatggtatagtatgaaaaagaccactatgaagattataccgtttaatcgtttgacgattggagagggacagcaacaccatctaggaggagcaaaacaggttcgaccagaacatcctgctgaaactgaatacgattctttgtacccagaagatgatctc

SEQ ID NO: 11451 - DNA, 1359 bp, synthetic construct
  misc_feature 1..1359: note = source = /note="Description of Artificial Sequence: Synthetic coding sequence"
  source 1..1359: mol_type = other DNA
atgtcatggtcactccacccccgtaacctgatcctgtacttctatgcccttctgtttctgagttccacgtgtgttgcctacgtggctacccgggacaactgctgcatcctggacgagcggttcggcagctactgcccaactacatgcggcattgccgacttcttgagtacctatcagaccaaggtggacaaggatctgcagagcttggaggatatcctgcatcaggtggagaacaagacctccgaggtaaagcagctgattaaagccattcagttaacttataatccagacgaaagttccaaaccgaatatgattgacgccgcaacgctgaagtccagaaaaatgctggaggagatcatgaaatacgaggcttccatcctcacacatgatagttcaatacgctacctacaggagatttacaatagtaataatcagaagattgtgaatctaaaagaaaaggtagcgcagctggaggcccagtgccaggagccttgcaaagacacagttcagatacacgatattaccggtaaggactgccaggatatcgctaacaaaggcgcaaagcagagcggactgtatttcataaagcctttgaaggccaatcaacagttcctggtttattgtgagatcgatggaagcggcaatggatggactgtgtttcagaagcgactcgacgggtcagtcgattttaagaagaattggatccaatacaaggaagggttcgggcatctgtcacccacgggaaccaccgaattttggttgggaaacgaaaagatccacctgattagtacacagagtgcaatcccatatgcactcagagtagaactcgaggattggaatggccgcacctccactgccgactatgcaatgttcaaagttggaccagaagctgacaagtaccgcctcacatacgcatattttgcaggtggcgatgctggcgatgctttcgacggctttgattttggcgacgatcccagcgacaaattctttacatctcacaacggaatgcagttttctacatgggataatgacaacgataagttcgaaggcaactgcgcagagcaagacggatccggctggtggatgaataaatgtcatgccggccatctcaacggggtatactaccaagggggcacgtattccaaggccagcacgccaaatggttacgataacggaatcatttgggcgacctggaagacgcggtggtactcaatgaaaaagaccactatgaaaattatcccctttaaccgcctcaccatcggagaaggtcagcagcatcacctcgggggagccaaacaggtgagaccagagcaccccgcggagacagagtatgattctctatatcccgaggacgaccta

SEQ ID NO: 11452 - DNA, 1359 bp, synthetic construct
  misc_feature 1..1359: note = source = /note="Description of Artificial Sequence: Synthetic coding sequence"
  source 1..1359: mol_type = other DNA
atgtcctggagcttacaccctaggaatcttatattgtatttttatgctttgctgttcctctctagcacctgtgtggcttatgtggccactagggataactgttgcattctggatgagagattcgggagttactgccccaccacttgtggtatcgccgatttcctgtctacttaccagacaaaagtcgacaaggatctgcagtccctggaagacatattgcatcaggtcgaaaacaagacctcagaggtaaaacaactgatcaaggccattcaactcacatacaatccggacgagtctagcaagcccaatatgatcgacgcagcaaccctaaaatctcggaaaatgctcgaagagatcatgaagtatgaagccagcatcctaactcacgatagtagtatacgctatctccaagagatctacaactccaataatcagaagattgttaatctcaaggaaaaagtagcacagcttgaggcgcagtgccaggaaccttgcaaggacaccgtccaaatacatgacattaccgggaaggattgtcaggacattgccaacaagggcgccaaacagtctgggttgtacttcatcaagcctttaaaggcgaaccaacaatttctggtgtattgcgagatcgatggaagcggaaatggctggaccgtttttcaaaagcgcttggacgggtcggtcgatttcaagaagaattggatccagtataaagaaggctttggccatttgagcccaacaggcacgactgagttctggctgggtaacgagaaaatccatctgatctcaacgcagagcgcaattccctatgccttgagggtggaattggaggactggaatgggaggacatcaaccgccgattacgccatgttcaaggtaggacccgaggccgataagtacagactgacatatgcatacttcgcgggcggggacgcaggagatgcatttgacggattcgattttggtgatgacccatcggataagttttttaccagccataacgggatgcagttctctacttgggacaatgacaacgataagtttgagggaaactgcgccgagcaggacggctccggatggtggatgaataaatgccacgctggacacctgaatggagtctactaccaaggcgggacgtatagcaaggcctccactcccaatggatacgacaatggaatcatttgggctacatggaaaacgcgctggtattcgatgaagaaaaccacaatgaagataattccattcaatcgtctgaccataggcgaaggtcaacaacatcatctgggcggggcaaaacaagtgaggccagagcacccagctgagactgaatacgacagtctctacccagaggacgacttg

SEQ ID NO: 11453 - DNA, 1359 bp, synthetic construct
  misc_feature 1..1359: note = source = /note="Description of Artificial Sequence: Synthetic coding sequence"
  source 1..1359: mol_type = other DNA
atgtcctggtcactgcaccctaggaacctgatattgtatttctatgccctgctcttcctatcaagcacttgcgttgcatacgttgcaactcgggacaattgctgtatactagatgagaggttcgggtcttactgcccaaccacatgtggcattgccgattttttaagcacttaccagacaaaagtggacaaggacctgcaatccctagaggacatcctgcatcaggtcgaaaataagacctccgaggtcaaacagctgatcaaagctatccaactgacatataaccccgatgagagctcaaaacccaatatgatcgacgccgcaactctgaagtctcggaagatgttagaggagataatgaagtacgaggcttctatacttacacacgattcctctataaggtatctgcaggagatctacaatagtaataaccagaagatcgttaatttaaaagagaaagtggcacaactggaggctcagtgtcaggagccatgcaaggacacagtacaaatccacgacattaccgggaaggactgccaggatattgccaacaaaggcgcaaaacaaagtggcctctatttcataaaacctctcaaggctaaccaacagtttctcgtttattgcgaaattgatggatccgggaacggctggacagtctttcagaagaggttagatggcagtgtagactttaagaagaattggattcagtacaaagaggggttcggccacttatcccccaccggaactactgaattctggctaggtaatgagaaaatccacctgattagtacacagagtgcaattccctacgcactgagagtggaactagaggactggaacggcagaacatctaccgctgactacgcaatgtttaaggtcggccccgaagccgacaaataccgactcacctacgcctacttcgccggcggtgacgcaggcgacgcctttgacgggtttgacttcggcgacgaccccagcgataaattcttcacttcccacaatggcatgcagtttagtacatgggacaatgataatgataagttcgagggcaactgtgcagaacaggatggttctggatggtggatgaataaatgtcacgccggacacctgaatggtgtatactaccaaggcgggacttatagcaaagcttctactcctaacggctacgacaatggaatcatctgggctacttggaaaacacggtggtacagtatgaaaaaaaccaccatgaaaataataccctttaatcgtttaacaatcggagaaggtcagcaacatcatctggggggggccaaacaggttcggccagagcaccccgcagagaccgagtatgattccctgtacccagaagatgatctc

SEQ ID NO: 11454 - DNA, 1359 bp, synthetic construct
  misc_feature 1..1359: note = source = /note="Description of Artificial Sequence: Synthetic coding sequence"
  source 1..1359: mol_type = other DNA
atgagctggtcactgcatccacgcaatctgattctgtacttttacgctttgcttttcctgagcagcacctgtgtggcctatgtcgctacacgcgacaactgttgtattctggacgaaaggttcggaagttactgcccgaccacctgcggaattgctgatttccttagcacctaccagacgaaggttgataaagacctgcaaagcttagaggatatcctccatcaagtcgagaacaaaactagcgaggtgaagcagctgatcaaagcaattcagctcacgtacaatccagacgagagctccaagccaaacatgatcgatgctgcgacactcaagagtaggaagatgctcgaggaaatcatgaaatatgaagcatctatactgacccatgactccagcatacggtatctgcaggagatctacaattcgaataatcagaaaatagtgaatctgaaagaaaaggtggcccagttagaagcgcagtgccaagagccttgcaaagatactgtgcagatccatgatatcactgggaaggactgtcaggatattgccaataaaggagcaaagcagagcggactgtacttcatcaaacccttgaaagctaatcagcaatttttagtctactgcgaaatcgacggatctggcaatggatggacagtctttcagaagaggctcgacggcagcgtagacttcaaaaagaactggatacagtacaaagagggtttcggacatctgagcccaactggcactacagaattctggctgggcaacgaaaagatccatctcatatctacacagtctgctatcccatacgcacttcgtgtcgaactcgaagattggaatggcaggacatcaaccgctgattacgcaatgttcaaggtgggcccagaagcagataagtaccgcttgacctacgcatatttcgcaggcggcgacgctggggacgctttcgacggatttgatttcggtgacgatcctagtgataaattctttacaagtcataacggcatgcagttcagcacttgggataacgacaatgataaattcgaaggcaactgcgccgagcaagacggctctggatggtggatgaacaaatgtcatgccggccacttgaatggtgtttactatcagggcgggacctactcaaaggcttccactccaaacggatacgacaacggaataatttgggcgacatggaagacccgatggtactccatgaagaaaaccaccatgaaaatcataccatttaatagacttactatcggggagggacagcaacaccacctggggggcgcaaagcaggtcagaccagaacaccctgccgagacagagtatgattcactctatcccgaggatgatctt

SEQ ID NO: 11455 - DNA, 1359 bp, synthetic construct
  misc_feature 1..1359: note = source = /note="Description of Artificial Sequence: Synthetic coding sequence"
  source 1..1359: mol_type = other DNA
atgtcatggagtctccatcctcgcaacctcatcctctacttctacgcgttgttattcctcagcagcacctgcgtagcatatgtagctaccagggataactgctgcatactggatgagcgctttggctcgtactgtcctactacctgcggcatcgcagacttcctgagtacgtaccagacgaaagttgacaaggatctacaaagcttggaggacatcctccaccaagtagaaaacaaaacatcagaagtaaaacagcttatcaaggccatacaactgacttacaaccctgacgaatcgtccaagcccaacatgatcgatgcagcgacattgaagagccggaagatgttggaggaaatcatgaaatacgaagcctccattctgactcacgacagctctatcagatatctccaggaaatttacaattcgaacaaccagaagatcgtgaatctcaaagaaaaagttgctcaacttgaagctcagtgccaagaaccgtgtaaggatacggtgcagatccacgatataacgggcaaagattgccaggacatcgcaaataagggggccaagcaatcaggactctacttcatcaaacccctgaaagctaaccagcaatttttagtatactgtgaaatcgatgggagtgggaacgggtggactgtgttccagaaacgcctcgacggctccgtagatttcaagaaaaattggattcagtacaaggagggtttcggtcatctaagtccaacgggaaccactgagttctggctgggaaatgagaaaatccacctcatatctacccagagtgccatcccctacgccttgagggtggaattggaggattggaatggccggacttcaaccgccgattatgcaatgtttaaggtcggaccggaggccgataagtaccggctgacatatgcatactttgctggaggggacgctggagacgcttttgatggattcgactttggcgatgaccccagtgataaattttttacctctcacaatgggatgcaattttccacatgggacaacgacaacgacaagttcgagggaaattgtgccgagcaagatggatctgggtggtggatgaataagtgccacgcggggcacctcaacggcgtatattaccagggcgggacttacagtaaggctagcacgccaaacggctacgataatggaatcatttgggccacttggaaaaccaggtggtattctatgaaaaagacgaccatgaagatcattccgttcaaccggctgactatcggcgaaggccagcagcaccatctagggggcgcgaaacaggtccgccccgagcatccggcagagaccgagtacgattctctgtaccctgaggacgacctc

SEQ ID NO: 11456 - DNA, 1359 bp, synthetic construct
  misc_feature 1..1359: note = source = /note="Description of Artificial Sequence: Synthetic coding sequence"
  source 1..1359: mol_type = other DNA
atgagctggagtctgcatcccagaaatttaattctgtacttttatgcactactcttcctctcctctacatgcgtcgcctatgtggcaacccgggataactgctgtatcctggacgaacggttcgggagctattgcccaacgacctgtgggatcgcagattttttgtctacataccagacaaaagtggacaaggatctgcagagtctggaagatatcctgcaccaggtggaaaacaagacaagtgaagtgaagcagctcataaaggcaatacagctaacgtacaatcccgacgaatcctccaagccaaatatgatcgatgccgccactctgaagtcccggaagatgttagaggaaatcatgaagtacgaagcttccatcctcactcatgactccagcatccgatacctgcaggagatttacaattcaaacaaccagaaaattgtgaatctgaaggagaaggtggctcagttagaggctcagtgtcaggagccatgtaaggacacagtacagatccatgatattaccgggaaggattgccaagacatcgcaaataaaggcgctaagcagagcggcctgtacttcataaagcccttgaaggccaatcagcagtttctggtgtattgtgagatagacgggtccggaaatgggtggacagtgttccaaaagcgtctggacggatccgtagactttaagaagaattggattcagtacaaagagggcttcggccacctttcacccacaggcaccacagagttctggctgggaaacgagaagatccatctgatcagtacgcaaagtgcaatcccttacgcattgagagtggagttggaggactggaatggccgcacaagcactgcagactacgcgatgttcaaggtgggaccagaggctgacaagtaccggcttacctacgcatactttgccgggggagacgccggagatgcatttgacgggttcgattttggggatgaccccagtgacaagttcttcacatcacataatgggatgcaattttcaacatgggataatgataatgataagttcgagggcaactgcgcggagcaggacgggtctggatggtggatgaataagtgccacgccgggcatctcaacggtgtatactatcagggggggacctattcaaaggcatcaacacccaatggatacgacaacgggataatctgggcgacctggaagaccaggtggtactcaatgaaaaagactactatgaagattatccctttcaaccggctgacaattggagagggtcagcagcaccacttggggggcgcaaaacaggttcgcccagagcatccagcggagactgaatacgatagcctctatccagaggacgatctc

SEQ ID NO: 11457 - DNA, 1359 bp, synthetic construct
  misc_feature 1..1359: note = source = /note="Description of Artificial Sequence: Synthetic coding sequence"
  source 1..1359: mol_type = other DNA
atgtcatggagtctgcaccctaggaacctgatactgtacttttatgctctcctgttcctcagctcaacctgtgtggcctatgtcgctacaagagataattgttgcatccttgacgagcgcttcggaagttattgccctacaacctgcggtattgccgactttctttcaacctatcagaccaaagtggataaagatctgcagagcctcgaggatatccttcaccaggtcgagaataagaccagtgaggtgaaacagctgattaaggctattcaactgacctacaatcctgatgaatctagtaaacccaacatgatcgatgctgcaacactgaaatccaggaagatgctcgaggaaattatgaagtatgaggccagcatcctgacacacgactccagtattagataccttcaagagatttacaacagcaataaccagaaaatagttaatttgaaagaaaaagtcgcccagttggaagcacagtgccaagagccgtgtaaagatacagtgcaaatacacgatattacgggtaaagactgccaagacatcgctaacaaaggcgccaaacaaagtggactgtattttatcaagcctctgaaggcaaatcagcaattcctggtgtattgcgagatcgacggaagtggtaacggctggaccgtttttcagaaacggcttgacggttccgttgactttaagaagaactggattcaatataaagagggatttggacacttgtctccaaccggaactacagagttttggctgggcaatgaaaaaatacaccttatctctacccagagcgccattccctacgccctgcgggttgaactggaggattggaacggccgaacgtctactgcggattacgccatgttcaaggtcgggcctgaggctgataaatacaggttgacttatgcttattttgccggcggggacgcgggtgatgcctttgacgggtttgatttcggcgatgacccttctgacaaatttttcacttcacataatggcatgcagttctctacatgggacaacgacaacgataagttcgaaggaaattgcgccgaacaggatggtagtggatggtggatgaacaaatgccacgctggccacctgaatggtgtgtattaccagggaggaacgtatagcaaggcttccaccccgaatggttatgataatggcataatttgggccacctggaagaccagatggtatagcatgaagaagaccacaatgaagatcatccccttcaatcggttgaccattggcgaaggtcagcagcatcacctcggcggcgcaaagcaggtcaggccagaacaccccgccgagactgagtacgacagtttgtaccctgaggacgacctg

SEQ ID NO: 11458 - DNA, 1359 bp, synthetic construct
  misc_feature 1..1359: note = source = /note="Description of Artificial Sequence: Synthetic coding sequence"
  source 1..1359: mol_type = other DNA
atgtcatggtccctacaccctcggaatttgatcctgtatttctacgctttattgtttctgtcatcaacctgtgtcgcttatgtagcaacccgggataattgctgtattttagacgaacggtttggctcctattgtccaacaacctgcggcatagccgactttttatctacctaccagactaaagttgataaggacctccagagcctcgaggatattctgcaccaagtggaaaacaagacatccgaggtgaagcagctgattaaagcaatccagttgacctacaaccctgacgaatccagcaaacccaacatgatcgacgccgccacactaaaatcacgcaagatgcttgaggagattatgaagtacgaagctagcatcctcacccacgacagctctatcaggtacctccaagaaatttataactctaataatcagaaaattgtcaatctgaaggagaaagtggctcagcttgaagcacagtgtcaggaaccttgtaaagacacagtgcagatacacgacatcacaggaaaggattgccaggatattgccaacaagggcgcaaaacagtctgggttgtactttattaagcctctgaaggccaatcagcagttcctggtctattgcgagatcgacggctcagggaacggctggacagttttccagaaaagattagacgggagcgtcgacttcaaaaagaattggatccagtataaagaaggctttgggcacctgagtcctaccggtaccacggagttctggttaggcaacgagaagatacatctgatttcaactcagagcgctatcccttatgctttgcgcgttgaactagaggattggaatggcaggacaagcaccgcagactacgcgatgtttaaagtggggcccgaggctgacaaatacaggttgacctacgcttattttgccggaggagatgctggcgacgctttcgatggtttcgactttggcgacgatccatcagacaaattctttacgagccacaatggaatgcagttttcgacttgggacaacgataatgataaatttgagggaaattgtgccgaacaagacggttctgggtggtggatgaacaagtgccacgccggccacctaaacggtgtgtattaccagggaggcacctattcaaaggccagcacccctaatgggtatgataatggcattatctgggcaacttggaagacaaggtggtactccatgaagaaaactaccatgaaaatcatccctttcaacaggctgaccatcggggagggtcaacagcatcaccttgggggcgccaaacaagtgcgacccgagcaccccgctgagacagagtatgacagcttgtatcccgaggacgatctt

SEQ ID NO: 11459 - DNA, 1359 bp, synthetic construct
  misc_feature 1..1359: note = source = /note="Description of Artificial Sequence: Synthetic coding sequence"
  source 1..1359: mol_type = other DNA
atgagctggtcgcttcatccccgcaatctcattctgtacttttacgccctgttattcctgagttcgacctgcgtggcgtacgtggccacccgcgacaactgttgcatactggacgagcgcttcggtagctattgtcctactacttgcggtatcgccgactttctctctacgtaccaaactaaggtggataaggacctgcagagtttggaagacatcctccaccaagtggaaaacaagacgagtgaggttaagcagttgatcaaggcgatccagttgacatataaccctgatgagagctctaaacccaacatgattgacgccgcgactttgaagagtagaaagatgttggaagaaatcatgaaatacgaggcgagcattctgacgcacgattcgtccatccggtatctgcaagagatctacaactcaaataaccagaagatcgtcaacttaaaggagaaggtagcccagctggaggcccaatgccaggagccctgtaaagacaccgtgcaaatacatgatatcacaggaaaggactgccaggacattgccaataagggcgccaagcagagcggactgtactttattaagcctttgaaagccaaccagcagttcctagtttactgcgagatagatggtagcggcaatggctggaccgtgtttcagaagcgtctcgacggttctgttgacttcaaaaaaaattggattcagtacaaagagggattcggacacctgtcgcctacggggacaaccgaattctggctgggcaacgaaaagatccacttgatctcgacccagtccgccattccctacgccctgcgagtagaactcgaggattggaatggacgtacgtccacggccgactacgctatgttcaaggtcggcccagaggctgataagtaccgtctcacatacgcttacttcgccggcggagacgcgggcgacgcgttcgatggattcgacttcggcgacgacccgtctgacaagttctttacaagccataacggcatgcagttctccacctgggataatgataacgataaattcgaaggtaactgtgccgaacaggacggtagtggatggtggatgaacaaatgccacgccggccatctcaacggtgtatattaccagggcggaacctattctaaggcttccacacctaatggctatgataacggcatcatctgggccacctggaagacccgctggtattccatgaagaaaaccacgatgaagataatccccttcaaccgcctaaccattggcgaaggccaacagcaccacctcggaggcgcgaagcaggtccgtccggaacatccggccgaaaccgaatacgattcgctatacccggaggacgatctg

SEQ ID NO: 11460 - DNA, 1359 bp, synthetic construct
  misc_feature 1..1359: note = source = /note="Description of Artificial Sequence: Synthetic coding sequence"
  source 1..1359: mol_type = other DNA
atgtcctggtccctccacccccggaacctcatcctatacttttacgccctactcttcttgagttcgacctgcgtcgcctatgtcgcaactcgggataattgctgcattctggacgagcgttttggtagctactgtcctacgacctgcggcatcgctgattttctgagcacgtatcagaccaaggtggataaagacctccagtcgttggaggatatcctccaccaggtcgaaaataagacctcggaggtaaagcaactaatcaaggcgatccagctaacctacaacccggacgagagctctaaacccaatatgattgatgctgctacgttgaagtctcgtaagatgctagaagagatcatgaagtacgaagcctcaattttgacccacgattcgagcatccgttacctccaggagatctataactcgaataaccaaaagattgtcaacttgaaggagaaggtggcccaacttgaggctcagtgccaggagccgtgcaaggacactgtccagatccacgacatcactggcaaggattgccaggacatcgcaaacaagggagctaagcaaagtggcctctacttcatcaagccgctgaaggctaatcagcagttcctggtgtactgtgagatcgacggttccggcaacggctggaccgtcttccagaagcgcttggacggatccgttgatttcaagaagaactggatccaatacaaggaaggcttcgggcacctctcgcctactggcacgactgagttctggctgggcaatgagaagatccacctcatcagcactcagagcgcaatcccgtatgccttgcgtgtagagctggaagactggaacggacgcacttccactgcggattacgccatgttcaaggtcggcccggaggctgacaagtaccgccttacctacgcctacttcgccggaggtgatgccggcgacgcattcgacggttttgattttggggacgatccctcggacaaattcttcacgtcccacaacggtatgcagtttagcacttgggataatgataacgacaagttcgagggaaactgcgcggaacaggacggttctgggtggtggatgaataagtgccatgctggtcacctgaacggggtttactaccagggtggcacctacagtaaggcgtccacccccaatggatacgataatggcatcatctgggctacctggaagactcgctggtacagcatgaaaaagactaccatgaagatcatccctttcaacaggttgaccatcggagagggccaacagcatcacctcggtggagctaagcaggttcgccccgaacacccagccgagaccgagtacgactctctctaccctgaggatgatctg

SEQ ID NO: 11461 - DNA, 1359 bp, synthetic construct
  misc_feature 1..1359: note = source = /note="Description of Artificial Sequence: Synthetic coding sequence"
  source 1..1359: mol_type = other DNA
atgagctggtcactccacccccgaaaccttattctgtacttctacgccctgttgtttctgtcatccacttgtgtagcttatgtcgctacacgggataattgttgcatccttgatgagaggtttgggagctactgtccgacgacgtgcggtatcgccgatttcctatcaacataccagactaaggtagataaggacctacagtccttagaggacattctgcatcaggtggaaaacaagaccagcgaggtaaaacagcttatcaaggccattcagctcacttacaaccctgatgagtcctcaaaacctaacatgatagacgcggccaccctgaagtcgcgcaagatgttggaggagattatgaagtacgaggcatcgatcttaacacacgactcctcaattaggtacttgcaggagatctataactctaataatcagaagattgtgaatctgaaagagaaggttgcccaactcgaagctcagtgtcaggaaccatgtaaagataccgtccaaatccacgatattacaggcaaggattgccaggacattgcaaacaagggcgcgaagcagagtggcctgtatttcataaaacccctgaaagcgaaccagcagtttcttgtgtattgcgaaattgacgggtcgggtaatggctggacggtgttccagaagcgcttggacggctccgtggactttaaaaagaattggattcagtataaggagggctttggccatctttcgccaactggcacaaccgaattctggctgggtaatgaaaagatccatctgatcagtacgcaatccgctatcccatacgcattgcgcgtcgagcttgaggattggaatggaagaacttcaacggctgactatgccatgttcaaagtcgggcccgaagctgataagtaccgactgacgtacgcatacttcgctgggggcgatgcaggcgacgcgttcgacggattcgattttggggacgaccccagtgacaagttctttacatcccacaacggcatgcaatttagcacatgggacaatgacaacgataagtttgaagggaactgtgccgagcaagacgggagtggctggtggatgaacaagtgccatgctgggcacctcaatggtgtatactatcagggaggcacgtacagtaaggcatccacaccgaacggatatgataatggcattatttgggccacctggaagactaggtggtattccatgaagaaaacaaccatgaaaatcatccctttcaacagactgacaatcggcgagggacagcagcaccacctggggggcgctaagcaagttcgtccagaacaccctgcagaaaccgagtacgactctctgtatcccgaggacgacctc

SEQ ID NO: 11462 - DNA, 1359 bp, synthetic construct
  misc_feature 1..1359: note = source = /note="Description of Artificial Sequence: Synthetic coding sequence"
  source 1..1359: mol_type = other DNA
atgtcatggtctctgcatcccaggaacctgattttgtacttttacgccttgcttttcctgtcctctacctgcgtggcgtacgtggcgactagagacaattgctgtattttggacgaaaggtttggttcctactgccctacgacctgtggcatcgccgattttctcagcacatatcagaccaaggtcgacaaggaccttcagtccctggaggatatccttcatcaggtcgagaacaagacgtctgaggttaagcagctgatcaaggccatccagttgacatacaaccctgatgagagctccaagccaaatatgattgacgcggctaccctcaagtccaggaagatgctggaggaaatcatgaagtacgaagctagtattctgacccatgactcctccatccggtacctccaggaaatctacaatagtaacaaccaaaagattgtgaatctcaaggagaaggtggcccagctggaagctcagtgccaggagccatgcaaggacactgtgcagatacacgacatcactggcaaagactgccaggacatcgctaataagggggccaaacaatctggcctttacttcattaagccgctgaaggcgaaccagcagttcctggtctattgcgaaatagacgggtccgggaatggctggacggtgttccagaaaagactagatgggtctgtggacttcaagaaaaactggatccagtataaggaaggatttgggcatctgtctcccactggtacaaccgagttttggctgggcaacgagaaaattcacctcatttcaacccagtccgccataccctacgctttgagggtggaactggaggactggaacggacgcactagcaccgccgactacgctatgtttaaggtagggccagaggctgacaagtacaggctgacatacgcttacttcgctggcggtgacgctggcgacgcttttgatgggttcgactttggtgatgacccctcagataagttttttacctcccacaacggcatgcagttttccacctgggataacgacaacgataagttcgagggtaactgcgccgagcaggatggctccgggtggtggatgaataagtgtcacgctggtcacctcaatggtgtgtactatcaaggcggcacttatagtaaagcctcgactccgaacggctacgataatggtatcatctgggctacgtggaagaccaggtggtatagtatgaaaaaaacaactatgaagattattccctttaaccggctaacaatcggcgagggacagcagcatcatctcggaggagcaaaacaggtccggcccgagcatcccgctgaaacagagtacgacagcctgtaccccgaggacgacctc

SEQ ID NO: 11463 - DNA, 1359 bp, synthetic construct
  misc_feature 1..1359: note = source = /note="Description of Artificial Sequence: Synthetic coding sequence"
  source 1..1359: mol_type = other DNA
atgtcatggtctctccatcccagaaatctaatcctgtacttctatgctctgctcttcttgagctcaacgtgtgtcgcctatgttgccaccagggacaattgctgtattttagacgaacggtttgggtcatattgccccactacttgcggaatcgcagacttcctttctacttaccaaacgaaagttgataaagatctgcagtctcttgaggacatactgcatcaagtcgaaaataaaacgagtgaagttaaacagctgatcaaggcaattcagctgacttacaatcctgacgagtcatccaaacctaacatgatcgacgcggctacactcaagtcgcgtaaaatgctcgaggaaataatgaaatatgaggcatccatcctgacccatgattccagcattcggtatttgcaggagatttataactctaataatcaaaaaattgttaaccttaaagagaaagtggctcagctggaggcgcagtgccaagagccatgcaaggataccgtacagatacatgacattacaggaaaggattgtcaggatatagccaataagggggccaagcagtcaggcctgtactttataaaacctcttaaagcaaaccagcagttcctggtgtactgcgaaattgatggcagcggcaatggatggaccgtgtttcagaaaaggctggatgggagtgttgatttcaagaagaactggatccaatacaaggagggcttcggtcatctgtctccaaccgggacaaccgaattctggctcgggaacgagaagatccatttgatatcaacacaatctgccataccatacgccctcagagtggagttggaggactggaacgggcgcacctccacagccgattatgcgatgttcaaagtgggaccagaggctgacaagtacaggctcacgtatgcatactttgccggaggagatgcgggtgacgcatttgatggctttgattttggcgatgaccctagtgataaattcttcacctcacacaatggcatgcaattcagcacttgggataacgacaacgacaaatttgaggggaattgtgccgagcaggacggcagcgggtggtggatgaataagtgtcatgccggccacctgaatggcgtgtactaccagggcggcacatacagcaaagcatccaccccaaacggatatgataatggcataatttgggctacctggaaaacccggtggtattctatgaaaaaaacaaccatgaagataattccattcaataggctcaccataggtgaaggccagcagcaccacctcggcggggcaaagcaagtcaggcctgagcatccagctgagaccgaatatgactccctctatcctgaggatgatctg

SEQ ID NO: 11464 - DNA, 1359 bp, synthetic construct
  misc_feature 1..1359: note = source = /note="Description of Artificial Sequence: Synthetic coding sequence"
  source 1..1359: mol_type = other DNA
atgtcttggtctttgcaccctcggaacctcattctgtatttctatgcccttctgtttctcagttccacatgtgttgcctatgtcgcaacaagagataactgttgtatcctggatgaaaggttcgggtcctattgtcctacaacttgtggaatagctgattttctttctacttatcagactaaagtggataaagatctccaatccttagaagacatactccatcaggttgaaaacaaaacatcggaggttaaacagctgataaaagctatacaactcacttataacccagacgaatcttccaaaccaaacatgatcgacgcagctactctgaaaagtaggaaaatgctcgaagaaatcatgaaatacgaagcgtctatcctaacacatgattcatccataaggtaccttcaggaaatctacaactcaaataaccagaaaatcgttaatctcaaggaaaaagtggcccagcttgaagcccagtgtcaggagccatgcaaagatacagttcagatacatgacataactggaaaagattgtcaggatatcgcgaacaagggagctaaacaatcagggctttactttattaagccactgaaagctaaccagcagttcctcgtgtactgcgaaatcgatgggtctggaaatgggtggacagtgttccagaaaaggctggatggatctgtcgatttcaagaaaaattggattcagtataaggagggattcgggcacctctctccaacaggaacaactgaattctggttgggaaatgagaagatccacttgatcagtactcagtcagctataccttacgccttacgggtagaattggaagattggaatgggagaacttctactgcagattatgcaatgttcaaagtcgggcccgaggctgataagtatcggcttacatatgcatactttgctggaggagacgcaggggatgcttttgatggattcgacttcggagatgatccctccgacaaattttttacatctcataatggaatgcagttttcaacatgggacaatgataatgataaattcgaagggaactgtgctgaacaggatggatcaggatggtggatgaacaaatgccatgcaggacacctgaatggggtttattatcaggggggaacatactcaaaagcctccacacccaacgggtacgacaacgggataatatgggcaacttggaagacaagatggtattctatgaaaaaaactacaatgaaaataataccatttaaccggctaactatcggggagggacagcagcatcatctcgggggagccaaacaggtgcggccagagcaccccgccgaaactgaatatgattccctttatcccgaagatgatctg

SEQ ID NO: 11465 - DNA, 1359 bp, synthetic construct
  misc_feature 1..1359: note = source = /note="Description of Artificial Sequence: Synthetic coding sequence"
  source 1..1359: mol_type = other DNA
atgtcctggagcctccatcctagaaaccttatattgtatttttatgccctcctgtttttgtcgtctacgtgtgtcgcttatgtggcaacacgtgataattgctgtatcctcgatgagcggtttggatcttactgccccacaacttgtggcattgcggatttcttgtcaacttaccaaaccaaagttgacaaggatttgcagagtttggaggacatccttcatcaagtagagaacaagacatcggaggtgaagcagctaattaaggccatccaactgacgtacaatccggacgaatcgtccaagccgaatatgatcgatgcggccacattgaaatcaagaaagatgctagaggaaatcatgaagtacgaggcctctatactaacccatgattcttcaattagatatctgcaggagatttataacagcaacaatcagaaaatcgtaaacctcaaggaaaaagttgcgcagcttgaggcgcaatgtcaagaaccatgtaaggacaccgtgcagattcacgacattactggtaaggactgccaggacatagcgaataagggagccaaacagtcgggactgtattttattaaacccctgaaggctaatcaacagtttcttgtctattgtgaaattgacggatcgggaaatggctggaccgttttccagaagcgactcgatggctcagttgatttcaagaagaattggatccaatataaggagggcttcggacatttgtcacccacaggaaccaccgagttctggctgggcaacgaaaagatccacctgatttctacacaatctgctatcccttatgctctccgtgtcgagcttgaggactggaacggtcgaacatcgacggccgactacgcaatgtttaaggtcggtccagaggctgacaagtaccgcctcacctacgcatactttgctggtggtgatgcaggcgatgccttcgacggtttcgacttcggggatgatccttccgacaagttctttacttctcataatggtatgcagttctcgacctgggataatgataatgataagttcgagggaaactgtgcggagcaggatgggtcaggttggtggatgaacaagtgccatgcaggccatctcaacggtgtttactatcagggtgggacgtacagcaaggcgagcactcctaatggctatgacaatggcattatctgggcgacctggaagactcgctggtactcgatgaagaaaacgacgatgaaaattatcccttttaacaggctcaccatcggcgaaggacagcaacaccacttaggaggggctaagcaagttcgccccgaacaccctgccgagaccgaatatgattctctttaccccgaagacgacctt

SEQ ID NO: 11466 - DNA, 1359 bp, synthetic construct
  misc_feature 1..1359: note = source = /note="Description of Artificial Sequence: Synthetic coding sequence"
  source 1..1359: mol_type = other DNA
atgtcatggtcactccatccaaggaacttgatactgtatttctacgctttactcttcctgtcctctacttgcgtggcctacgtggctacgagagataactgttgcatccttgacgagcggttcggatcatactgtccaacaacctgtggcatcgccgacttcctgtctacataccagaccaaggtggacaaggatttgcagtctctagaggacattctgcaccaggtggagaacaagacgtcggaggttaagcagctgatcaaagccatccagctgacgtacaacccggatgagtcctcaaaacccaatatgatcgatgcagctacgctaaaatcacggaagatgctcgaagagattatgaagtatgaggcgtctattcttacccatgacagttctatccgctacttgcaggaaatttataattctaataaccagaaaatcgtcaatctgaaggagaaggttgcacaactggaggcgcagtgccaggagccatgcaaggacacagtgcagattcacgacattaccggtaaggactgtcaagacatcgccaataagggtgctaagcaatccgggctgtattttatcaaacctctcaaagctaatcaacagttcctggtgtattgtgagattgatggatctgggaacggatggaccgtatttcaaaagagattggatggaagtgtagatttcaaaaaaaattggatccagtataaggaggggttcggtcatctcagcccgactggaaccacagagttctggctcgggaatgagaaaatccacctaatcagcacccaatccgccattccatacgcattgcgagttgagctcgaggactggaacgggagaacctccacagccgattacgctatgtttaaggttggcccggaggccgacaagtacaggctgacctatgcatactttgcaggcggggacgctggcgatgccttcgacggcttcgattttggagacgatccttctgataagtttttcacatctcataacggcatgcagttctctacctgggataacgacaatgataagtttgaggggaactgcgcagagcaggatgggagcggttggtggatgaataagtgtcacgctgggcatcttaacggtgtctactaccagggagggacttacagcaaagcttctaccccgaatgggtacgacaacggcattatctgggcaacctggaaaactcgctggtacagcatgaaaaaaaccactatgaaaatcatcccatttaacaggttaacaatcggtgaggggcaacagcaccacctggggggcgctaagcaggtaaggcctgagcacccagctgagaccgagtatgatagtctgtaccctgaggacgattta

SEQ ID NO: 11467 - DNA, 1359 bp, synthetic construct
  misc_feature 1..1359: note = source = /note="Description of Artificial Sequence: Synthetic coding sequence"
  source 1..1359: mol_type = other DNA
atgtcgtggtcgttacatccgcgaaatctaatattatatttttatgcgttattatttttatcgtcgacgtgtgtagcgtatgtagcgacgcgtgataattgttgtatattagatgaacgttttggttcgtattgtccgacgacgtgtggtatagcggattttttatcgacgtatcaaacgaaagtagataaagatctacaatcgttagaagatatactacatcaagtagaaaataaaacgtcggaagtaaaacaattaataaaagcgatacaattaacgtataatccggatgaatcgtcgaaaccgaatatgatagatgcggcgacgctaaaatcgcgtaaaatgttagaagaaataatgaaatatgaagcgtcgatattaacgcatgattcgtcgatacgttatctacaagaaatatataattcgaataatcaaaaaatagttaatttaaaagaaaaagttgcgcaattagaagcgcaatgtcaagaaccgtgtaaagatacggtacaaatacatgatataacgggtaaagattgtcaagatatagcgaataaaggtgcgaaacaatcgggtttatattttataaaaccgctaaaagcgaatcaacaatttttagtatattgtgaaatagatggttcgggtaatggttggacggtatttcaaaaacgtctagatggttcggttgattttaaaaaaaattggatacaatataaagaaggttttggtcatctatcgccgacgggtacgacggaattttggttaggtaatgaaaaaatacatctaatatcgacgcaatcggcgataccgtatgcgctacgagtagaattagaagattggaatggtcgaacgtcgacggcggattatgcgatgtttaaagttggtccggaagcggataaatatcgactaacgtatgcgtattttgcgggtggtgatgcgggtgatgcgtttgatggttttgattttggtgatgatccgtcggataaattttttacgtcgcataatggtatgcaattttcgacgtgggataatgataatgataaatttgaaggtaattgtgcggaacaagatggttcgggttggtggatgaataaatgtcatgcgggtcatttaaatggtgtttattatcaaggtggtacgtattcgaaagcgtcgacgccgaatggttatgataatggtataatatgggcgacgtggaaaacgcgatggtattcgatgaaaaaaacgacgatgaaaataataccgtttaatcgtttaacgataggtgaaggtcaacaacatcatttaggtggtgcgaaacaagtacgtccggaacatccggcggaaacggaatatgattcgttatatccggaagatgatcta

SEQ ID NO: 11468 - DNA, 1359 bp, synthetic construct
  misc_feature 1..1359: note = source = /note="Description of Artificial Sequence: Synthetic coding sequence"
  source 1..1359: mol_type = other DNA
atgagctggtccctgcaccctagaaaccttatcctgtacttttacgcattgctgttcctgtcgtcaacctgcgtggcttatgtggcaacccgagataactgctgcattctcgatgagcgattcgggtcttactgccccaccacttgcggcattgccgattttctgagtacttaccagactaaggtggacaaggatctgcagtccctggaggacatattacaccaggtcgagaacaaaacgagcgaagtgaaacagcttattaaggctattcaactcacatataatcctgacgagtcctcaaagccaaacatgatcgatgcagctacgctcaagagtcgcaagatgttagaggagattatgaagtacgaagcctctatacttacccatgactcttccattaggtacctccaagagatttacaactcaaacaatcagaagatagtaaacttgaaagaaaaggtcgcgcaactcgaagctcagtgccaggaaccatgcaaggatacagtccagatccatgatatcaccgggaaggattgccaggatatcgccaacaagggagcgaagcagagcggcctgtatttcatcaaacccctgaaggccaatcaacagttccttgtgtactgcgaaattgacggctccgggaacggatggacagtatttcagaagagattagacggttctgtggattttaagaaaaactggatacagtacaaggaggggttcggtcacctgtcccccacaggcacaacggagttttggctcgggaacgaaaagatccacttgatttccacgcagtcagccattccttatgccttgagggttgaactcgaggattggaacgggcgaacaagcaccgctgactatgccatgttcaaagtggggcccgaggccgataaatatcgactcacctatgcctattttgctggtggcgatgctggcgatgcttttgatgggttcgatttcggggatgacccctccgacaagttctttacgtcgcacaacggcatgcagttcagcacctgggataacgataatgacaagtttgagggcaactgtgcagagcaagacgggtcaggatggtggatgaacaaatgccatgcagggcatcttaatggggtctactaccagggaggcacttactcgaaagcttcaactccgaacggatacgacaatggaatcatttgggccacatggaagactcgctggtatagtatgaagaagaccacaatgaaaataatccccttcaaccgattaaccattggcgagggccagcaacatcatctggggggggccaaacaagtgagacccgaacacccggccgaaaccgagtatgattcactgtaccccgaggatgaccta

SEQ ID NO: 11469 - DNA, 627 bp, synthetic construct
  misc_feature 1..627: note = source = /note="Description of Artificial Sequence: Synthetic coding sequence"
  source 1..627: mol_type = other DNA
atggactccgatgaaaccggctttgaacatagcggattgtgggtgtcggtgctcgccggactcctgctgggcgcgtgtcaagcccacccgattccggatagctcgcctctcttgcagttcggtggtcaggtcagacaaaggtatctgtacactgacgatgcccagcagacggaggcacatctcgagattcgcgaagatggcactgtcggaggagcagcggatcaatcaccagaatctctgttgcagctcaaggcactcaagccgggagtgatccaaatccttggagtcaagacttcccgcttcctctgccagaggccggacggggcgctctacggatcactccacttcgaccctgaggcatgcagcttccgcgaactgctgctggaggacggatacaacgtgtaccaatcggaggcgcatggcctcccactgcacctgccgggcaacaaatccccacacagagatccggccccaagggggcctgcccgcttcctgcctctcccgggacttccacctgctctgccggagccaccggggatcctcgctcctcagccgcctgatgtgggatcgtcagatccgctgagcatggtcggaccaagccaaggccggagcccttcgtacgcctcc

SEQ ID NO: 11470 - DNA, 627 bp, synthetic construct
  misc_feature 1..627: note = source = /note="Description of Artificial Sequence: Synthetic coding sequence"
  source 1..627: mol_type = other DNA
atggattcggatgaaaccggttttgaacactctggtctttgggtgtccgtgctcgccggcttgctgcttggagcatgtcaggcccaccctatccctgattcgtctccgcttctgcagtttgggggccaagtgcgtcaacggtatctctacacggacgatgcacaacagactgaagcgcatctggaaattcgagaggatggcactgtcggtggggcagctgaccaaagccctgagagtctcttgcagctgaaggctctgaagccaggtgtgatacaaatacttggagttaagaccagcaggtttctctgtcaacgtccagacggagcgttgtacgggtccttgcattttgaccccgaggcatgcagcttccgggaactccttctggaagatggatacaatgtctaccagtcagaagcccatggactcccactgcatcttccgggcaacaaatcgccccaccgggatccggcacctaggggaccggcgcgattccttccactccctggcctgccacccgcgcttcctgagccaccgggtattcttgcaccgcagccacctgacgtagggagcagtgatcctctttccatggtgggtccatcgcaagggcgctccccatcgtacgcatca

SEQ ID NO: 11471 - DNA, 627 bp, synthetic construct
  misc_feature 1..627: note = source = /note="Description of Artificial Sequence: Synthetic coding sequence"
  source 1..627: mol_type = other DNA
atggactcagacgaaaccggatttgagcactcagggctgtgggtatcagtgcttgccgggcttctgctgggagcgtgccaggcacatcctatcccagattcttcccctcttcttcaattcggaggacaagtgcgtcaacgctacctctacacggacgatgcacagcagaccgaagcacacttggagattcgtgaagatggcaccgtgggaggggcagcagaccaatccccagagtcattgctgcagcttaaggccctgaagccaggagtgattcaaatcctgggtgtcaagacttccaggtttctgtgtcaaaggccggatggtgcgctgtacgggtcgctgcattttgatcctgaagcgtgtagcttcagggagctgttgctcgaagatggttacaacgtgtaccagtccgaagctcatggacttcccttgcacctgccaggcaataagtcgccccacagagatcccgcccctagaggtccggcgcgcttcctgcctcttccaggacttccacccgcactgcctgaaccacctggaatcctggcccctcagcctcctgacgtgggttcgtcggaccccctgagcatggtcggcccttcacaaggaaggagcccatcctatgcatcc

SEQ ID NO: 11472 - DNA, 627 bp, synthetic construct
  misc_feature 1..627: note = source = /note="Description of Artificial Sequence: Synthetic coding sequence"
  source 1..627: mol_type = other DNA
atggatagtgatgaaacgggtttcgaacactcaggcttgtgggtcagcgtgttggccggactgctgctgggcgcatgccaagcacaccctatacccgacagctccccgctgcttcagttcgggggacaagttcgccaacgctacttgtacacggacgatgcgcagcagacagaggcccatctggagattagagaggacgggacagtcggcggggccgcggatcagagcccggagtcgctgctgcaattgaaagccctgaagcccggtgtgatccagatattgggggttaagaccagccgctttttgtgccaacgcccagacggcgctttgtacggtagcctgcatttcgacccggaggcctgctcctttcgagagctgctgctggaagatggatataatgtgtatcagagtgaggctcacggcctgcccctacacctaccgggcaacaagagtccgcatcgcgatcccgcaccacgcggccccgctagatttctgcccctgcccggattgcccccagcattgcctgagcccccaggcatcctggcaccacagccaccggatgttggctcaagcgacccgctgtccatggttggcccgagccaggggcggagccctagctacgcaagc

SEQ ID NO: 11473 - DNA, 627 bp, synthetic construct
  misc_feature 1..627: note = source = /note="Description of Artificial Sequence: Synthetic coding sequence"
  source 1..627: mol_type = other DNA
atggactccgatgaaactggattcgaacactcgggactctgggtgagtgtcctcgctgggctgcttctcggagcctgccaggcccaccctataccagactcttccccgctgctccaatttggcggccaggtgcgccagagatacctgtacacagacgacgcccagcaaactgaggctcatctggaaattcgggaagacgggactgtgggcggcgccgcagatcagagtccggaatccctactccaactcaaggccctgaagcccggggtcatccagatcctcggcgtcaagacaagtcgcttcctctgccagcgaccagacggcgccctatacggttcattgcactttgatcccgaggcatgtagcttcagagagttgttgcttgaggacggctacaatgtatatcagtcagaggctcacggactgccgctgcacctgcccgggaacaaaagtccacatagagatcctgcaccccgagggccagcacgcttcctgccacttcctgggctcccccccgccctgccagagccgccagggattttggcgccgcagccccccgacgtggggtctagcgacccgctgtccatggttggcccctcgcagggcagaagccctagttacgccagt

SEQ ID NO: 11474 - DNA, 627 bp, synthetic construct
  misc_feature 1..627: note = source = /note="Description of Artificial Sequence: Synthetic coding sequence"
  source 1..627: mol_type = other DNA
atggattccgacgagacggggtttgaacactctggtttgtgggtctcggtcctcgctggtttattgttgggtgcatgccaggcacacccgattccggatagctctccacttctgcagtttggtggccaggtgcgccagagatacctgtatacagatgatgctcagcagacggaagcacaccttgaaattagagaagacggtacggtgggcggagcggcggaccagagccctgaatcgctcttgcagctgaaggcgctgaaacccggcgttattcaaatattgggggtcaagacgtcgcgttttctgtgtcaacggccggatggggcactttacggctcattacattttgatccagaggcctgttcatttagagagttactgttggaagacggctataacgtgtaccaatctgaggcacatggacttccgctgcatttgcctgggaataaatcgccgcatcgtgacccggctcctagaggacctgcgagatttcttcccctgccgggcctaccaccggctcttccggaaccgccggggattttggctcctcagccaccggacgtagggagttccgatccattatccatggtgggaccgagccagggtagatcacctagctatgcatca

SEQ ID NO: 11475 - DNA, 627 bp, synthetic construct
  misc_feature 1..627: note = source = /note="Description of Artificial Sequence: Synthetic coding sequence"
  source 1..627: mol_type = other DNA
atggattccgatgaaacgggatttgaacattctggcctgtgggtatcggtccttgcaggacttctgctgggagcatgccaagcacaccctataccggattcgtcccccctgctccagttcggaggacaggtgcggcaacgttacctgtacaccgatgacgcccagcaaactgaagcgcatcttgagattagggaggatggtactgtgggtggggcggcagaccaatcgcccgagtcactgctgcagctcaaggctctgaaaccaggtgtgattcaaatccttggagttaagaccagcaggtttctgtgtcaaaggcccgatggggcattgtacggttcactgcactttgatcctgaagcgtgtagcttccgtgaactgcttcttgaagatgggtacaatgtctaccagtcagaagcacatggacttccgcttcaccttcccggaaacaagtcccctcatcgcgacccagcgcctcgtggcccggcaagatttttgcccttgccagggctcccacctgcattgcctgagccgccaggaatccttgctcctcaacctcccgatgtgggctcgtctgacccactttcaatggtgggaccatcccaggggcgaagcccttcatatgcttca

SEQ ID NO: 11476 - DNA, 627 bp, synthetic construct
  misc_feature 1..627: note = source = /note="Description of Artificial Sequence: Synthetic coding sequence"
  source 1..627: mol_type = other DNA
atggattctgacgagaccggtttcgagcatagtggcttatgggtgagcgtgctcgctggccttttgctaggcgcctgtcaggctcatccaatcccagatagttccccgctgctgcagtttggcggccaggtgcggcaacgctatctttacaccgacgatgctcaacagactgaagctcacctggaaattcgagaagatgggactgtggggggagccgctgatcagagcccagagagtcttctgcagctcaaagctctgaaacctggggtgattcagatccttggtgttaagacttccaggtttttgtgccagcgtcccgacggagccctctatggctccttgcacttcgatcccgaggcatgctccttcagggagctcctgcttgaggacggctacaatgtgtatcagagtgaggcacacggcctgcctctccacctcccggggaacaagagtccgcaccgagatccggccccccgtgggcctgccaggttcctccctctgccaggtttaccgccagcgctaccagagccgccaggaatactggctccacagccccccgacgtgggctcaagcgatcccctcagtatggtgggaccttcccaggggagaagcccatcttacgctagc

SEQ ID NO: 11477 - DNA, 627 bp, synthetic construct
  misc_feature 1..627: note = source = /note="Description of Artificial Sequence: Synthetic coding sequence"
  source 1..627: mol_type = other DNA
atggattcggatgagacggggttcgaacactccggtttgtgggtgtcagtcttggccggattgcttctgggggcctgtcaggcccaccctatcccggactcgtcaccacttctccagtttggcggccaggtcaggcaacggtacctgtacaccgacgatgctcagcaaaccgaagcgcacctcgaaatccgcgaggacggaaccgtggggggcgctgctgaccaatcgccagagtccttgctccagcttaaggcgttgaagccgggagtgatccaaatactgggagtcaaaacttctaggttcctgtgccaacgaccggatggtgccttgtacggctcgctccacttcgatccggaagcatgctcgttccgggaacttttgctggaggacggatacaatgtgtaccagtccgaggcacatggcttgccactgcatttgccgggaaacaagagcccgcatagggacccggcaccgcgcggaccggccagatttctgcccctccccggactcccgccggcgcttccagaacccccagggattctggccccgcagcctccggacgttggatccagcgaccccctctcgatggtgggaccatctcaaggacggtccccctcgtatgcatcc

SEQ ID NO: 11478 - DNA, 627 bp, synthetic construct
  misc_feature 1..627: note = source = /note="Description of Artificial Sequence: Synthetic coding sequence"
  source 1..627: mol_type = other DNA
atggacagcgatgagacaggtttcgaacatagcgggttgtgggtgagcgtattagctgggttactcctaggagcttgccaggcccaccctattcccgactcttctcctctgttacagttcggcggacaggttaggcagaggtatctgtataccgatgatgcacagcagaccgaagctcatctggagattagagaggatgggaccgtcggcggcgccgccgatcagagccccgagtccctattgcagctgaaggcactgaagcctggggtgatccaaattctaggcgtgaaaacttccaggtttttgtgtcagaggcctgatggcgccctgtacggctcacttcacttcgaccctgaggcttgcagcttcagagaactgctcctggaggacggctacaatgtgtaccagtctgaggcccatggcttgccattgcatctgcccggaaacaagtctccacaccgcgaccctgctcctcgaggcccagcgaggtttctccccctcccaggcctgccacctgcccttcccgagccgcctggaatcctggctccccagccccctgatgtcgggtcctctgacccattaagcatggttggaccctcacaaggcagaagcccatcttatgcctca

SEQ ID NO: 11479 - DNA, 627 bp, synthetic construct
  misc_feature 1..627: note = source = /note="Description of Artificial Sequence: Synthetic coding sequence"
  source 1..627: mol_type = other DNA
atggactcggacgagaccggattcgaacactccggattgtgggtctctgtgctggcaggactcctccttggcgcttgccaagctcatcctattcccgactccagcccacttctacagtttgggggacaagttagacaaaggtacctgtacacagatgatgctcagcagactgaagctcatcttgaaattcgggaagacggcacagtagggggtgccgccgatcagtctccagagtccctgctgcagctcaaggctttgaaacccggcgtgatccagattctcggcgtcaagaccagccgcttcctctgccaacggcccgatggcgccctatatggttctttgcatttcgacccagaagcttgcagtttccgggagctcttgctcgaggacgggtacaacgtctatcaatctgaagcccacgggttaccccttcacctgccaggcaataaatcaccccaccgcgaccccgcaccccgcgggcctgctcggtttcttcccctgcctggactgcctcccgctctacccgaaccacccggcattctggcccctcagccccccgatgtcggcagtagcgacccactaagcatggtgggccccagtcaggggagaagtccctcatatgcgagt

SEQ ID NO: 11480 - DNA, 627 bp, synthetic construct
  misc_feature 1..627: note = source = /note="Description of Artificial Sequence: Synthetic coding sequence"
  source 1..627: mol_type = other DNA
atggacagcgacgagactggatttgaacattcagggctctgggtgtcagtcctggccggcctgcttctgggagcgtgtcaagcccacccgattcctgactctagcccactcctgcagttcgggggtcaagtgcgccagcggtatctctacaccgacgatgctcaacagactgaagcacacctcgaaatccgcgaagatggaaccgtgggaggcgctgcagaccagagcccggagtccctgctgcaacttaaggctctgaaaccaggagttatccagatcctcggtgtcaagacctcgcgatttctgtgccagcgaccagatggagctttgtacggctccctgcatttcgaccccgaagcgtgctccttccgtgagctgctgctcgaggacggatacaatgtttaccagtcagaagcccacggattgccgctgcatcttccgggcaacaagagcccacacagagatcccgcccctcggggcccggcacggttcctgcctcttcctggactccccccggccctgccagagcctcctggaatccttgcgcctcagccgccagacgtgggatcaagcgatccattgtcaatggtggggccgagccaggggcgctccccgtcctacgcgagc

SEQ ID NO: 11481 - DNA, 627 bp, synthetic construct
  misc_feature 1..627: note = source = /note="Description of Artificial Sequence: Synthetic coding sequence"
  source 1..627: mol_type = other DNA
atggacagcgatgagacgggcttcgagcactcaggactttgggtgtcagttctagctggcttactgctgggggcgtgccaggcacaccctatccctgatagttctcccttgttgcagttcggtgggcaggtgcggcaacgatacctgtacaccgatgacgctcaacagaccgaggcacacctggagatccgtgaggatggcactgtggggggtgccgctgatcagagtccagagtccctccttcagctaaaggctctaaagcccggggtgattcaaatactgggggtcaagacatctcgcttcctttgccagcggccagatggcgcactctacgggtccctccattttgacccagaggcctgcagtttccgtgagttattgttggaggatggttacaacgtgtaccagagcgaagctcatggcttaccccttcatctgcccgggaacaagagccctcaccgtgatcccgcaccaaggggccccgcccgatttttgcctctgccgggactgcccccggcactccccgaacctcccggcatcctggccccacagcctccagacgttggaagttcggaccctctcagcatggtaggtccatcccagggcaggagtccttcatatgctagt

SEQ ID NO: 11482 - DNA, 627 bp, synthetic construct
  misc_feature 1..627: note = source = /note="Description of Artificial Sequence: Synthetic coding sequence"
  source 1..627: mol_type = other DNA
atggattccgacgaaaccggattcgaacatagcgggctgtgggtgagcgtgctggcagggcttcttctgggtgcatgccaggcacatcctattccagactcaagccctcttctccagtttgggggtcaagtcagacaacgatacctgtacaccgatgatgcacagcagacggaagcacatctcgagatacgtgaagatggtactgtcggtggtgcggcagatcaatcccctgagtcactgctccaacttaaggcactgaagcctggagttatacagattctgggcgtgaaaacgtcccgatttctttgtcaacgcccagatggagccctgtacggatcgctgcactttgatcctgaggcatgttcctttcgggaactgcttcttgaagatggctacaatgtctatcagtcggaagcccatggcctcccactccacctgcctggcaataagtcgccccaccgcgacccagcacctaggggacctgcaagattccttccattgccgggacttccacctgcgctccccgagccccccggtattctcgcccctcagccccccgatgtcggctcgtctgacccactgtccatggtgggtccttcacagggacgttcgccgtcatacgccagc

SEQ ID NO: 11483 - DNA, 627 bp, synthetic construct
  misc_feature 1..627: note = source = /note="Description of Artificial Sequence: Synthetic coding sequence"
  source 1..627: mol_type = other DNA
atggactctgacgagactggattcgagcacagcggcttatgggtctccgttctggctggccttctactgggggcttgtcaagcccaccctatccctgattctagtcctctcttacagttcggcggacaggttcggcaaagatatctgtacaccgatgatgcccagcaaaccgaagcccacctcgaaattcgcgaggatggcaccgtgggcggtgctgccgaccaatcacccgagtccctcctgcagcttaaagccctgaagcctggcgtgattcagatactgggggttaagacctcacgctttctctgccagcgccccgacggtgccttgtacggtagcctgcattttgatcctgaggcttgctcctttagggagctactgctggaggatggctacaatgtgtaccagtcagaagctcacggcttgcctctgcacctaccaggcaataagagtcctcacagagatccagcacctaggggccccgcccggtttctgccactccctggtctgcccccagccctgccggagcctccaggcatactggcccctcaaccacctgatgtgggaagttctgaccccctaagcatggtgggccctagccagggacgctcccctagttatgctagt

SEQ ID NO: 11484 - DNA, 627 bp, synthetic construct
  misc_feature 1..627: note = source = /note="Description of Artificial Sequence: Synthetic coding sequence"
  source 1..627: mol_type = other DNA
atggatagtgatgaaacagggtttgagcactccgggctgtgggtctctgtgcttgccggactgttgctcggagcctgtcaggcccatcccattcccgattcatcacccctacttcagttcggaggacaggttagacagcgctatctgtatactgatgacgctcagcagactgaagcccacttagaaatccgcgaagatggaacagtcgggggggcggccgatcaatctcccgagagtttgcttcaactaaaagcactaaagcccggggtgatccagatcttaggagtgaaaacttcaagatttctatgtcagaggccagatggagcactctacggatctcttcattttgatccagaagcctgttcttttcgggagctattgcttgaggatggatacaatgtgtatcaatccgaagcccacgggctgccactccatcttcccgggaacaaatccccgcatagagatccagcccctagagggccagctaggttcctgcccctccctggactccccccagccctgccagaacctcctggaatactagcaccacagcctccagatgtcgggtcatcagatcctctgtctatggtggggccatctcagggacgatctccttcttacgcatcc

SEQ ID NO: 11485 - DNA, 627 bp, synthetic construct
  misc_feature 1..627: note = source = /note="Description of Artificial Sequence: Synthetic coding sequence"
  source 1..627: mol_type = other DNA
atggactcagacgaaaccggattcgagcactccgggctctgggtgtccgtgctggcagggttgctgctgggagcgtgccaggcacacccaatcccagattcgtccccgctcctccaatttggcggacaggtgagacagaggtatttgtacactgacgatgcgcaacagaccgaggcacatctggaaattcgggaggacggtacggtcggaggagcggctgaccaatcccctgagagcctcctgcagttgaaggccctgaaaccgggagtcattcagatcttgggcgtcaagacctcgaggtttctgtgccagcggccggatggtgctctgtacggttcgctccatttcgatcctgaagcatgttcgttcagggaactgctccttgaagatggttacaacgtataccagagcgaagcccatggtctgcccctccatcttccagggaacaagtcgccgcaccgcgaccccgcaccacgaggcccggcccgcttcctgcctctccctggactgccgccagcactgccagagccgccaggaatcctcgcaccccagccccctgacgtgggaagctcggaccccctgagcatggtgggaccgtcgcaagggaggtcgccgtcgtacgcaagc

SEQ ID NO: 11486 - DNA, 627 bp, synthetic construct
  misc_feature 1..627: note = source = /note="Description of Artificial Sequence: Synthetic coding sequence"
  source 1..627: mol_type = other DNA
atggactcagatgaaaccgggtttgagcattccgggctctgggtgtctgttctggctggcctattgctgggggcgtgtcaggctcacccaattccagacagttcccctctgctgcaattcggtggtcaagtgaggcagagatatctgtataccgatgacgctcagcagaccgaggctcacctcgagattcgcgaagatgggaccgtaggcggagccgctgatcagtccccagaaagcctcctccagctgaaggcattaaagcccggcgtaattcagatacttggcgtcaagactagccggttcctctgccagagacccgatggcgcactgtatggttcacttcactttgaccctgaagcctgcagcttccgggagttgttgctggaggatggctataatgtctaccagtctgaggcccacggactaccactacatctcccaggaaacaaatcacctcatcgggaccccgcaccaagaggaccagcaagattcctgccactcccaggcttgccgcctgccctgcctgaacctcccgggattctagccccccaacctcctgatgtcggaagctccgaccccctgagtatggtcggtccatctcaagggaggtcaccatcttacgcttca

SEQ ID NO: 11487 - DNA, 627 bp, synthetic construct
  misc_feature 1..627: note = source = /note="Description of Artificial Sequence: Synthetic coding sequence"
  source 1..627: mol_type = other DNA
atggacagcgacgagaccgggttcgagcacagtgggctctgggtgtccgtcttggcggggctgctgctgggggcttgtcaggcgcaccccatacctgattcatcccccctgttgcagtttggcgggcaggtcagacagcggtatctgtacactgatgatgctcagcagaccgaagcccacctcgagattcgcgaggatggcacggttgggggcgcggccgatcagtccccggagtccctgctccagctcaaagccctcaagcctggggtaatacagattctcggagttaaaacctctagattcttgtgtcagcgtcctgatggggcactgtacggaagcttgcactttgatcccgaggcttgtagctttcgcgaactgctccttgaagatgggtacaacgtctaccagtccgaagcacacgggcttcccctccatctaccaggaaataagagcccccaccgcgaccccgcaccgcggggtccagcccgctttctccctttgcctggactcccgccagcgctgcctgagcctcccggcattcttgctcctcagccaccagatgtcggttctagcgatcctctgtctatggtggggccttcacaagggaggagtcctagctatgccagt

SEQ ID NO: 11488 - DNA, 627 bp, synthetic construct
  misc_feature 1..627: note = source = /note="Description of Artificial Sequence: Synthetic coding sequence"
  source 1..627: mol_type = other DNA
atggacagcgatgaaaccggcttcgagcattccggactgtgggtgtcagtcctggccggtctgcttttgggagcttgccaggctcacccgatccccgattcctctccgcttctgcaattcggaggtcaggtcagacaacggtacctctacactgatgacgcccagcaaacggaggcacatctcgagatccgggaagatggaaccgtgggtggagccgctgatcaatccccggaatcgctgctgcagctcaaagcgctgaagcctggagtgatccagatcttgggagtcaaaactagccggttcctgtgccagcgcccggacggagcgttgtacggatccctgcattttgatccggaagcctgctccttccgcgagctgctccttgaggacggttacaatgtgtaccagtccgaggctcatggcctgccgctccatttgcctggaaacaaatcgccacaccgggaccccgcgccgcgaggcccggcgagattcctgcctctccccggactgcccccagcgctgcctgagccgccgggaattctggccccgcaacctcccgacgtggggtcgtcggatccgctgtccatggtgggaccgtcgcagggccggtcgccatcctacgcgagc

SEQ ID NO: 11489 - DNA, 627 bp, synthetic construct
  misc_feature 1..627: note = source = /note="Description of Artificial Sequence: Synthetic coding sequence"
  source 1..627: mol_type = other DNA
atggactccgatgagaccgggttcgagcactcaggactttgggtttccgtgttggccgggctactgctgggggcctgccaggcccacccaatccctgatagcagcccgctactccaatttggaggccaggtaagacaacgatacttatataccgatgacgctcagcagactgaagcacatcttgaaattcgagaggatggcacggttgggggcgcagccgatcagtccccggagtccctcttgcagctgaaagccttgaaacctggcgtcattcagattctgggtgtcaagacttctcgattcctttgccagcggccagacggcgcgttatacggtagcctccatttcgatccagaagcctgcagttttagggagttactgttagaggatggttacaatgtttaccagtcagaagcgcatggtctacctctgcatttgcctggcaataagtctccacatagagaccccgccccacggggtccagcgcgatttcttccactcccgggtcttccgcccgctctcccagaaccaccaggaattctggccccacaaccccctgatgtgggcagttccgacccgctgagcatggtgggtccctcacagggtagatcaccatcttatgcaagc

SEQ ID NO: 11490 - DNA, 627 bp, synthetic construct
  misc_feature 1..627: note = source = /note="Description of Artificial Sequence: Synthetic coding sequence"
  source 1..627: mol_type = other DNA
atggacagcgatgagactggatttgaacattcagggctgtgggtgagcgtgcttgcaggtctgctccttggagcctgtcaggcacacccaattccggatagctcgcctcttttgcaattcggaggccaggtcagacagagatacctctacaccgacgatgctcagcagaccgaagcccatctggaaatcagggaggacgggactgtgggtggggcagcagatcaatcgcctgaatccctgttgcaactgaaagcactgaaacccggggtcatccaaattctcggggtgaaaacgagtcggtttttgtgccagaggcccgacggcgcgctgtacggctccctccatttcgatccagaagcatgttcctttcgagaactcttgcttgaggatggctataatgtgtaccagagcgaagcccacgggttgccccttcatttgcctggaaataagtcaccacacagagatcccgcacctcgaggacctgcacggttccttcctttgcctggtctgccccctgcactgccagagccgcccggtatcctggccccacaacccccggacgtcgggtcctcagatccactttcgatggtggggccatcccaaggacgctcaccatcctacgcttca

SEQ ID NO: 11491 - DNA, 627 bp, synthetic construct
  misc_feature 1..627: note = source = /note="Description of Artificial Sequence: Synthetic coding sequence"
  source 1..627: mol_type = other DNA
atggactcagacgagacagggttcgagcactcgggtctgtgggtctccgtcctggcaggactgctgctgggggcttgtcaggcccacccaatacccgacagctcccccctgctgcagtttggcggccaagtgcggcagcggtacctgtataccgatgatgcgcagcagaccgaggctcacctggaaattagggaggacggtactgttggtggagctgccgatcagagtcccgagtcattgctgcagctgaaggccctgaagcccggggttattcagattctgggagttaagacctcacggttcctatgtcagcgcccagacggagctttgtacggaagcttgcatttcgaccctgaagcttgctcctttcgggagctactgctggaagatgggtacaacgtgtaccagtctgaggcccacgggctgcccttgcatctccccggtaacaaaagcccccatagggatccggctcctcggggccccgcaaggttccttcctctgcctggtttgccgccagctctcccagaaccaccaggaatcctggcaccccagcctccagacgtagggtcttctgatccgctgagcatggtgggtccgagccaagggcggtccccaagctatgcctca

SEQ ID NO: 11492 - DNA, 627 bp, synthetic construct
  misc_feature 1..627: note = source = /note="Description of Artificial Sequence: Synthetic coding sequence"
  source 1..627: mol_type = other DNA
atggattcagacgaaacgggattcgagcattcaggactgtgggtgtcggtcctcgccggactgctgctgggggcatgtcaggcccatccaattccggacagcagcccgctgctccagttcgggggacaggttcgacaacggtacctgtacactgatgacgctcagcaaactgaggctcacttggaaatcagagaggacggaaccgtgggtggagccgctgatcagtcgcctgaaagcctgcttcaactgaaggccctcaagcccggtgtgatccagatcctgggggtgaaaacctcgcggttcctctgccaaagaccggatggagcactgtatggatctctgcatttcgacccagaggcctgctcctttcgcgagcttctgcttgaagatggctacaacgtctaccagtcggaagcgcacggtttgcctttgcacctcccgggcaataagtccccgcacagggaccctgcgccgcgcggacccgcgcggtttctcccgctccctggcctgccgccagcgctgcccgaaccgccaggcatcctggccccgcaacctccagacgtgggctccagtgacccactctcgatggtcgggccatcccagggacgctcaccgagctacgcatcc

SEQ ID NO: 11493 - DNA, 627 bp, synthetic construct
  misc_feature 1..627: note = source = /note="Description of Artificial Sequence: Synthetic coding sequence"
  source 1..627: mol_type = other DNA
atggactctgacgagacaggttttgagcattccggattgtgggtcagcgtgctagctggacttttactgggtgcctgccaggctcacccgatcccagactcctcaccgctgctgcaatttggcggccaggtcagacagcgttacctctacacggacgacgcccagcagactgaagctcatttggagattcgagaggatggtactgtgggaggtgctgcggatcagagcccagagtctctattacagcttaaggccctcaaacccggggttatccagatactgggcgtgaagacatcgaggttcctatgccagcgccccgacggggcactgtatggttctttgcatttcgaccctgaggcttgtagtttccgcgagctgctgttagaggacgggtacaacgtataccaatccgaggcccatggactgcctctccatctgcctggcaataaaagcccccaccgggaccccgcgcctcgcggccccgctagattccttccactgccaggcctccccccagcgttgcctgagccccctggaatactggccccccaaccaccggatgtcgggtcatcagaccccctgagtatggtgggcccatcccaggggaggtcaccttcctatgccagc

SEQ ID NO: 11494 - DNA, 627 bp, synthetic construct
  misc_feature 1..627: note = source = /note="Description of Artificial Sequence: Synthetic coding sequence"
  source 1..627: mol_type = other DNA
atggattctgacgaaactggcttcgagcactctggactctgggtgagcgtattggcggggcttctcttgggtgcttgccaggcccacccaatcccagattcgagcccactgctgcagttcggaggacaggtgaggcagcgctatctctacacggatgacgcccagcagactgaggcacatctggaaattagggaggacggcaccgtgggaggagccgcggatcagtcacctgaaagcctgctccagctcaaggccctgaagccgggtgtcatccaaatcctgggcgtgaaaacctcccggttcctgtgtcaacggcctgacggtgcactttacggatctctgcattttgacccggaagcctgctcgttcagagagctgctgcttgaggatggttacaacgtctaccagtcggaagcacatggactcccgttgcacctgcctggcaataagtcgccccatagggaccccgccccgcggggaccggcacgctttctgccacttcctggactcccgccggctctgccggagcccccgggaatcctcgctccgcagcctccggacgttggctcctccgatccgctgtccatggtgggaccctcccaaggtagaagcccaagctatgcctcc

SEQ ID NO: 11495 - DNA, 627 bp, synthetic construct
  misc_feature 1..627: note = source = /note="Description of Artificial Sequence: Synthetic coding sequence"
  source 1..627: mol_type = other DNA
atggactccgacgagacaggctttgaacattccggactgtgggtgtccgtgctggctggacttctgcttggggcttgccaggctcatcccattcccgatagcagccccctgttgcagtttggtgggcaggtgcggcagcgctacctgtacacagacgacgcgcagcagactgaagcccacctggagatcagagaagatgggacagtggggggtgccgccgaccagagccccgagtcccttctacagctcaaagctcttaaacccggtgttattcaaattctgggagtgaaaacatcacgatttttgtgccagcggcccgacggagctctgtacggttcactccattttgacccagaagcgtgctcctttcgcgaactgcttttagaggacggctataatgtctaccagtctgaagcgcatggattgccactgcacctgcccggcaataagtcacctcaccgcgaccccgctccgcgcggccccgctcgctttctaccattgccaggcctgcctcccgcgttgcctgaaccaccaggaattctagctcctcaaccgcctgacgtgggctcaagcgatcccctgagtatggtcggaccgtctcagggcagatccccgtcatacgcatcc

SEQ ID NO: 11496 - DNA, 627 bp, synthetic construct
  misc_feature 1..627: note = source = /note="Description of Artificial Sequence: Synthetic coding sequence"
  source 1..627: mol_type = other DNA
atggacagcgacgagactgggtttgaacatagcggcttgtgggtttcggtcctggcagggctcttgttaggtgcctgtcaggcccatccgatacctgacagctcacccttactgcagttcggcgggcaggtccggcagaggtatctttacacagatgacgcccagcaaacggaggcacatctcgagatcagagaagacggaacagtgggaggtgctgctgatcagtcaccagaaagcctcctacagctgaaggccctgaaaccgggcgtgattcagatcctcggagtgaaaacttcccggttcctttgccaaaggcccgatggagctttgtacggctccctccactttgatcccgaggcttgctccttccgggaattgcttctggaggatggttataatgtctaccagtccgaagcccacggactgcctctccacctgcccggaaacaaaagcccacaccgggacccagccccgaggggtccagctcgatttctacccctgcccggattacctccagctctgccggagccccctggcatcctcgccccccagccacccgatgtcgggtcctctgacccgctgagtatggtaggccccagccaggggcggtctccatcatacgcttca

SEQ ID NO: 11497 - DNA, 627 bp, synthetic construct
  misc_feature 1..627: note = source = /note="Description of Artificial Sequence: Synthetic coding sequence"
  source 1..627: mol_type = other DNA
atggattcggatgaaaccgggtttgagcactctggcctctgggtgtcggtcctggccggtctgcttctgggagcttgtcaggcccaccctattccggactcaagcccacttctgcaatttggaggccaagtgaggcagcggtacctttacaccgatgatgcgcaacaaaccgaggcacatcttgaaataagggaggatggcactgtgggtggggccgcagatcagtcccccgagtcgctccttcaattgaaagcactcaagcctggagtcatccaaatcctcggcgtgaaaacttcgaggtttctttgtcagcgccctgatggggcactctacggctccctgcattttgatccggaagcatgtagcttccgggaactgctcctggaggacgggtacaacgtctatcagagcgaagcccacgggctccccttgcatctgccaggtaataagtcccctcacagggacccagccccaaggggtcctgcgagatttcttccactccctgggcttccccctgcattgcccgaaccaccaggaattctggcaccacagccacccgacgtgggatcgtccgaccccctctcaatggtcggaccctctcagggtagatcgccatcctacgcatcg

SEQ ID NO: 11498 - DNA, 627 bp, synthetic construct
  misc_feature 1..627: note = source = /note="Description of Artificial Sequence: Synthetic coding sequence"
  source 1..627: mol_type = other DNA
atggattccgacgagaccgggttcgaacactccggtttgtgggtgtccgtcctggcgggcctgctgctgggtgcttgccaggcccacccgatcccagattcaagccccctcctacaatttggcgggcaggtcagacagaggtatctctatacagatgatgctcagcaaacggaggcacatctggagatccgggaggacggcacagtaggaggcgcagccgaccagtcaccagaatccttgttgcagctcaaggctttaaagcctggcgtcatccagatcctgggtgtgaagacttctaggttcttgtgccaacggcccgacggcgccctgtatggaagtctgcacttcgatcctgaagcttgtagcttcagggagctgctgctggaggacgggtataatgtctatcaatcggaagctcatggattgccactccacctacctggaaataaatccccccatcgcgaccccgctcccaggggtcctgctcgattcctacctttacctggcctccctccggctttgcctgagccccccggtatcttggcccctcagcctcccgatgttggaagctcagaccctctgtctatggtgggcccctcccaggggcggtcccctagctacgccagc

SEQ ID NO: 11499 - DNA, 627 bp, synthetic construct
  misc_feature 1..627: note = source = /note="Description of Artificial Sequence: Synthetic coding sequence"
  source 1..627: mol_type = other DNA
atggactcagacgagaccggttttgagcatagtgggctgtgggtgagtgtgctggctgggctactgctcggggcgtgtcaggcccatcccatccccgactcctcacccctccttcagttcggagggcaggtgaggcaaagatacttgtatacagacgatgcacaacaaaccgaggcacatctggaaatccgcgaggacggcaccgtagggggcgctgcggaccagagccctgagtcactgctgcaactgaaggcgttgaagcccggcgtcatccagatcctgggggtcaagactagcagattcctgtgtcagcgcccagatggcgcactatacgggagtctgcacttcgacccggaagcctgctcttttcgcgagctactgctggaagatggatataacgtgtatcaatctgaggctcacggcctgccattgcacctgcctgggaataaatctccccatcgtgatcctgcaccccgggggcccgcccgcttccttccactgccaggcctgcctccagcactccccgagccacccgggatcctggccccacaacctcccgatgtcgggtcttctgaccccttgtctatggttgggcccagccagggcaggtctccaagctacgcctca

SEQ ID NO: 11500 - DNA, 627 bp, synthetic construct
  misc_feature 1..627: note = source = /note="Description of Artificial Sequence: Synthetic coding sequence"
  source 1..627: mol_type = other DNA
atggatagtgacgagacagggtttgaacatagtgggctgtgggtaagtgtcctagcagggctcttactaggcgcttgtcaggcgcatcctatacctgatagctctcctcttctccagtttgggggtcaggttcgccaaagatatttatacactgatgacgcgcagcagacagaggctcaccttgaaatcagagaggatggtaccgttggcggcgctgcagatcaaagcccagagtcccttctccagctaaaggctcttaagccaggggttattcagatattaggtgttaagacaagccgtttcctttgccaaaggcccgacggtgctctctatggatctcttcacttcgatcctgaggcttgctcttttagggagttgcttctagaggatggttataatgtctaccagtccgaagcacatggcctcccccttcatctccctggtaacaaaagtcctcatagagaccctgcaccaagaggcccagcaagattcctcccactgcctgggcttcctcctgccttacctgagccacccggaatccttgcgccacaaccgccggatgttggttcgtcagatccgttatcaatggttggaccctcgcaggggcgctccccttcctacgctagt

SEQ ID NO: 11501 - DNA, 627 bp, synthetic construct
  misc_feature 1..627: note = source = /note="Description of Artificial Sequence: Synthetic coding sequence"
  source 1..627: mol_type = other DNA
atggactcagatgagactgggttcgagcactctggactgtgggtcagtgtgctggccgggctgctcctgggcgcctgccaggcacatccaatacccgactcttcacccctgttgcagttcggaggccaggtacgacagcggtacctctatactgacgacgcccagcagaccgaggcccatctggaaatcagggaagatggcaccgtgggcggcgctgccgatcagagccctgagtctcttctccagctcaaggccttgaagccaggagtgatccagatcctcggggttaaaacctcccggttcctgtgtcagcggcccgacggcgcactgtacggatcgctccacttcgaccccgaagcgtgctcttttagggagttactgctcgaggacgggtataacgtgtaccaatccgaagcccatggactcccacttcatttgccaggtaacaaatctcctcacagggatcccgctccccggggacctgcgagattcctacccttgccggggctgccgccagctctgccagagccgccgggtattctcgcaccacagcccccagatgtggggagtagcgaccctctgagcatggtagggccgagccagggcagatccccaagttacgcatcc

SEQ ID NO: 11502 - DNA, 627 bp, synthetic construct
  misc_feature 1..627: note = source = /note="Description of Artificial Sequence: Synthetic coding sequence"
  source 1..627: mol_type = other DNA
atggatagcgacgagacgggctttgaacactcaggcctatgggtttccgtcctggctggcctgctgttaggggcctgccaagcccaccccattcctgactcgagcccgctccttcagttcggagggcaagtcagacagcggtacctgtataccgacgatgcacaacaaactgaggcccaccttgagatccgcgaggatggcacggtcggcggcgctgcggaccagagtcccgagagcctgctgcagttgaaggccctcaagccgggtgtgatccagatccttggcgtgaagacatcgcgcttcttgtgccagcgccccgatggcgctctgtacggttctcttcactttgatccggaggcctgttcgttccgtgaactacttctcgaggatggatacaacgtgtaccagtctgaggcccacggcctccctctacatctgcccggcaacaagagcccgcaccgggatcctgccccccgtggtcctgcgagattccttcccctgcccggccttcctcccgctctccctgaacctcctggaatcctcgctcctcagccacctgatgtgggcagctcggacccgctgtccatggttggaccttcccagggtcgtagcccttcgtacgccagt

SEQ ID NO: 11503 - DNA, 627 bp, synthetic construct
  misc_feature 1..627: note = source = /note="Description of Artificial Sequence: Synthetic coding sequence"
  source 1..627: mol_type = other DNA
atggattccgatgagacaggttttgagcactccgggctgtgggtgtccgtgctggctggactcctgttgggtgcgtgtcaggcacaccccatcccagacagcagccccctgttgcagttcggtgggcaagttcggcagagatatttgtataccgatgatgcgcagcaaactgaagcccacctggaaattagagaggatggtaccgtcggcggtgcagcagatcagtccccagagagcctcctgcagctgaaagcactgaagcccggcgttattcagatcctgggagtgaaaacctctcggttcctctgccagcgccccgacggcgccctctatggctctttgcattttgatcccgaagcatgcagctttcgggagttgctgctcgaggatgggtacaatgtttaccagagtgaggctcatgggctgccccttcaccttccaggtaataagtctcctcatcgggatcccgctcctaggggcccagcccgcttcttgccacttcccggactgcccccggcactgcccgagcctcccggaattctggctccccagccccctgacgtgggaagctctgacccacttagtatggtggggcccagccaggggagaagcccctcttacgcttcc

SEQ ID NO: 11504 - DNA, 627 bp, synthetic construct
  misc_feature 1..627: note = source = /note="Description of Artificial Sequence: Synthetic coding sequence"
  source 1..627: mol_type = other DNA
atggattcggatgaaacgggttttgaacattcgggtttatgggtatcggtactagcgggtctattactaggtgcgtgtcaagcgcatccgataccggattcgtcgccgttattacaatttggtggtcaagtacgtcaacgttatttatatacggatgatgcgcaacaaacggaagcgcatctagaaatacgtgaagatggtacggttggtggtgcggcggatcaatcgccggaatcgttattacaattaaaagcgctaaaaccgggtgtaatacaaatattaggtgtaaaaacgtcgcgatttctatgtcaacgtccggatggtgcgttatatggttcgctacattttgatccggaagcgtgttcgtttcgtgaattactactagaagatggttataatgtatatcaatcggaagcgcatggtctaccgttacatctaccgggtaataaatcgccgcatcgagatccggcgccgcgtggtccggcgcgatttttaccgttaccgggtttaccgccggcgctaccggaaccgccgggtatattagcgccgcaaccgccggatgttggttcgtcggatccgctatcgatggtaggtccgtcgcaaggtcgttcgccgtcgtatgcgtcg

SEQ ID NO: 11505 - DNA, 627 bp, synthetic construct
  misc_feature 1..627: note = source = /note="Description of Artificial Sequence: Synthetic coding sequence"
  source 1..627: mol_type = other DNA
atggatagcgatgaaacaggcttcgagcacagcgggctctgggtctctgtgctggctgggcttctgcttggagcttgccaagctcacccgattcccgattctagccctctcctgcagtttggaggtcaagtgaggcagagatatctgtacactgacgatgcccagcagacagaggcacacttggagataagggaggatggcaccgtcggaggcgctgcagatcagtccccagagagcttgctgcagctgaaagccctgaagcccggcgtgattcagatcctgggcgtcaaaactagtcgatttctctgccagagacctgacggggccctctacgggagcctccacttcgatcccgaagcctgctcattccgcgagctgttgctggaggacggatacaatgtgtaccagagcgaggcccacggactccccctgcacctcccagggaataaatcaccccatcgagatcctgcaccaagaggccctgccagattccttccacttccgggactgcctccagccctgcccgagccccctggaatcctcgccccccagccccccgacgttggctcttctgacccattgtccatggttggacccagccagggcagatctccatcatacgccagc

SEQ ID NO: 11506 - DNA, 627 bp, synthetic construct
  misc_feature 1..627: note = source = /note="Description of Artificial Sequence: Synthetic coding sequence"
  source 1..627: mol_type = other DNA
atggactctgatgaaaccgggttcgagcattcaggactttgggtatctgtcctggccggactcctgcttggagcttgccaggcgcaccctatccccgactcctcccccttattgcagttcgggggacaggtccgccagagatacctgtacaccgacgacgcacagcaaaccgaggctcacctggagatcagagaagatggaacggtcggaggcgccgctgatcaaagccccgagtcactgctccagctgaaagccctcaaaccaggcgtgatacaaatactgggggtcaaaacgagtcgcttcttgtgccaacgaccagacggagccttgtacggaagcctccacttcgaccctgaggcatgcagcttccgggagctgctcctggaagacggctacaacgtgtaccaaagcgaagcccacggcctcccattacatttaccaggaaacaaatcacctcaccgtgacccggccccaaggggacctgcccgcttcctgccgctcccagggttgcccccagcccttcccgaaccgccaggaatactggccccacaacctcctgacgtgggaagttccgaccctctctctatggtcggcccatcacaaggaaggagtccatcttacgccagc

SEQ ID NO: 11507 - DNA, 627 bp, synthetic construct
  misc_feature 1..627: note = source = /note="Description of Artificial Sequence: Synthetic coding sequence"
  source 1..627: mol_type = other DNA
atggatagcgatgaaactggctttgaacattcgggattgtgggtgtcagtgctggccggactgctcctcggtgcatgtcaggcacatcctataccagactcatcccccctgctccagtttggtgggcaggtgcgtcaacgatacctgtataccgatgatgcgcaacaaactgaagctcatctggagattagagaagatggaactgttggtggtgcggctgaccaatcgcccgagagtctgctgcagcttaaggcacttaagcccggcgtaatccagattcttggggtcaagaccagtcgctttctctgtcaacggcccgacggtgcactgtacggttctctccacttcgatcccgaagcctgctcctttcgtgaactgcttcttgaggatggatacaatgtgtaccaatcggaggcacacggacttcccttgcatctgcctggaaacaaatcgccgcatagggatccagcgccacggggccctgccaggttcctcccgctccctggacttcctccagcactccctgaacctccaggtatcctggcacctcaaccgccagacgtcggatccagcgatccactctctatggtcggaccgtcacagggccgctcaccgtcgtacgcaagc

SEQ ID NO: 11508 - DNA, 627 bp, synthetic construct
  misc_feature 1..627: note = source = /note="Description of Artificial Sequence: Synthetic coding sequence"
  source 1..627: mol_type = other DNA
atggacagcgacgagacaggatttgaacattccggcttgtgggtgagcgtgttggccgggctgctgcttggcgcatgccaggcgcatcccataccagattcttctcctctactgcagttcggtggccaggtgagacagagatatctttataccgacgacgcacagcagacggaggcccacctcgagatcagagaggacgggactgtggggggtgctgctgaccaatcgccagaatccttgctgcagctgaaggctctgaagcctggtgtcattcagattctcggtgtgaagacatctaggttcctgtgtcagcggccggacggggccctctacggaagtctgcattttgaccccgaggcctgtagctttcgggaactcctgcttgaagatggttataatgtatatcagtctgaggcccatgggttgccgttacacctgccaggtaacaaatcgcctcaccgggaccctgcccctaggggcccagcaagattcctacccctgccaggactgcctccagctctgccagagcctcccggaatcctagcaccccagcccccagatgtgggctccagcgacccactcagcatggtggggccctcccagggaagatctccaagctatgccagt

SEQ ID NO: 11509 - DNA, 627 bp, synthetic construct
  misc_feature 1..627: note = source = /note="Description of Artificial Sequence: Synthetic coding sequence"
  source 1..627: mol_type = other DNA
atggattcggacgagactggatttgaacacagtggactgtgggtgtccgtgctggcgggtttgctgcttggagcgtgtcaagcgcatccgatcccggactcatcgcctctgctgcagttcgggggtcaagtccggcaaagatacctgtacaccgacgacgcgcagcagacggaggcccatctggagatccgcgaagatggcactgtgggaggggcagctgaccaatcgccagagtcgctgctgcagctgaaagcgcttaagccaggcgtgatccaaatcctgggcgtaaagacttcgagattcctgtgccagcggccagacggcgccttgtacggatccctccacttcgacccggaagcgtgcagctttcgcgaactgctgctggaggatggctacaacgtgtaccagtcggaagcccatggactcccattgcacctgcctggaaataagagcccccatagggacccggcacctcgcggaccggctaggttcctgcctcttcctggactgccaccggcactcccggaaccgcctggaatcctcgccccacaacccccggacgtgggaagctccgatccgttgtcgatggtgggaccttcgcaggggcgctctccctcgtatgcgtca

SEQ ID NO: 11510 - DNA, 627 bp, synthetic construct
  misc_feature 1..627: note = source = /note="Description of Artificial Sequence: Synthetic coding sequence"
  source 1..627: mol_type = other DNA
atggattcagacgaaactggattcgaacactcagggctctgggtgtcggtgctcgctggactgctcctcggcgcatgtcaggcacatcctattcctgatagctccccccttttgcagtttggcgggcaggtgcgccaacggtacctgtataccgacgatgcccagcagaccgaagcccatctggaaattcgagaggacgggactgtgggtggtgccgcagatcaatcacccgaatccctgcttcaactcaaggcacttaaaccaggcgttatccagatcctcggtgtaaagacgtcaagatttctttgccaaagacctgatggagcgctttacggtagcttgcattttgatccagaggcttgttctttcagggaactgcttctggaggacgggtacaatgtctaccagtctgaggcacacggacttcctctgcacctgccgggaaacaagtcgccacatcgggatccagcacctcgcggtccggcaaggtttctgccacttcctggcttgcctccagctctgccggagcctcccggtatactggcaccgcaaccccctgatgtgggcagttcggacccactcagcatggttggaccatctcaaggacgatccccttcgtacgcctct

SEQ ID NO: 11511 - DNA, 627 bp, synthetic construct
  misc_feature 1..627: note = source = /note="Description of Artificial Sequence: Synthetic coding sequence"
  source 1..627: mol_type = other DNA
atggattccgatgaaacgggcttcgaacattccggactctgggtgtccgtgcttgcaggacttctcctcggcgcatgccaagcacatccgattcctgactcatccccccttttgcagtttggagggcaggttagacagcggtacctctacaccgacgacgcacaacaaaccgaagcacacctggagattagagaagatggtaccgtcggcggagccgcagatcaatcgcctgaaagcctgctgcagctgaaagcgctgaagccaggcgtgatacagatccttggtgtgaaaacttcgcggttcctctgtcagcgtccagatggtgcgctgtacggatccctccattttgatcctgaggcgtgcagcttccgggaacttctgctcgaagatggctataatgtgtaccagtcggaagctcatgggcttccgcttcaccttcctgggaacaaatcacctcatcgagatcccgctcccagaggaccagcaaggttcctcccgcttcctggacttccgccagctttgccagagcctccaggaattcttgcaccccagccaccagatgtgggttcgagcgatcctctgtccatggtgggcccctcccagggcaggtccccgtcatacgcatcg

SEQ ID NO: 11512 - DNA, 627 bp, synthetic construct
  misc_feature 1..627: note = source = /note="Description of Artificial Sequence: Synthetic coding sequence"
  source 1..627: mol_type = other DNA
atggattcagatgaaacaggttttgaacattctggtctttgggtttcagttttagcaggtttattgcttggtgcttgtcaagcacacccaattccagattcaagtccactattacaatttggaggtcaagtaagacaaagatatttatacacagatgatgcacaacaaacagaagctcatttggaaattagagaagacgggactgtaggtggagctgcagatcaatcaccagaaagtttacttcaattaaaagcacttaagccaggagtaattcaaattcttggagttaaaacaagtcgttttctttgtcaaagaccagatggtgcattatatggaagtttacatttcgacccagaagcatgtagtttcagggagttacttcttgaagatggttataatgtatatcaaagtgaggcacatggattaccattacatttacctggaaataagtctccacatagagatcctgcaccaagaggacctgcaaggtttttaccattaccaggtcttccaccagcattacctgaaccacctgggattcttgctccacaaccacctgatgttggaagttctgatcctttaagcatggtgggaccaagtcaaggaagatctccaagttatgcttca

SEQ ID NO: 11513 - DNA, 627 bp, synthetic construct
  misc_feature 1..627: note = source = /note="Description of Artificial Sequence: Synthetic coding sequence"
  source 1..627: mol_type = other DNA
atggacagcgacgagactggctttgaacatagtggactgtgggtctccgtccttgcggggctcctacttggagcctgccaagcccacccaatacccgacagctccccactcctccagtttggcggccaggtcaggcaacgatacctttataccgacgacgcccagcagacggaagctcaccttgagattcgggaagacggcacagtggggggcgccgccgaccagtcacctgaaagcctgctccagctcaaggcactgaagccgggcgttatccaaatactcggggtgaagacctcaaggtttttgtgccagcgccccgacggcgccctgtacggttcactgcacttcgacccggaagcctgcagtttccgggaactgttgctggaagacgggtataacgtttatcagtcagaggcccacggcctgccgctccacctgccaggcaacaagagcccgcaccgggacccagccccaagaggacccgcgaggttcctgcctctgcctggattgcccccagccctccctgaaccccccggaatattggccccacagccccccgatgttggcagcagcgaccctctcagcatggtagggccctcccaaggcagatcaccttcctacgcctca

SEQ ID NO: 11514 - DNA, 627 bp, synthetic construct
  misc_feature 1..627: note = source = /note="Description of Artificial Sequence: Synthetic coding sequence"
  source 1..627: mol_type = other DNA
atggattcggatgaaactggattcgaacatagcgggctctgggtgtccgtgcttgcaggactgcttctgggagcgtgtcaagcccaccctattcccgactcatccccactccttcagttcggaggacaagtgagacaaaggtacttgtacactgatgacgcacagcaaactgaagcacatctcgaaatccgtgaggacggaactgtcggcggagcggcagatcagagccctgagtcgctgctgcagcttaaggcactgaagcctggagtgatacaaatacttggtgtgaaaacgtcgagatttctgtgccaacgccctgatggtgcactgtacggcagcctccactttgaccccgaagcatgttcgttccgagaacttctgctggaggatgggtacaatgtgtaccaatcagaagcacatggactgcctctgcatctgccaggcaacaagagcccccatagagatccagctccaaggggtcctgcgcgatttttgcctttgcccggactgccacctgcacttccagaacctccagggattctggcaccccaacctccagatgtgggatcttcggatcctctctccatggtcggaccatcccaggggcggagcccttcatacgcctcg

SEQ ID NO: 11515 - DNA, 627 bp, synthetic construct
  misc_feature 1..627: note = source = /note="Description of Artificial Sequence: Synthetic coding sequence"
  source 1..627: mol_type = other DNA
atggactcggatgagacaggcttcgagcatagtggtctgtgggtgtcggtcttggccggtctgctgctaggagcttgccaagcacacccaatccccgatagtagccccctgttacagtttggaggccaggtgcgccagcgatacttgtacactgacgacgctcagcagacagaagcccacctcgagatcagggaggacggtacggttggaggggcggcagaccaatcacctgagagcctcctgcagctgaaggcgctgaaaccaggtgtaattcagatccttggcgtgaaaacatcaagatttctgtgccagagaccagacggcgccctgtatggctctctccactttgacccggaggcttgttcctttcgcgaactgttgctggaagatgggtacaacgtataccagtcggaggctcacggcttacccttgcacctcccaggcaataaatcaccccatagagaccccgcgcccaggggcccagctaggttcctgccactccccgggctgcctcctgccctaccagagccacctggtattctggccccccagcctcccgacgtgggcagctctgaccccctgagtatggtggggcctagtcaggggcgaagtcctagttatgccagc

SEQ ID NO: 11516 - DNA, 627 bp, synthetic construct
  misc_feature 1..627: note = source = /note="Description of Artificial Sequence: Synthetic coding sequence"
  source 1..627: mol_type = other DNA
atggacagtgatgaaacagggttcgagcactccggactttgggttagcgtactcgccgggctccttctcggggcttgtcaagcccatcctatacctgattcaagccctctgctgcagtttggagggcaggttcgccagcggtatctttataccgacgatgcccagcaaacggaggcccacctcgagattagagaagatgggactgtgggaggggccgccgatcagagccctgagagtttgctccagctgaaagcattgaagccaggtgtgatccagatacttggagttaagacctcccggtttctctgccagcggcctgatggtgccctgtatggcagcctgcatttcgaccccgaggcttgctcctttcgcgagctgctccttgaggatggatacaacgtgtatcagtctgaagcccacggactccctctgcacctgcccgggaataaatcacctcaccgagatcccgctccgcgaggccccgcaaggtttctgccactgcctggtttgcctcccgctctgcctgagccacccggcatactggcgcctcagccccctgatgtgggaagtagcgatcccttgtctatggttggccctagccagggccggagcccaagctatgcctct

SEQ ID NO: 11517 - DNA, 627 bp, synthetic construct
  misc_feature 1..627: note = source = /note="Description of Artificial Sequence: Synthetic coding sequence"
  source 1..627: mol_type = other DNA
atggactccgatgaaacaggttttgaacatagcggtctgtgggtgtccgttttggcaggcttactgctgggcgcgtgtcaagcacatcccattccggattcgtccccgctgttgcagttcggtggtcaggtccgtcagcgatacttgtacaccgatgatgctcagcagaccgaagcacatctcgagatacgggaggatggaaccgtaggtggagcggctgatcagtctccggagtctttgctccagctcaaagcccttaagcccggagtaatccagatccttggagtcaagaccagtcggtttctatgtcaacgtccagatggagccttgtacgggtcgctacacttcgaccccgaggcctgctctttccgggaactacttctcgaagacggctataatgtctatcaatccgaggcacatggcctgcctttgcacctccccggtaacaaaagtcctcaccgtgatccagccccgcgcggccccgcacggttcctgccattgcctggtttgccacctgctctccccgaacctccgggcatcttggctccgcagccacctgacgttggaagctcggatcccttatcgatggtcgggccatcgcaaggtcgatctccctcatatgcatcg

SEQ ID NO: 11518 - DNA, 627 bp, synthetic construct
  misc_feature 1..627: note = source = /note="Description of Artificial Sequence: Synthetic coding sequence"
  source 1..627: mol_type = other DNA
atggattcagatgaaaccggttttgaacactccggactctgggtatctgtcctcgcaggactcctcctgggggcctgccaagcacatcctattccagattcgtcccctcttctgcaattcggtggacaagtgagacagcgatacctgtacactgatgacgcgcaacaaaccgaagctcacctggaaataagggaagatggaactgtggggggagctgcagatcagtcacctgagagccttcttcagctgaaagcacttaaaccaggagtgattcagatactcggagtgaaaacttcccgcttcctctgtcagaggccagatggtgcgctttacggtagcctgcattttgatccagaggcttgttccttccgcgagctgctgctggaagatggttataacgtctaccagtccgaggcacatggacttccactccacctgcccggcaataagtcgccacatcgagatcctgcgcctcgcggaccagccagattcttgcctctgcccggtctgcccccagcacttcccgaaccgccaggtatccttgcacctcaaccacctgatgtgggctcgagcgatccactgtccatggtcggtcctagccagggccggtcgccaagctacgcgtcc

SEQ ID NO: 11519 - DNA, 627 bp, synthetic construct
  misc_feature 1..627: note = source = /note="Description of Artificial Sequence: Synthetic coding sequence"
  source 1..627: mol_type = other DNA
atggattcggatgaaactggattcgagcatagcgggctctgggtgtccgtgcttgctggactcctccttggtgcctgtcaggcgcatccaatacccgactcgtcaccgctcctccaatttggaggacaagtgcgccagcgatacttgtataccgatgacgcccagcaaaccgaagctcaccttgaaattcgagaggacggcactgtgggaggtgcagcagatcagtccccagaatcgctgcttcaactgaaagcacttaagccaggagtgatacaaattctcggggtcaaaactagccgttttctgtgtcaaagaccagacggtgcactttatggtagcttgcattttgacccagaagcgtgctcatttagggaactgctcttggaggacggttacaatgtgtaccagtccgaggcacatggacttcctcttcacctgccgggtaacaagtcgcctcacagagatcctgccccaaggggaccagcacgctttctcccgcttccggggttgcctcccgctcttcctgagcctccaggaattctggcaccacagcccccagatgtcggctcgtccgatccattgtcgatggtgggaccttcgcaaggtagaagcccctcgtacgcatcg

SEQ ID NO: 11520 - DNA, 627 bp, synthetic construct
  misc_feature 1..627: note = source = /note="Description of Artificial Sequence: Synthetic coding sequence"
  source 1..627: mol_type = other DNA
atggactccgacgaaaccggcttcgagcacagcgggctgtgggtgtcggttctcgcgggcttgctcctgggtgcctgtcaagcccacccgatcccggactccagccccctcttgcagtttggcggacaggtgagacaaagatacctgtacactgatgatgcccagcagactgaagcgcatctggagatccgcgaggacggcaccgtcggtggggccgctgaccagagcccggagtcgttgctccagttgaaggctctcaagcccggagtgatccagattctgggagttaagacgtccagattcctgtgccaacgcccggacggagcgctgtacggctcactgcacttcgatcccgaagcctgctcgtttcgggagctgcttctggaagatggctacaacgtgtaccaatcggaggcccacggcctccctctgcacctgcccgggaataagtcgccacaccgggatcctgcaccacggggacctgctcgatttttgccactgccaggactgccgccggccctgcctgaaccgccgggcatcctcgccccacagccgcctgacgtgggatccagcgacccattgtccatggtgggaccatcacaggggcggtcgccgagttatgcctcc

SEQ ID NO: 11521 - DNA, 627 bp, synthetic construct
  misc_feature 1..627: note = source = /note="Description of Artificial Sequence: Synthetic coding sequence"
  source 1..627: mol_type = other DNA
atggactcagatgagacgggcttcgagcactcgggattgtgggtcagtgtcctggcaggactgctgcttggagcgtgtcaagcccacccaatcccggactcaagtcccctgctgcaattcggaggtcaggtgcggcagcgctacctgtacaccgacgacgcgcagcaaactgaagctcacctggaaatccgagaagatggaactgtgggaggggccgccgaccaatcgccagagtcgcttctgcagttgaaggccctgaagccaggcgtcatccagatccttggggtgaaaacttctcgctttctctgccaacgcccagatggcgccctttacggctcgctccatttcgaccccgaggcctgctcattccgggaactgttgcttgaagatgggtacaatgtgtatcagtcggaggctcatggactcccgctgcatctgcctggaaacaagagcccccatagggacccagcaccgcgtgggcctgcacgctttctgcctctcccgggacttccgccagcgctcccagaacccccaggcatcctggctccacagccgcctgatgtgggctccagcgacccgctgtccatggtgggaccatcacagggacggagcccatcatacgccagc

SEQ ID NO: 11522 - DNA, 627 bp, synthetic construct
  misc_feature 1..627: note = source = /note="Description of Artificial Sequence: Synthetic coding sequence"
  source 1..627: mol_type = other DNA
atggactcagatgaaaccggattcgaacatagtgggctgtgggtgagcgtattagccgggctgctactaggcgcgtgccaggcccaccctattcccgacagctccccgttgctacagtttgggggccaggtacggcaacgttatttgtacacggatgatgcccagcagactgaggcccacttggagatccgtgaggatggaactgtcggcggagccgccgaccagtctcccgagtcactgctgcagctgaaggccctgaagcccggcgtgattcaaattttgggagtcaagacctcaaggtttctctgtcagcgacctgacggagccctgtatgggtccttgcattttgatcccgaggcctgctctttccgcgagctgctcctcgaggacggttacaatgtgtatcaatctgaggctcatggcctacctctgcatctcccaggcaacaagtctccccatagagacccagctcctaggggaccagctcggtttcttcctctcccaggtctgccccctgccctgcctgagccacctgggattttggccccgcaacctcctgacgtcggctctagtgacccactcagcatggtaggcccgtctcagggaaggtcaccgtcatatgcctcc

SEQ ID NO: 11523 - DNA, 627 bp, synthetic construct
  misc_feature 1..627: note = source = /note="Description of Artificial Sequence: Synthetic coding sequence"
  source 1..627: mol_type = other DNA
atggacagcgacgaaactggtttcgaacactccgggttgtgggtgtcagtgctcgcgggactgctccttggagcgtgccaggctcatccgattccagacagctcacccctgcttcagttcggcggacaagtgcggcaaagatacctgtacacggacgatgcccagcaaacggaggcgcacctcgagatccgggaagatggcaccgtgggaggagcggccgatcagtccccagagtccctcctgcagcttaaagcgcttaagccgggagtgatccaaattctcggggtcaaaacttcccggttcctctgtcagaggcccgacggagctctctacggaagcctgcacttcgacccggaggcgtgcagctttagagagctcctgctggaagatggatacaacgtctatcagtcagaagcacatggcctgccgctgcacctgccagggaacaagagcccccatcgcgacccagcgccacggggccctgcgcgctttctgccgctgccgggcctcccaccggcccttccagaaccgccgggcatccttgccccacaacctccagacgtgggatcatccgacccactctcgatggttgggccctcccaggggaggtccccatcgtacgcttca

SEQ ID NO: 11524 - DNA, 627 bp, synthetic construct
  misc_feature 1..627: note = source = /note="Description of Artificial Sequence: Synthetic coding sequence"
  source 1..627: mol_type = other DNA
atggactctgacgaaacagggttcgagcactcgggcctgtgggtttctgtgctggctggtctactcttgggagcatgtcaagcacatcccattcctgactcctcccctctgcttcagtttggtgggcaggtacggcagcgatatctgtacactgacgacgcccagcagacggaggcccacctagagattcgagaagacgggaccgtgggcggagccgctgatcagtcccccgagtccctattgcagttgaaagctctaaagccaggcgtgattcagattttgggagtcaagactagtaggttcttatgtcagcgtccagacggggctctctacggtagcctgcacttcgacccagaagcctgcagctttcgtgaactgttgctcgaggacgggtacaacgtgtaccagtcagaggcacatggcctccctttacacttgcccggtaacaaatcaccccatcgggatccagccccaagagggcctgctcgattcttgcccctgccggggctgccgcccgcactgcccgagcctcctggcatactcgccccccaacccccagacgtgggctcatccgaccccctgagtatggtagggccttcccaggggcggtcccctagctatgctagc

SEQ ID NO: 11525 - DNA, 627 bp, synthetic construct
  misc_feature 1..627: note = source = /note="Description of Artificial Sequence: Synthetic coding sequence"
  source 1..627: mol_type = other DNA
atggatagtgatgaaacaggattcgaacactctggactgtgggtatccgtacttgcgggactgctgctgggagcgtgccaggcacaccccatacccgatagtagtccactccttcagttcggggggcaggtacggcagaggtacctgtacacagatgatgcccagcaaacagaagcacatctcgagatacgggaagatgggacagtggggggagcagcggatcagtctcccgagtcgctccttcaattgaaagccctcaagcctggggtaatacagatactaggggtgaaaacttctaggtttctctgccagagaccagatggggctctctatggatccctccactttgatcccgaagcctgttctttccgggaactcttgcttgaagatgggtacaacgtgtatcaatcagaagctcatgggctcccccttcatttgcccgggaacaaatccccgcaccgggatcccgctccccgaggacctgccagatttctccccttgccagggttacctcctgcactccccgaaccaccagggatcctcgcccctcagccgcctgacgttggatcttctgaccccctatcaatggtgggaccttctcaggggagatcgccttcttatgcatcc

SEQ ID NO: 11526 - DNA, 627 bp, synthetic construct
  misc_feature 1..627: note = source = /note="Description of Artificial Sequence: Synthetic coding sequence"
  source 1..627: mol_type = other DNA
atggactcggacgaaactggatttgagcactcgggactgtgggtgtcggtcctcgccggtctgcttcttggagcttgtcaagcacacccaattcctgactccagccccctgcttcagtttgggggtcaggtcagacaacggtacttgtacacggatgatgctcaacaaactgaagcccatcttgagatccgggaagatggaaccgtgggaggcgccgcagaccagtcgcctgaatccctcctgcaactcaaagctcttaagccaggcgtcattcaaatacttggagtgaaaacctcgagattcctgtgtcaacgccctgatggcgcgttgtacggaagcctccattttgaccccgaagcctgttcctttagggagcttctcctcgaggatgggtacaatgtgtaccagtctgaggctcatggtttgccactgcatctcccggggaacaagtctccacatagagatccagcaccacgtggtccggcgagatttcttcccctgcctggattgcctccggccctccctgaaccacctggcattcttgcacctcagccccccgatgtggggagctccgatcctttgtcaatggtgggtccgagccaggggcgttccccatcatatgcaagc

SEQ ID NO: 11527 - DNA, 627 bp, synthetic construct
  misc_feature 1..627: note = source = /note="Description of Artificial Sequence: Synthetic coding sequence"
  source 1..627: mol_type = other DNA
atggactccgacgaaaccggattcgaacactcggggctttgggtgtccgtgctggccggactgctgttgggtgcgtgccaagcccacccgatccctgacagctcaccgctgttgcagtttggaggtcaggtcagacagcggtacctgtacactgacgacgctcaacagactgaggcacacctggagatccgggaagatggcaccgtcggcggcgcagccgatcagtcgccggaaagcctgctccagctgaaggcattgaaaccaggtgtgatccagattttgggcgttaagactagccgctttctctgtcagcgcccagacggtgccctctacggatcgctgcactttgatccagaagcatgttcgttccgcgagctgctgctggaagatggatataacgtgtaccaatccgaggcccatggactgcctctgcatttgcctggaaacaagagcccgcatagggacccggcgccaagaggaccggcgcgattcctgccactgccgggcttgccgccggctctgccggaaccgccgggcatcctggcgccgcagccgccggacgtcggatcgagcgacccattgtccatggtgggaccaagccaaggaagatcgccgagctacgcctcc

SEQ ID NO: 11528 - DNA, 627 bp, synthetic construct
  misc_feature 1..627: note = source = /note="Description of Artificial Sequence: Synthetic coding sequence"
  source 1..627: mol_type = other DNA
atggactcggatgagactggatttgaacactccggcctgtgggtgtctgtgctcgcgggcttattgctcggcgcctgtcaggctcatcccataccagacagttcgccgctgctgcagtttggaggtcaggtgaggcaacgctacctctacacagacgacgcccaacagactgaggcacacctagagattagagaggatggaaccgttggcggcgccgcagaccagtcaccagagtctctgttgcagctgaaggcattgaaacccggggtgatccagattctcggcgtgaaaacctctcggtttctctgccagcgaccggacggggcgttgtatggaagcctccacttcgatcctgaggcatgttcattccgcgagctcctgctggaggatggatacaatgtgtatcagagcgaggctcatggactgccgttgcatcttcccggcaataaatcaccacatagggatcctgctcctcgcggaccggctaggttcctgcccctgcctggccttcctcccgccctgcccgaaccccctggtatattagcacctcagccacccgatgtggggtcgtccgaccctctgagtatggtcgggcccagccagggaagaagccccagctacgccagc

SEQ ID NO: 11529 - DNA, 627 bp, synthetic construct; identical to SEQ ID NO: 11499
  misc_feature 1..627: note = source = /note="Description of Artificial Sequence: Synthetic coding sequence"
  source 1..627: mol_type = other DNA

SEQ ID NO: 11530 - DNA, 627 bp, synthetic construct
  misc_feature 1..627: note = source = /note="Description of Artificial Sequence: Synthetic coding sequence"
  source 1..627: mol_type = other DNA
atggattcggacgaaacaggctttgagcatagcggcttgtgggtcagcgtactagccgggctgctgctaggcgcttgtcaggcgcacccgattccggattccagtcccctgttgcaattcggagggcaggtgcgtcaaaggtacctctatacggatgacgcacagcagacagaggcacacctggagattcgtgaagatggaacggttggcggtgcggcagatcagtcccccgagagccttctccagctgaaagcactgaagcctggagtcatccagatactcggggtcaagacctcccgctttctgtgccagcggcccgatggagctctctacggatctctgcacttcgatccagaggcctgctccttccgggagctccttctcgaagatggatataatgtttatcagtcggaggcccacggtttgccgctgcatctacctggcaacaagtcaccacacagagaccctgcccctcgagggccggcaagatttctccctcttcccggcctgcctcccgcactgccggaacctcccggaattttggccccccagcctccagacgtggggagcagtgaccctctcagtatggttggtcctagtcagggtagaagccctagctacgcatcc

SEQ ID NO: 11531 - DNA, 627 bp, synthetic construct
  misc_feature 1..627: note = source = /note="Description of Artificial Sequence: Synthetic coding sequence"
  source 1..627: mol_type = other DNA
atggacagtgatgagaccgggtttgagcactccgggctgtgggtctcggtgctggcagggctcctcttaggggcatgtcaggcccatccaatccccgacagcagcccactgttgcagtttgggggtcaggttagacagcggtatctgtacacagacgacgctcagcaaaccgaggcgcacctggagattcgcgaggatgggaccgtcgggggcgcagctgaccagtcccctgagtctctgttgcaactaaaagctctaaagcctggcgtgattcagattttgggagtgaagacctcccggttcttatgccagcgaccagatggggcgctgtacggaagtctgcatttcgatccggaagcctgctcattccgggaactgctcttagaggatggctacaatgtgtatcaatcagaggcgcatgggttaccactgcaccttccaggaaacaaaagcccgcacagggatcccgcgccccggggaccagcaaggtttctgccattgcctggcctgccgccggctctgcctgagccacctggaatcctggccccccagccacctgatgttggatcaagcgatcccctctcaatggtgggcccgtctcagggcagatctccatcctacgccagt

SEQ ID NO: 11532 - DNA, 627 bp, synthetic construct
  misc_feature 1..627: note = source = /note="Description of Artificial Sequence: Synthetic coding sequence"
  source 1..627: mol_type = other DNA
atggatagcgatgaaaccgggttcgagcactcaggtttatgggtatcagtactggccggactgctgctcggtgcctgtcaggcccatcctattcccgatagttcccccctgctgcagttcggtggtcaggtccgacagaggtacctgtatacagacgatgcccagcagacggaggcccacctcgagattcgggaagacgggactgtgggcggcgcagcagaccagagccctgaaagcctgctgcagctcaaagcgttgaagcccggtgtcatacagatccttggcgttaagaccagtaggtttctgtgtcagcgacccgatggtgctctttacggcagtttgcattttgacccggaggcgtgttcttttcgtgagctgcttctggaagatggctacaacgtgtatcagtccgaagcccatggcctgccactgcatttgccgggtaacaagtctccacatagagacccagccccccgaggtcctgcacggttcttgccactccccggcctcccccccgctctgccagagccccccgggatcttggctccacagccccccgatgtcggtagctcggatcccttgtccatggtggggccctcccagggcagaagcccttcctacgcgtct

SEQ ID NO: 11533 - DNA, 627 bp, synthetic construct
  misc_feature 1..627: note = source = /note="Description of Artificial Sequence: Synthetic coding sequence"
  source 1..627: mol_type = other DNA
atggatagcgacgaaactggattcgaacactcggggctgtgggtgagcgtgttggcggggctcctcttgggtgcatgtcaggctcacccaatcccggattcatcgccgcttctccaattcggaggccaggtccgccaaagatatctgtacaccgacgacgcgcagcaaaccgaggcgcacctcgaaatccgtgaagatggaactgtgggcggagctgcggaccaaagcccagaatcgttgttgcagcttaaggcacttaaaccgggagtgatccagatactgggcgttaagacgagtcgcttcctgtgccaaaggccggatggtgctctgtacggaagtctgcattttgacccagaggcatgcagctttcgcgagcttctgctggaggatgggtacaacgtgtaccagtcagaggcccacgggttgccgctgcacctccctgggaacaagtccccgcatcgcgacccagccccccggggaccagctcggttccttcccctgccaggactgccacctgccctccctgaaccacccggaattcttgccccgcagccgcccgacgtcggaagctccgatccactcagcatggtcggtccctcacaggggcggtcgccttcatacgcttcc

SEQ ID NO: 11534 - DNA, 627 bp, synthetic construct
  misc_feature 1..627: note = source = /note="Description of Artificial Sequence: Synthetic coding sequence"
  source 1..627: mol_type = other DNA
atggacagcgatgagactggattcgaacactcgggactgtgggtgagcgtcctggctggcctgctgctgggagcctgtcaggcccacccgatcccagattccagtcccttgctgcagttcggtggtcaggtccggcagcggtacctttacaccgatgacgcccaacagaccgaggcacatctcgagatccgagaggacggaaccgtgggcggggccgcggaccagagcccagagtccctgcttcagctcaaagcactgaaaccaggcgtcatccaaattctgggagtcaagacctcgaggtttctctgccaaagacccgacggagccctctacggatcgttgcactttgacccggaagcgtgctcgttccgcgaactgctcctggaagatggttacaacgtgtatcagtccgaagcacacggactgcccttgcacctgccgggcaataagtcaccccaccgggacccggccccacggggaccggctcgcttcctgccgttgccgggactgcccccagctctgccagaaccgcctggaatcctggcaccacaacctccggatgtggggtccagcgacccgctgtccatggtgggcccgagccaaggaagatcgccatcgtatgctagc

SEQ ID NO: 11535 - DNA, 627 bp, synthetic construct
  misc_feature 1..627: note = source = /note="Description of Artificial Sequence: Synthetic coding sequence"
  source 1..627: mol_type = other DNA
atggactctgacgagaccgggtttgagcattctgggctgtgggtctctgtcctagctggcttgctgttaggggcttgccaggcccaccctattcccgattcaagtccgttgttgcagtttggggggcaggtgagacagaggtacttgtacacggacgatgctcaacagaccgaggcacacctggaaatacgcgaggatgggactgtaggtggagccgctgaccagtcccctgaaagtctcttgcagctgaaggcactgaaacccggcgtcattcagatccttggagtaaagaccagtcgcttcctttgccaaaggcctgatggagcgctgtacggaagcctgcacttcgaccccgaggcatgtagcttccgcgaactcctgttggaggacgggtataatgtttaccagagcgaggcccatggcctcccactccacctgcctggtaataaaagtccccaccgggatcccgcgcctagaggtcccgccagattccttccgctgcctggactgcctcctgcgctgcccgaacctccgggcattctggcaccacaaccccctgatgtggggtcatccgacccgctgagtatggtcggcccctcgcaagggcgctcccctagctacgcgagt

SEQ ID NO: 11536 - DNA, 627 bp, synthetic construct
  misc_feature 1..627: note = source = /note="Description of Artificial Sequence: Synthetic coding sequence"
  source 1..627: mol_type = other DNA
atggactcggacgaaaccggatttgagcacagcggactctgggtgtcagtgttggctggactgctgctgggagcatgccaagctcacccaattccggattccagccccctcctccagttcggaggacaggtgcgccaacggtacctctacaccgacgatgcccagcagacggaggcccacctcgagattcgcgaagatggaactgtggggggagctgctgatcagtcgccggagtccttgttgcagctcaaggcgctgaagcctggtgtgatccaaattctgggcgtcaagacctcacggtttctgtgccaaagacctgatggagcgctgtacggttcccttcatttcgacccagaggcctgttcgttcagggagctgttgctggaggacgggtataatgtgtatcaaagcgaggcccacgggctcccactgcacctgcctggaaacaaatccccacacagggatccggccccgcggggtccggcgcgctttctgccgctgccggggctcccgcctgccctcccggagcctccgggcatcctcgcgccgcaaccgccggacgtcggctcatccgacccgctcagcatggtgggaccgtcacaaggccggagcccatcatacgcctcg

SEQ ID NO: 11537 - DNA, 627 bp, synthetic construct
  misc_feature 1..627: note = source = /note="Description of Artificial Sequence: Synthetic coding sequence"
  source 1..627: mol_type = other DNA
atggactccgacgaaaccggattcgaacacagcggactgtgggtgtctgtgctggccggccttcttctcggtgcttgtcaagctcacccgattccagattcatcaccgcttctgcagtttgggggccaggtccgccaaaggtacctgtatacggacgacgcccagcagactgaggcacacctcgaaatcagagaggatggaaccgtgggtggcgctgcggaccagtcaccggaatccctgttgcaactgaaggctctcaagccgggagttatccagatccttggtgtgaaaactagccgcttcctgtgccaacggccggacggggcgctttacggatcactccatttcgatcccgaggcgtgcagctttcgagaacttctcctggaggatgggtacaacgtgtaccagagcgaggcccatggccttccattgcacctccccggtaataagagcccgcatcgggatccagcaccccgcgggccggcacggttcctgcctctcccggggctgccacctgcgcttccagaaccgccagggattctcgcgcctcagccccctgacgtcggaagttccgaccctttgtcaatggtgggcccgtcgcaaggaagaagcccatcgtacgcaagt

SEQ ID NO: 11538 - DNA, 627 bp, synthetic construct
  misc_feature 1..627: note = source = /note="Description of Artificial Sequence: Synthetic coding sequence"
  source 1..627: mol_type = other DNA
atggactctgatgagaccggattcgagcactccgggctgtgggttagcgttcttgcaggcctgttgctgggtgcatgtcaggcgcaccctatcccggactcttctccattgctgcagtttggaggccaggtgagacagcgatacctttacacggacgatgcacaacaaactgaagcgcacctggagattcgcgaagatggaaccgtaggtggagcagcggatcagtctccggagtctctcttgcagctgaaggctctgaagccaggtgtgatccaaatccttggtgtcaaaacctcacgcttcctgtgtcagcgaccggatggtgcgctctacggtagtcttcactttgatcctgaggcctgcagctttcgcgagctgttgctggaggacggctataatgtctaccaatccgaggctcatggactgccgctccacctgccgggcaacaaatctccacacagagacccggcgcctcgcggcccggcgcgtttcctgccgctgccaggcctgccgccagccctgcctgaacctccaggcattctggcgccccagccgcctgatgtgggcagctcagacccacttagcatggtaggtccatctcagggccgtagccctagctacgctagt

SEQ ID NO: 11539 - DNA, 627 bp, synthetic construct
  misc_feature 1..627: note = source = /note="Description of Artificial Sequence: Synthetic coding sequence"
  source 1..627: mol_type = other DNA
atggattcagacgaaaccggcttcgaacatagcggactgtgggtgtcagtgcttgccgggcttctgctgggggcgtgccaagcacatcctattcccgactcatcccccttgttgcagttcggaggccaggtccggcagcggtacctttacactgacgatgcacaacaaaccgaagctcatttggaaataagagaggacggaactgtgggtggtgccgcagatcaatcccctgagtcccttctgcaactcaaggcccttaagccgggtgtgatccaaatcttgggagtcaaaacgtcgcgcttcctttgtcagcgtcccgatggtgccttgtacggcagcctccattttgatccagaagcatgcagctttcgtgagcttcttctcgaagatggttacaatgtgtaccagtctgaagcacacgggttgcctctccatctgccaggtaataagtccccgcacagagatcctgcgcctaggggaccagcccgatttcttccactgccaggactgccccctgcgcttcctgagcctccgggaatccttgcaccgcagcctccggatgtgggatcgagcgaccccctctcaatggttggaccctcccaaggccggagcccatcctatgcatcg

SEQ ID NO: 11540 - DNA, 627 bp, synthetic construct
  misc_feature 1..627: note = source = /note="Description of Artificial Sequence: Synthetic coding sequence"
  source 1..627: mol_type = other DNA
atggacagtgacgagacaggtttcgaacattctgggttatgggtgagtgtgctggcgggcctccttctgggagcttgtcaggctcatccaattcccgactcaagtcccctactgcaattcggcgggcaggttagacaacgctacctatacactgacgatgcccagcagaccgaggctcacttagaaattagggaagacggaactgtagggggggccgcggaccagagcccggagtctttattgcaactcaaagctcttaaaccaggggtgattcagattctgggcgttaagacctcccggttcctgtgtcaacgcccggatggagccctctacggatccctgcacttcgatccggaggcgtgtagttttcgtgagctactcctcgaggacgggtacaatgtgtaccagtccgaggcccacggactgcctctccatttgcctggcaataaaagcccccaccgggatccagctccacgcggtcctgctagatttctccccttgccaggcctgccacccgccctgcccgaaccccccggaatcctcgctccccagccccccgatgtaggcagctcagatccactgtctatggtggggcctagtcaaggaaggagtccaagctacgctagc

SEQ ID NO: 11541 - DNA, 627 bp, synthetic construct
  misc_feature 1..627: note = source = /note="Description of Artificial Sequence: Synthetic coding sequence"
  source 1..627: mol_type = other DNA
atggactcagacgagacgggattcgaacatagtggcctctgggtgtcagtcctggccggcctgttgctgggagcatgtcaagcccatcctattccggatagctcgccactgctgcagttcggcggtcaggttagacagcggtacctgtacactgatgacgcacaacagaccgaggctcatttggagattcgcgaggatggaaccgtgggaggagcagccgaccaatcgccggaaagcctgctgcagctgaaggcgctcaagccgggggtcattcaaatcctgggagtaaaaacttcacggttcctgtgccagcgacccgatggagcactctacggatccttgcattttgaccctgaagcgtgttcctttcgagaacttcttctcgaagatggctacaatgtttatcaatcagaagcacacggacttccgcttcaccttcctggcaacaagagccctcatcgggacccagcacctagaggtcctgcccgatttctgccacttcctggactcccaccagctcttcccgaaccccctggcattttggcacctcagccaccagatgtcggttcgtccgatcccctcagcatggtgggaccttcgcaagggcgcagccctagttacgcgtct

SEQ ID NO: 11542 - DNA, 627 bp, synthetic construct
  misc_feature 1..627: note = source = /note="Description of Artificial Sequence: Synthetic coding sequence"
  source 1..627: mol_type = other DNA
atggactctgacgaaactggctttgagcacagcggactttgggtttcagttctcgctggacttctccttggagcttgtcaagcccatccaatcccagactcctcgcccttgctgcagttcggtggacaagttcgtcagcgatatttgtacacagatgacgctcagcagacagaagctcatcttgagattagagaagatggtaccgtgggaggagctgctgatcaatctccggagtctttactacagcttaaggctcttaagccaggggtcatccagatccttggtgttaagacgtcaagattcttgtgtcagcggcctgatggagcattgtacggatcgttgcactttgatccagaagcgtgttcttttagggaacttcttttggaggacggatataacgtttaccagtcggaagcgcatggcctaccgcttcatcttccggggaacaaatcgccacatcgcgatccagctccgaggggtccagccagattccttcctctgccgggtcttccgccggcgctaccagagccaccaggaattctggcaccgcaaccacctgatgttggatcaagtgacccgttgtctatggttggaccatctcaggggaggtcgccatcctatgcttct

SEQ ID NO: 11543 - DNA, 627 bp, synthetic construct
  misc_feature 1..627: note = source = /note="Description of Artificial Sequence: Synthetic coding sequence"
  source 1..627: mol_type = other DNA
atggacagcgacgagacgggttttgaacacagcggcctctgggtgagcgttctggctgggctcctcttgggtgcttgtcaagcgcacccaatccccgactcttctccactcttgcagtttggaggccaggtgaggcagcgctacctttatactgacgacgcgcaacaaactgaagcccacctggaaatcagagaggacggaaccgtcgggggcgctgccgatcagtccccagagtctttattacagctgaaagctcttaaacctggggtcattcagatactgggcgttaaaacatcaaggtttctttgtcagaggcctgatggagcattgtacgggtcgctccactttgacccagaagcatgctcatttcgggagctgctgctggaggacggctataatgtgtaccagagtgaggcacatggcctcccactgcacctccctggcaacaaaagccctcacagagatcctgccccacggggacccgctcggtttcttccactgcctggactgccccccgcactgcccgagcctcccgggatcctcgccccgcagcctcctgatgtcgggtcgagcgacccgttgagtatggtcggcccgtctcaggggaggtctcctagctacgccagc

SEQ ID NO: 11544 - DNA, 627 bp, synthetic construct
  misc_feature 1..627: note = source = /note="Description of Artificial Sequence: Synthetic coding sequence"
  source 1..627: mol_type = other DNA
atggactctgacgagactggtttcgagcactctggcctgtgggtgtctgtgctcgctggcctgctgttgggagcttgtcaggcacatccaatccctgactcgtccccccttcttcagttcggcggccaagtccgccaacggtatctttacactgatgacgcacagcagactgaggctcaccttgaaatccgagaggatggcacagtggggggcgctgccgatcaaagtccagagagcctattgcagctgaaggcgttgaaacccggagtcatccaaattttaggggtgaaaacatctcgctttctgtgtcaacgtccagacggcgcactgtacggttccttacactttgaccctgaggcctgtagcttcagggaactgcttctcgaggatggttacaacgtttatcagagcgaagcgcatgggttgccattgcatctgccaggaaacaaatcaccacatcgcgatccagcgcctagggggcccgcacggtttctaccacttccaggcctgcctcccgcattgcccgaacctcccggcatcctcgcacctcagcccccggatgtggggtcatccgatccactgagcatggtgggtcctagtcaaggacggtccccctcatatgcctct

SEQ ID NO: 11545 - DNA, 627 bp, synthetic construct
  misc_feature 1..627: note = source = /note="Description of Artificial Sequence: Synthetic coding sequence"
  source 1..627: mol_type = other DNA
atggatagcgatgagaccggttttgagcatagcggtctctgggttagcgtcttggctggcctcctgttgggcgcctgccaggctcatccgatccctgacagtagccctcttttgcagtttggaggtcaagtaaggcaaaggtacttgtataccgatgacgctcaacaaacggaagctcacctcgagattcgcgaagacggaaccgtgggtggtgcggctgatcagtcacccgagtcactgttgcagctcaaggccttgaaacctggcgtgatccaaattctgggtgtaaagacttcacgcttcctttgccagagacccgacggtgccttgtacggcagtctgcactttgaccccgaagcctgtagctttcgcgagctgctcctcgaggatggctataacgtctatcagagtgaggctcacggactgcccctgcacttgcctggcaataaaagcccacacagagaccctgcaccccgcggacccgccaggttcttgcccttgcctggcctgccacctgctcttccagagcccccaggcattctggcgcctcagccccctgacgtgggttccagtgatccattgtccatggttggcccttctcagggacgctctccatcttacgcaagc

SEQ ID NO: 11546 - DNA, 627 bp, synthetic construct
  misc_feature 1..627: note = source = /note="Description of Artificial Sequence: Synthetic coding sequence"
  source 1..627: mol_type = other DNA
atggatagtgatgaaaccggatttgagcacagcggcctatgggtatctgtgctggccggtttgctgctgggggcctgccaagcccatcccattccggactcctctccacttctgcagttcggaggccaggtgagacagcgatacctgtacactgatgatgcccagcaaaccgaggcacatctcgaaatccgtgaggatgggactgttggaggggcggccgaccagagtcctgagagtcttttacagcttaaagccttgaaaccgggcgtgatccagatattaggagtgaagacgtctcgttttctgtgtcaaagaccggatggagcactctacggctctttacattttgatcctgaagcctgttctttccgcgagctgctgctggaggatggttataatgtgtaccagtcagaggcacacggcttgcctctgcatttgcctggtaacaagtctccacatcgtgaccctgccccccggggaccagcccggttcctcccattacccgggctgcctcctgccctgccagaacccccaggtatcctggcacctcagcccccagacgtaggttcctccgatccactgtcaatggtgggacctagccaggggaggtctccctcctatgcttcc

SEQ ID NO: 11547 - DNA, 627 bp, synthetic construct
  misc_feature 1..627: note = source = /note="Description of Artificial Sequence: Synthetic coding sequence"
  source 1..627: mol_type = other DNA
atggattccgatgaaaccggcttcgaacatagcggtttgtgggtgagtgtcttggcagggcttcttcttggcgcatgtcaggctcatccaatcccagattcatcgcctctgctgcaatttggtggacaagtgcgccaacgctacctgtacactgatgacgcccaacaaaccgaagcacatctggagatcagggaggacgggacggtgggaggagctgcggaccagagccctgagtcgctgctgcaattgaaggcactgaaacctggtgtgatccagatcctgggcgtcaaaacctcacggttcttgtgtcagcgtcccgatggcgccctttacggtagcctgcactttgatccagaagcatgttcgtttagagaactgctgctcgaggacggatacaacgtgtaccaatccgaagcccacgggctgcccctgcacctgcccggaaacaagtccccccatcgagatccggcaccccgtgggccagccagatttctgccactgccagggcttcctcctgcactgcctgagcccccaggaatactcgcacctcaaccacctgacgtcggatcaagcgatcctctctcgatggttggtccatcacagggaagatccccttcgtacgcctct

SEQ ID NO: 11548 - DNA, 627 bp, synthetic construct
  misc_feature 1..627: note = source = /note="Description of Artificial Sequence: Synthetic coding sequence"
  source 1..627: mol_type = other DNA
atggattctgatgaaaccggattcgagcactccggcctgtgggtgagcgtgctcgccggtctgctgctgggtgcatgccaggcacaccccatcccagattcaagtcccctgctccaatttggtggccaggttcgccaacgctacctgtacactgacgatgcacaacaaaccgaggcacacctggagattagggaggatggcactgtcggcggagctgccgaccagagccctgaatctcttcttcagctcaaggctctcaagcccggtgttatacagatactcggtgtgaaaacatctaggttcctttgtcagaggcccgacggagccctgtatggatctctccactttgaccctgaagcttgctcctttcgtgagctccttctggaggatggttacaacgtttatcaaagcgaggcacacggactccccctccacttgcctggtaataagagccctcacagggatcctgccccccgtggcccagcacgctttttgcctctccctggcctgcctccagctttgccagagccacccggcatcctcgcaccacagccccccgatgtcggatcctctgatccactgtccatggtcggacccagccagggccgttctccctcatatgcttct

SEQ ID NO: 11549 - DNA, 627 bp, synthetic construct
  misc_feature 1..627: note = source = /note="Description of Artificial Sequence: Synthetic coding sequence"
  source 1..627: mol_type = other DNA
atggactccgatgagactggcttcgaacattccggtctttgggtgtccgtcttggccggcctgctgttgggggcatgccaggcccacccaatcccggacagctccccgctcctccagtttggtggccaggtgagacagaggtacctgtacaccgacgacgcgcagcagactgaggcccatctggaaatccgcgaagacggaacggtcggaggagcggcggaccagagtcctgagtcactcctgcaactgaaagcccttaagccgggagtcatccagatcctcggcgtgaagacctcaagatttctctgccaaaggccagatggcgccctgtacgggtcgttgcacttcgatcctgaagcctgctcatttagagagctgttgctggaagatggatacaacgtgtaccaatccgaagcgcacggactccctctccatctgccagggaacaagagcccacaccgggacccggccccgcgcggaccggcccgctttctcccactgccgggactccctcctgccctcccggaaccaccgggaatccttgcgccgcaaccacccgacgtgggatcctcggaccctctgtccatggtgggaccttcgcagggaagaagcccatcttacgcatcc

SEQ ID NO: 11550 - DNA, 627 bp, synthetic construct
  misc_feature 1..627: note = source = /note="Description of Artificial Sequence: Synthetic coding sequence"
  source 1..627: mol_type = other DNA
atggattcagatgaaaccggattcgagcacagcggactgtgggtgtcggtgttggccggacttctcctgggggcttgtcaggcgcaccccattccagactcctcaccgctgctccagttcggcggacaggtgcggcaaagatacctgtacacggacgacgcacaacagactgaagcgcatctcgaaatcagagaggatggaactgtgggcggagccgccgaccagtccccggagagcctgctgcagctcaaagcgcttaagccaggagtgatccagatactgggagtcaagacttcgagattcctgtgccagcgcccggacggagccctttacggaagcctgcatttcgacccggaagcatgttccttcagggaactgttgctcgaggatggatacaatgtgtaccagtccgaagcgcacggactgccgcttcacctgccaggtaataagtctcctcatagagatcccgcgcctaggggcccggcaaggtttctgccactcccaggcctgccacccgcattgccagaaccacctgggatcttggcccctcagcctccagacgttggttctagcgatccgctgtcgatggtggggccgtcgcaagggagatccccgtcgtacgcttca

SEQ ID NO: 11551 - DNA, 627 bp, synthetic construct
  misc_feature 1..627: note = source = /note="Description of Artificial Sequence: Synthetic coding sequence"
  source 1..627: mol_type = other DNA
atggactctgacgaaacaggattcgaacactcaggcctctgggtgtcagtgctagctggactactcctgggcgcttgccaggcacacccaatacctgactccagccctctcctgcagttcggcggccaggtcaggcagcgttatttgtatactgacgacgcccagcagactgaggcccacttggagatccgcgaggatggcacagtcggaggggcagcagaccagtctccagagagtctcctgcaacttaaggccctaaagcccggagtaatccagatcctgggggtgaaaacatctcgctttctatgtcagaggcccgacggagcgctatacggcagtctgcacttcgacccagaggcctgtagcttccgcgagctcctcctcgaagatggatataatgtgtatcagagcgaggcacacggcctgcccctacacttgcccgggaataagtccccacacagagatcctgcacccaggggccccgcaaggttcctgcccttgcccgggctgccacccgccctaccagaacctccaggcattctcgcaccacagcctcccgacgttggttcatccgaccccctgagcatggtcggccctagccagggccgaagcccgagttatgccagc

SEQ ID NO: 11552 - DNA, 627 bp, synthetic construct
  misc_feature 1..627: note = source = /note="Description of Artificial Sequence: Synthetic coding sequence"
  source 1..627: mol_type = other DNA
atggattcagacgaaaccggatttgaacattcaggactctgggtgagcgtcctggcgggactgctgttgggtgcctgccaggctcatcccatcccagattcctccccgctgctgcagtttgggggtcaggtgagacagcggtacctctacactgacgacgcccagcagaccgaagctcatctggaaatccgcgaagatggaactgtgggaggagcggctgaccagtcgcccgaatccctcttgcagctgaaggcactgaagccaggagtgatccagatccttggcgttaagacctccaggtttctttgccagaggcctgacggagcgctgtatggatcgctgcactttgacccggaggcctgttcgttccgggagcttttgttggaagatggatacaatgtgtaccaatccgaagcacacgggctgccactgcatcttcctggaaacaagtcgccacaccgggaccctgccccacgggggcccgcacgcttcctgcctctgccgggtctgccaccggctctcccagagccaccgggtatcctcgcaccgcaaccgcctgatgtcgggagctcagacccgctgtcgatggtgggaccatctcagggaagatcgccatcgtacgcgtcg

SEQ ID NO: 11553 - DNA, 627 bp, synthetic construct
  misc_feature 1..627: note = source = /note="Description of Artificial Sequence: Synthetic coding sequence"
  source 1..627: mol_type = other DNA
atggattcagatgagactggatttgaacacagcggactatgggtatctgttttggcggggctcctgctgggcgcttgccaggcccacccaattcccgattcttcacctctactgcagttcggcgggcaggttaggcagcgctatctgtacaccgatgacgcacaacagacagaggcgcatctcgaaatccgtgaggacggcacagtagggggggccgcggaccaaagccctgaatcactccttcaactgaaggcactgaaacctggagtgatccaaattctgggggtcaagacttctaggttcctatgccaaaggccagatggcgccttgtatgggtccctgcactttgatcctgaggcttgttccttcagagaactcctgttggaagatggatacaacgtgtaccagtctgaggcccatggtctccccttgcacctgcccggtaacaagtctccacatagggatccagcaccccgaggccctgccaggttcctgccactgcccggccttcctcctgctcttcccgaaccacctgggatcttggcccctcagccaccagacgttgggtctagtgatccactgagcatggtggggccatctcagggtcggagtccaagctatgcttca

SEQ ID NO: 11554 - DNA, 627 bp, synthetic construct
  misc_feature 1..627: note = source = /note="Description of Artificial Sequence: Synthetic coding sequence"
  source 1..627: mol_type = other DNA
atggattccgatgaaactggattcgaacactcgggcctgtgggtcagcgtgctggccggactcctgcttggggcgtgtcaggctcaccctattcccgactcatcgcctcttctccaattcggtggccaagtccgtcagaggtacttgtacactgatgatgcacaacaaaccgaggcacacttggaaatccgagaggacggcacggtgggtggggctgccgatcagagcccggaatcactgctgcaattgaaagcgcttaagcctggtgttatccagattctgggagtgaaaacttcccgctttctgtgccagcggcctgacggagcgttgtacggctcactccatttcgatccggaggcatgttcctttcgggaacttctcttggaggacggatacaatgtgtaccaatcggaagcacatggattgcctcttcatctgcctggtaacaagtcgccacatagagatccagcgccaaggggtccagcaaggtttctgccccttcctggcttgccgccagccttgcccgagccaccaggtatactcgcgccccagccgccagacgttggatcgagtgatcctctgtcgatggtgggcccttctcaagggagatcgccctcttatgcatca

SEQ ID NO: 11555 - DNA, 627 bp, synthetic construct
  misc_feature 1..627: note = source = /note="Description of Artificial Sequence: Synthetic coding sequence"
  source 1..627: mol_type = other DNA
atggactccgatgagaccggctttgagcactccggattgtgggtgtctgtgctggctgggctgcttctgggtgcctgccaggcacacccaatcccagactcatctcctctcttacagttcggcggtcaggtacggcagcgctacctgtacactgacgatgcacagcagacagaggcccacctggagattagggaggacgggaccgtaggaggagcagccgatcagagccctgagagtctcctgcaactgaaggccctaaagcccggcgtgatccaaatcctaggcgttaagacatcccggttcctctgccaaaggccagacggagctctctacggctctctgcacttcgatcccgaggcatgtagcttcagagaactcctgcttgaggatggatataatgtgtatcagagcgaagcacatggtctcccactgcacctccctggaaataagtcccctcatcgtgacccagcaccacggggtcccgctcggttcctcccactcccaggcctcccacctgcactgccagagcctcctggcattctggctcctcagccaccagacgtcggctctagtgatcctctatctatggtagggccctcacagggccgatccccttcttacgcgtcc

SEQ ID NO: 11556 - DNA, 588 bp, synthetic construct
  misc_feature 1..588: note = source = /note="Description of Artificial Sequence: Synthetic coding sequence"
  source 1..588: mol_type = other DNA
atgcgcagatggctgggatgcgtgtgcttcgcgttggtgcaggccgacagcccttcagcgcccgtgaacgtgaccgtgcggcatcttaaggccaactcagcagtggtgtcctgggatgtgctggaggacgaggtggtcatcggtttcgccatcagccaacagaagaaggacgtgcgtatgctgcgattcatccaggaagtcaatactactactcgctcgtgcgccctctgggacctggaagaagatacggaatacattgtgcacgttcaggcaatctccatccaaggacagtccccagcgtccgaacccgtattgtttaagacccccagggaagctgagaagatggcctcaaagaacaaggacgaagtcactatgaaagaaatgggtcggaatcagcagctccggaccggagaggtgctgatcatcgtggtggtgcttttcatgtgggccggagtgattgccctgttctgcaggcagtacgacatcatcaaagataacgagccaaacaacaataaggaaaagaccaagtccgctagcgaaaccagcaccccagagcaccaaggtgggggacttctgagatcgaagatt

SEQ ID NO: 11557 - DNA, 588 bp, synthetic construct
  misc_feature 1..588: note = source = /note="Description of Artificial Sequence: Synthetic coding sequence"
  source 1..588: mol_type = other DNA
atgcgcaggtggctcggatgtgtatgtttcgcactggtccaagccgatagtccatcagcacctgtgaatgttaccgtcagacatctcaaggcgaattcagctgtcgtgtcctgggacgtgctggaagatgaggtcgtgatcggttttgcaatttcgcaacaaaagaaagatgtgcgaatgcttcggtttatccaggaagtgaataccaccactcgatcgtgtgctctgtgggatcttgaagaggatactgaatacattgtgcacgtgcaggccatttcgattcagggacaatccccggcgtctgagcctgttctgttcaaaactcctagggaagcagagaaaatggcttccaagaataaagacgaagtcaccatgaaggaaatgggtcggaaccaacagcttcggactggggaagtgttgattatagtcgtggtgctgtttatgtgggcaggagtcatagcattgttttgtcggcaatacgacattatcaaggacaacgagccgaacaacaacaaagaaaaaaccaagtcggcatctgaaacctcgactcccgagcatcagggcggagggcttttgcgctcaaaaatc

SEQ ID NO: 11558 - DNA, 588 bp, synthetic construct
  misc_feature 1..588: note = source = /note="Description of Artificial Sequence: Synthetic coding sequence"
  source 1..588: mol_type = other DNA
atgcgacgatggctggggtgcgtctgcttcgccctagtgcaagcagacagtccatccgcccccgtgaacgtcacagtgcgccatttgaaagctaatagcgcagtcgtatcatgggacgtgctggaagacgaggtggtaatcgggttcgctatctctcaacagaaaaaagacgttcgcatgctccggttcattcaagaagtgaataccaccactcgctcatgcgccctttgggacctggaggaggatacagaatacatcgtgcatgtacaggccatcagcatccagggccagtccccagcctcagagcctgtactctttaaaacaccccgggaagctgagaagatggcatctaaaaataaagatgaggtgaccatgaaggagatggggcgtaaccaacaactaaggaccggcgaagtgttgataattgtcgtggtgttgtttatgtgggccggggtgatcgcacttttttgtagacaatatgatattatcaaggacaatgagcccaacaacaataaggaaaagaccaagtcagcaagcgaaacaagtactcccgagcaccaaggcggggggctgctacgtagtaaaatt

SEQ ID NO: 11559 - DNA, 588 bp, synthetic construct
  misc_feature 1..588: note = source = /note="Description of Artificial Sequence: Synthetic coding sequence"
  source 1..588: mol_type = other DNA
atgaggcgctggttgggttgcgtttgtttcgccctggtgcaggcggactccccgtccgccccggtcaacgtcacggtgaggcacttgaaagctaattccgctgtggtgtcatgggacgtgttggaggatgaggttgtcatcggattcgccatctcacagcagaagaaggacgttaggatgctgagattcatccaagaggtgaacaccactactagatcatgcgccctctgggacttggaggaagacactgagtatatcgtccatgtccaggctatctccattcagggacaaagtccggcgagcgagcccgtcctgttcaaaaccccacgcgaggccgagaaaatggcatccaaaaacaaggacgaggtgactatgaaggagatgggtcgcaatcagcaactgagaaccggagaggttttgatcatagttgtcgtgctgttcatgtgggccggcgtaattgccctgttctgtaggcagtacgacatcatcaaggacaatgaacctaacaacaacaaagagaagactaaaagcgcatccgagactagcactcctgaacatcaaggtggtggattgctgagatccaagatc

SEQ ID NO: 11560 - DNA, 588 bp, synthetic construct
  misc_feature 1..588: note = source = /note="Description of Artificial Sequence: Synthetic coding sequence"
  source 1..588: mol_type = other DNA
atgagaaggtggctgggctgtgtatgtttcgccctagttcaggcagactcccctagcgcccccgtgaacgtaaccgttcgtcacttaaaagccaacagtgctgtcgtttcttgggatgttctagaagatgaggtggtgattggcttcgctatctctcagcagaagaaagacgtgcgaatgctgaggtttatccaggaagttaataccactacacggagctgcgcattatgggacctagaagaggatactgagtatatcgtccatgtgcaagctatatctatacagggccagagccccgcttccgagccagtcctgtttaagacaccacgagaggccgagaagatggcaagcaagaacaaagatgaagttactatgaaagaaatgggccgaaaccaacagcttaggacaggcgaagtcctcattatcgttgtggtgctcttcatgtgggccggcgtgatagccctattttgccgccagtacgacattattaaggacaacgaaccaaacaataataaggaaaagaccaagagcgcctcagagaccagcacccctgagcatcaggggggcggcctactacgctccaagatc

SEQ ID NO: 11561 - DNA, 588 bp, synthetic construct
  misc_feature 1..588: note = source = /note="Description of Artificial Sequence: Synthetic coding sequence"
  source 1..588: mol_type = other DNA
atgcggcggtggcttggatgtgtctgtttcgcgcttgtgcaagccgactctcctagcgctccagtgaacgtgaccgtgcgccacttgaaagccaattccgccgtggtgtcctgggatgtcctggaggacgaggtggtgatcggattcgccatttcccaacagaagaaagatgtgagaatgctccgctttattcaggaagttaacaccaccacgcggtcatgtgcgctgtgggatttggaagaggataccgaatacatagtgcacgtgcaagcgatctccatccaaggacagtcgcctgcatccgaaccagtgctctttaagacccctagagaagcagagaagatggcgagcaaaaacaaggatgaggtcactatgaaggaaatgggcagaaaccaacagctccgaactggtgaagtccttatcattgtggtggtcctctttatgtgggccggtgtgattgcactgttctgcaggcagtacgacattatcaaggacaacgagccgaataacaataaagaaaaaacgaagagcgcatcagaaacttcgactcctgagcatcagggaggtggacttctcagatcgaaaatt

SEQ ID NO: 11562 - DNA, 588 bp, synthetic construct; identical to SEQ ID NO: 11558
  misc_feature 1..588: note = source = /note="Description of Artificial Sequence: Synthetic coding sequence"
  source 1..588: mol_type = other DNA

SEQ ID NO: 11563 - DNA, 588 bp, synthetic construct
  misc_feature 1..588: note = source = /note="Description of Artificial Sequence: Synthetic coding sequence"
  source 1..588: mol_type = other DNA
atgagaaggtggctgggatgtgtgtgtttcgcgctggttcaggcggactcgccttcagcaccagtcaacgtgaccgtgagacatcttaaagctaattccgccgtcgtgtcgtgggatgtgctggaagatgaagtcgtgattggattcgctatttcccagcaaaagaaggatgtaaggatgctgcgatttatccaggaggtgaacactactaccagatcgtgcgcattgtgggatctggaagaggacactgagtacattgtgcatgttcaagcaatttccatccagggtcaatcccccgcatcggaaccagtcctgttcaagacccctagagaagctgagaagatggcatcgaagaataaagacgaggtcaccatgaaagaaatggggcggaatcaacagctccgcactggagaggtgctgatcattgtggtcgtgctctttatgtgggctggtgtcattgcacttttctgccggcagtacgacataatcaaggataacgagccgaacaacaataaggagaaaaccaagtcagcctcagagacttcgactcctgaacatcagggaggagggcttctgcggtctaagatt

SEQ ID NO: 11564 - DNA, 588 bp, synthetic construct
  misc_feature 1..588: note = source = /note="Description of Artificial Sequence: Synthetic coding sequence"
  source 1..588: mol_type = other DNA
atgcggagatggctcgggtgcgtgtgcttcgctctggtgcaggccgacagccctagcgcacccgttaacgttaccgttcgccaccttaaagcaaactccgccgtggtatcctgggatgtgctggaggacgaagtcgtcattggttttgctataagtcagcagaagaaggacgtcagaatgctgcggttcattcaggaggtgaacaccacaacacgttcttgcgcgctttgggacctggaggaggatacggaatatatcgtgcacgtacaagccatctccattcagggccagtctcccgcgtctgagcctgtcctcttcaaaacgccacgtgaagctgagaagatggcaagcaagaacaaggatgaggtgactatgaaagaaatgggccgcaaccagcagctgcgaaccggtgaggtgttgattattgttgttgtgcttttcatgtgggccggagttatcgcattattctgccggcagtatgatattattaaggataacgagcctaataacaataaggagaaaactaaatcggcgtctgagacgtcaacccccgaacaccagggagggggcttgttgcggtctaagatc

SEQ ID NO: 11565 - DNA, 588 bp, synthetic construct
  misc_feature 1..588: note = source = /note="Description of Artificial Sequence: Synthetic coding sequence"
  source 1..588: mol_type = other DNA
atgcggcggtggcttggttgtgtctgcttcgcccttgtacaggcggacagtccatcagctcctgttaacgtcaccgtcaggcacctgaaggcgaattcggcggttgtcagctgggacgtactggaagacgaagttgtgatcggtttcgccatctcacaacaaaagaaggacgtaagaatgcttcggttcatccaggaggtcaatactaccactcgatcctgtgctctatgggacctagaggaagacaccgagtacatcgtgcacgtgcaggcaattagcatccagggccaatccccagcctccgaaccagttctcttcaagactccgagagaagccgagaagatggcctcgaaaaacaaagatgaagtgacgatgaaggaaatgggacggaatcaacagctccgtacgggagaggttctgatcattgtagtcgtccttttcatgtgggccggcgtcattgcactgttctgtcgccaatatgatatcatcaaggacaacgagcccaacaataataaggaaaagactaagagtgcgtcggagacctcaacgccagaacaccaaggtgggggtcttttgcgatccaagatc

SEQ ID NO: 11566 - DNA, 588 bp, synthetic construct
  misc_feature 1..588: note = source = /note="Description of Artificial Sequence: Synthetic coding sequence"
  source 1..588: mol_type = other DNA
atgcggcggtggttgggttgtgtgtgcttcgccctggtacaggctgatagcccctctgcccctgtgaacgtcacagtgcgacatctcaaagctaattctgcggtggtctcgtgggacgtccttgaggatgaggtggtcattggattcgctatatcccaacagaagaaggacgtcaggatgctgcgcttcatccaggaggtcaataccaccactagaagctgcgcactgtgggacctcgaagaggacactgaatatatcgtgcacgtgcaggcgattagtatacaggggcagtccccagcaagcgagcccgttcttttcaagaccccaagagaagccgagaaaatggccagcaaaaataaagacgaggttacaatgaaagaaatgggccgaaatcaacaattaaggacgggcgaggttctgattatcgttgtggtgttgtttatgtgggccggagtcatcgcgctgttttgtaggcagtacgatattataaaggataatgaacccaacaacaacaaggagaaaaccaaaagtgctagtgaaacaagcacacccgagcaccagggaggtggtctgttacgctccaagatt

SEQ ID NO: 11567 - DNA, 588 bp, synthetic construct
  misc_feature 1..588: note = source = /note="Description of Artificial Sequence: Synthetic coding sequence"
  source 1..588: mol_type = other DNA
atgcgtcgatggcttggctgcgtctgctttgcgctggtacaggccgactccccgagcgcacctgtgaacgtgactgtacggcatctgaaggctaatagtgccgttgtgtcctgggacgtccttgaagacgaggtggtaattggtttcgccatttcacagcagaaaaaagatgttcgcatgctgcgtttcatccaggaggtcaacactactaccagatcgtgcgccttgtgggatttggaggaagacacagaatacatcgtccacgtccaggcaatcagtattcagggacaaagcccggcctccgagcccgtgctctttaaaacacctcgggaggctgaaaagatggcctctaagaataaggacgaagtgaccatgaaagagatgggacgcaatcagcagctgaggacaggcgaggtgctcatcatagttgtggtactgttcatgtgggccggcgtgatcgccttattttgcaggcaatacgacataatcaaggacaacgaaccgaacaataacaaggagaaaaccaagtccgccagcgagacgtctacgccagagcaccagggaggcgggttacttagatccaagatt

SEQ ID NO: 11568 - DNA, 588 bp, synthetic construct
  misc_feature 1..588: note = source = /note="Description of Artificial Sequence: Synthetic coding sequence"
  source 1..588: mol_type = other DNA
atgcgccggtggttaggctgcgtgtgctttgccctcgtgcaggccgactcccctagcgcacctgtgaacgttaccgtgcgtcatttgaaggcaaactctgccgtggtatcttgggacgttctagaagacgaagtcgtgattggcttcgccatctcgcagcagaagaaggacgttcggatgcttcgatttatccaggaggtgaacacaacaacgaggagttgtgccctctgggacttggaagaagatacagagtatatcgttcacgttcaggcaattagcatccagggacaatcccctgcatccgagcctgtcttgtttaagacacctcgcgaggctgaaaaaatggccagcaagaacaaggatgaggtgactatgaaggagatgggcagaaaccaacagttacgcacaggagaagtcttaatcattgtcgtggttctgttcatgtgggcaggtgttatcgcgctgttctgtcgccaatatgatattattaaagataatgaacccaataataacaaagagaagaccaagtccgcatccgagacaagtacccccgagcaccagggcggtggactgttaaggagtaaaatt

SEQ ID NO: 11569 - DNA, 588 bp, synthetic construct
  misc_feature 1..588: note = source = /note="Description of Artificial Sequence: Synthetic coding sequence"
  source 1..588: mol_type = other DNA
atgcgccggtggctgggatgcgtgtgcttcgcgcttgtgcaggcagatagcccatccgcgccagtcaatgtgactgttcgccatcttaaggctaactccgcagtggttagctgggacgtcttggaagatgaagtggtgattggctttgccatctcgcagcagaaaaaagacgtgcgcatgctgaggtttatccaggaggtcaatacgaccacccgcagctgcgccctgtgggatctggaagaggacaccgagtacattgtccacgtgcaggctatcagcatccagggacagtcccctgcctcggagcctgtgctgttcaaaactccccgcgaggccgaaaagatggcctcgaagaataaggatgaggtcaccatgaaggagatgggccggaaccagcagctgagaaccggagaagtgcttatcatcgtggtggtcctgttcatgtgggcaggagtgatcgctctgttctgtcggcaatacgacatcatcaaagacaacgagcccaacaacaataaggagaaaaccaagagcgcatccgagacgtcaacgccggaacatcagggagggggtttgcttcgctccaaaatt

SEQ ID NO: 11570 - DNA, 588 bp, synthetic construct
  misc_feature 1..588: note = source = /note="Description of Artificial Sequence: Synthetic coding sequence"
  source 1..588: mol_type = other DNA
atgaggcggtggctcggttgtgtctgttttgcgcttgttcaggcggactcgccgtccgcaccagtgaacgtgactgtgcgacatcttaaggcgaacagcgcagttgtgagctgggatgtgctcgaggacgaggtcgttataggatttgcgatttcacaacagaagaaagatgtgagaatgcttaggtttatccaggaagtgaataccaccacgcgttcctgcgcactgtgggatctggaggaagatactgaatacattgtgcacgtgcaagcgatttcaatccaaggacaatcccccgcaagcgaacctgtgttgttcaaaactcctcgtgaagcagagaaaatggccagcaaaaacaaagatgaggtgactatgaaagaaatggggagaaatcaacagctcagaaccggcgaggtgctgattattgtcgtggtccttttcatgtgggccggcgtgattgccctgttttgtcgccagtacgacattatcaaggacaatgagcctaacaataacaaggaaaaaactaagtcagcaagcgaaaccagcaccccagaacatcagggtggtggactgcttcggtcgaagatt

SEQ ID NO: 11571 - DNA, 588 bp, synthetic construct
  misc_feature 1..588: note = source = /note="Description of Artificial Sequence: Synthetic coding sequence"
  source 1..588: mol_type = other DNA
atgcgtcgctggttagggtgcgtctgcttcgcacttgtgcaggctgactcacccagcgcccctgtgaacgtgactgtgcgccacctcaaggcaaactccgccgtggtgtcttgggacgttctggaagatgaggttgtgattggttttgccataagtcagcagaaaaaagatgtccgaatgctccggttcatacaggaagtgaatacgacaacacggagttgtgctctttgggacctagaggaagatactgagtacattgtgcatgtccaggctatctcaatccagggccagagccctgccagcgagcctgttttgtttaagaccccacgcgaggcagagaagatggcttccaagaataaagatgaggtcacaatgaaggaaatgggaaggaaccaacagttgcgcaccggtgaggtgctgattatagtcgtggtactgttcatgtgggcgggagttatcgctctgttctgcaggcaatacgacatcatcaaggataacgaaccaaataataataaggaaaagaccaagagtgcatctgagacatccactcctgagcaccaggggggagggttgctgcgatcaaagatc

SEQ ID NO: 11572 - DNA, 588 bp, synthetic construct
  misc_feature 1..588: note = source = /note="Description of Artificial Sequence: Synthetic coding sequence"
  source 1..588: mol_type = other DNA
atgaggcgatggcttggatgtgtgtgctttgccctggtccaggcagatagcccttccgcgcctgtcaatgtgaccgttagacacctgaaagcgaacagcgcggtggtgagctgggatgtgcttgaggatgaagtggtgatcggattcgcaatctcccaacaaaagaaggatgtgcgaatgctgaggtttatccaagaggtgaacaccaccactagatcctgcgcgctttgggatctcgaggaggatactgaatacatcgtgcacgtccaagctatatccattcaaggccaatcgcccgcgtcggaaccagttctgtttaagaccccaagagaagccgaaaagatggcttccaaaaacaaagacgaggtgactatgaaggagatgggacgcaaccagcagctgcgcaccggtgaggtgcttatcattgtggtggtgcttttcatgtgggccggagtcatagccctgttttgccgtcaatacgacatcattaaggataatgaacctaataacaataaagagaaaactaagtccgcaagcgaaacctcaactccagaacatcaggggggtggactgctgagaagcaagatt

SEQ ID NO: 11573 - DNA, 588 bp, synthetic construct
  misc_feature 1..588: note = source = /note="Description of Artificial Sequence: Synthetic coding sequence"
  source 1..588: mol_type = other DNA
atgagaagatggctcggctgcgtctgttttgcactggtgcaggcggattctccgagcgctccagtgaacgtaactgttaggcacctgaaagccaactcggccgtcgtcagttgggacgttcttgaagatgaagtggtaatcggttttgccatttcccagcagaagaaagatgtgaggatgctgaggtttatccaggaagtaaacacaaccaccaggagctgcgctctctgggaccttgaagaggacaccgagtacatcgttcatgttcaggccatctccatccagggccagtctcccgcttccgaacctgtcctcttcaaaactcctagagaggccgagaaaatggccagtaaaaataaagatgaggtgacaatgaaagagatgggcaggaatcagcagttaagaacaggtgaggttctcataattgtcgtggtactgttcatgtgggctggcgttattgcactgttttgccgtcaatatgacattatcaaagataacgaaccaaataacaataaggagaagaccaagtctgctagtgagacctcgacacccgaacaccaaggtggagggcttcttcgctcgaagatt

SEQ ID NO: 11574 - DNA, 588 bp, synthetic construct
  misc_feature 1..588: note = source = /note="Description of Artificial Sequence: Synthetic coding sequence"
  source 1..588: mol_type = other DNA
atgcgcaggtggctgggatgcgtatgtttcgcgctggtacaggctgacagtccaagtgcccccgtcaacgttaccgtgagacacctcaaggcgaacagtgcagtggtttcttgggatgtgctagaggatgaggtcgtaatcggatttgccattagccagcagaagaaggacgtccggatgctgagatttatccaggaagtcaacacaaccactaggagctgcgcactgtgggacctcgaggaggatacagagtacatcgtgcatgttcaggcaatttccatccagggccagagcccggcctcggaaccagttctgtttaagacacccagggaagcagagaagatggccagcaagaacaaagatgaagtgactatgaaagagatgggacgcaaccagcagcttcgtacaggcgaagtgctgatcattgtagtggtactgtttatgtgggcaggcgtcatcgctctgttctgcagacagtacgatataatcaaagacaacgagcccaataataataaagagaaaacaaaaagtgcttctgaaaccagtacacccgaacatcaaggcggcgggttactaaggtctaagatc

SEQ ID NO: 11575 - DNA, 588 bp, synthetic construct
  misc_feature 1..588: note = source = /note="Description of Artificial Sequence: Synthetic coding sequence"
  source 1..588: mol_type = other DNA
atgagacgctggttaggatgtgtttgctttgcactcgtgcaggccgattctcctagtgcccccgtaaatgtcacagttagacatcttaaagctaactcagcagtggtgtcctgggatgtgttggaagatgaagtggtcatcggatttgctatatcacagcagaagaaagatgtgagaatgctgagatttatccaggaagtgaacacaacaactagatcatgtgctctctgggacttggaggaagatacagaatatatcgtgcatgtccaggcgattagtatacagggacagtcgccagcctcagaaccagtccttttcaaaacacccagggaagccgaaaagatggcttcaaagaataaagatgaagtaacgatgaaggaaatggggcgaaaccagcagttaaggactggagaggtcctcatcatcgtggtggtgttatttatgtgggcaggagtgatagcccttttctgtagacagtatgacataataaaagataacgagcccaacaacaataaagagaagacaaaatctgcttcagaaacatccactcccgaacatcagggaggggggcttttaagatctaaaatc

SEQ ID NO: 11576 - DNA, 588 bp, synthetic construct
  misc_feature 1..588: note = source = /note="Description of Artificial Sequence: Synthetic coding sequence"
  source 1..588: mol_type = other DNA
atgaggcgatggcttgggtgcgtgtgtttcgccctggttcaagccgactccccgagcgccccagtcaatgtgaccgtccggcacctgaaggctaatagcgcagtcgtgtcttgggacgtgctggaggatgaagtggttattgggtttgcaatctcacagcaaaagaaagatgtgcggatgttgagattcattcaggaagtgaataccactactcgaagttgtgcgctgtgggacctggaagaggataccgaatacatagtacacgtgcaggccatatctatccagggccagtcacccgctagtgagcccgtgctgtttaagactccacgggaggcagagaagatggcctctaagaataaggatgaagttactatgaaggaaatgggccgcaaccagcaactgaggacaggggaggttttgatcatcgtcgttgtcctgtttatgtgggccggcgtgattgccttattttgccgtcagtatgacatcatcaaagacaacgagccgaataacaacaaagaaaaaacaaaatctgcatcagagacaagtactccagagcaccaggggggcggcctactcagaagtaagatt

SEQ ID NO: 11577 - DNA, 588 bp, synthetic construct
  misc_feature 1..588: note = source = /note="Description of Artificial Sequence: Synthetic coding sequence"
  source 1..588: mol_type = other DNA
atgaggcgatggctcggttgcgtttgttttgcactggtgcaggcggattcgccatcggcaccggtcaacgtgacggtgcggcaccttaaagccaattccgcagtcgtttcgtgggatgtcctggaagatgaggtggtgatagggttcgctatctcgcagcaaaagaaggacgtcaggatgctgcggttcattcaagaggtcaataccactactcgtagttgtgctctgtgggacctggaggaagataccgaatacattgtccatgtgcaagcgatctccattcagggtcagagccctgcatcagagcctgtgctctttaagacccccagagaggcagaaaagatggcctccaagaacaaggacgaagtgacgatgaaggagatgggtcgcaaccaacaactgcggactggagaagtcctgattatcgtggtcgtcctctttatgtgggcgggcgtgattgcactcttttgtcgccaatacgacataatcaaagacaacgaaccgaataacaacaaggaaaagaccaaatcagcatccgaaacgtccacgccggagcatcaaggaggcggcttgcttcgctccaagatt

SEQ ID NO: 11578 - DNA, 588 bp, synthetic construct
  misc_feature 1..588: note = source = /note="Description of Artificial Sequence: Synthetic coding sequence"
  source 1..588: mol_type = other DNA
atgaggcgctggctgggatgtgtatgcttcgcgctcgtgcaggctgattctccaagtgcccccgtgaatgtgacagttcgccatttgaaagccaacagtgccgtggttagctgggacgtcctggaggacgaggtggtaattggatttgcgatcagccagcaaaagaaggacgtgcgcatgttacgctttattcaggaggtgaatacaactacacgcagttgtgccttatgggatctggaggaagataccgaatatatcgtccatgtccaggctatctctatccagggccagagtcccgcttctgaaccggtcctgttcaagacccctagagaggccgaaaagatggcatctaaaaataaagatgaagtcaccatgaaagagatgggccgcaatcaacagttgcggaccggcgaggtgctaataatcgtggtcgttctatttatgtgggctggagtgatcgctctcttctgtcggcagtacgacataatcaaagacaatgaacccaacaacaacaaggaaaaaaccaagagcgctagtgagacctcaacccctgagcaccaaggtggaggcctgctcagaagcaagatc

SEQ ID NO: 11579 - DNA, 588 bp, synthetic construct
  misc_feature 1..588: note = source = /note="Description of Artificial Sequence: Synthetic coding sequence"
  source 1..588: mol_type = other DNA
atgcggcgctggctgggttgtgtgtgcttcgccctcgttcaggctgatagcccgtctgctccagtgaacgtgaccgtgaggcacctgaaggccaacagcgcggtcgtttcatgggacgtgctcgaagacgaagtcgtcatcggttttgccatttcccagcagaaaaaggatgtgaggatgctcagatttatacaggaagtgaatacgaccacccgttcctgcgccctgtgggatttagaggaggacactgaatatatcgttcacgtccaggcaatttccatacagggccagtctcctgcatctgagcctgttctcttcaagactccacgggaggcggagaaaatggcctcaaagaataaggatgaggtgaccatgaaggagatgggaagaaatcagcagcttagaactggggaagtcctgatcattgtcgtcgtgctgttcatgtgggcaggagtgatagcgcttttctgccggcagtatgatattataaaagataatgagccaaataacaacaaggaaaagacaaaatcggcatcagaaaccagtactccagagcaccaagggggcggcctcctccgctccaagatc

SEQ ID NO: 11580 - DNA, 588 bp, synthetic construct
  misc_feature 1..588: note = source = /note="Description of Artificial Sequence: Synthetic coding sequence"
  source 1..588: mol_type = other DNA
atgagaagatggttggggtgtgtgtgtttcgctctggtgcaggctgacagtccctcagcccccgtgaacgtaaccgtgcgtcatctcaaagctaacagtgcagtggtatcatgggacgtgctcgaggacgaggttgtgattggctttgcaatttcacagcagaaaaaagacgtgcgcatgctacggtttattcaggaggtgaatacaaccacccgcagctgcgccctgtgggaccttgaggaggatacggaatacatcgtgcatgtacaagctatatcaatccagggccagagccctgctagtgagcctgtgctgttcaagacaccccgggaggcggaaaagatggcgtccaagaacaaagacgaggtgaccatgaaggagatgggacggaatcagcagttgcggactggggaagtgcttataatcgtggtagtgcttttcatgtgggccggggttatcgctctcttttgcaggcaatacgatatcatcaaggataacgagcccaataacaacaaagagaagactaaatccgcttcagagactagtaccccggagcaccagggaggtgggctgttgcgatcaaagatc

SEQ ID NO: 11581 - DNA, 588 bp, synthetic construct
  misc_feature 1..588: note = source = /note="Description of Artificial Sequence: Synthetic coding sequence"
  source 1..588: mol_type = other DNA
atgagacgatggctcggatgcgtctgttttgctctggtgcaagccgacagtccaagtgcgcccgttaatgtgaccgttagacacctgaaggccaattccgctgtcgtctcctgggacgtcctggaggacgaagttgtcatcggctttgccatttcccagcagaaaaaggatgtgcgaatgttgcggttcatccaggaagtgaacacaaccacaagatcctgtgcactctgggacctggaggaggacacagagtatattgtacacgtccaggcaatttcaatccagggacagtcccccgcaagcgagcctgttctgttcaaaacaccaagggaagcagaaaaaatggcctccaagaacaaggacgaggtgacgatgaaggaaatgggccgcaatcagcagcttagaaccggcgaggtcctcatcatcgtagtggtgttatttatgtgggcaggtgtgatagcccttttctgccggcaatacgatattatcaaggataatgagcctaacaataataaggagaaaactaagtctgcttcagaaacttctaccccagagcatcaggggggaggattgcttaggagtaaaatt

SEQ ID NO: 11582 - DNA, 588 bp, synthetic construct
  misc_feature 1..588: note = source = /note="Description of Artificial Sequence: Synthetic coding sequence"
  source 1..588: mol_type = other DNA
atgcggcgttggcttggttgtgtgtgcttcgccctcgttcaggctgattcaccttctgctcccgttaatgtaacagttcgtcacctaaaagcaaactcagccgttgtttcttgggatgtgctcgaagacgaggttgtaatcggattcgctatctctcaacaaaaaaaggatgtcagaatgcttcgtttcatacaggaggtgaacacaactacgaggagctgcgcactgtgggacttggaagaggacactgagtacatagtgcacgtgcaggctatatcaatccaaggacagagtccggctagtgaacctgtcctttttaaaaccccacgggaagctgagaaaatggcctctaaaaacaaggacgaggtcaccatgaaggaaatgggccgtaatcagcagcttcgaaccggcgaggtgcttattatcgttgtggtccttttcatgtgggccggggttatagcattgttttgtagacaatacgatatcattaaggataacgagcctaataacaacaaggaaaagactaagtcagcatccgagacaagtactcctgagcaccagggtggaggacttctacgatctaaaatc

SEQ ID NO: 11583 - DNA, 588 bp, synthetic construct
  misc_feature 1..588: note = source = /note="Description of Artificial Sequence: Synthetic coding sequence"
  source 1..588: mol_type = other DNA
atgcgccggtggctcggatgcgtttgtttcgcattagtccaggctgactctccgtccgcgccagtcaatgtcactgtgaggcatctaaaagctaactccgcagttgtgagctgggatgtactcgaggacgaggtcgttattggcttcgctatctcccagcagaagaaagatgtgaggatgttgcgcttcatccaggaagtaaatactaccaccaggtcatgcgccctatgggacctcgaagaggacaccgagtacatcgtgcatgtccaagcgatttcaatccagggtcagagcccagcctccgagcctgtcctctttaaaactccacgagaagccgagaaaatggcctcaaaaaacaaggacgaggttacaatgaaagagatggggaggaaccagcagttgaggacgggcgaagtcttgattattgttgtggttctgttcatgtgggctggtgtcattgccctcttttgtcgtcagtacgacatcatcaaggacaacgaaccaaataataataaggagaagaccaaatctgcgagcgaaacctccacacctgaacaccaggggggtggactgctgcggtccaaaata

SEQ ID NO: 11584 - DNA, 588 bp, synthetic construct
  misc_feature 1..588: note = source = /note="Description of Artificial Sequence: Synthetic coding sequence"
  source 1..588: mol_type = other DNA
atgcggcgatggctcggatgtgtgtgttttgcactcgtccaggcggatagcccttccgcacctgtgaatgtcaccgtccgacatcttaaggcgaactccgctgtcgtgtcatgggatgtcctggaggacgaggtcgtgataggctttgccatctcgcaacagaaaaaagatgtcagaatgttgcgtttcattcaagaagtgaacaccaccacccgttcctgtgcactgtgggacctcgaggaggacaccgaatacatagtgcacgttcaagcaatttcaattcaaggccagagccctgcatcggaaccagtgcttttcaagacccccagagaagctgaaaagatggcatccaagaacaaggatgaagtgaccatgaaggaaatggggagaaaccaacagcttcggactggggaagtgctgattatcgtcgtggtcctgttcatgtgggcaggtgtgatagcccttttttgccggcaatatgacattatcaaagataatgagcccaataacaacaaagagaaaactaagagcgcctccgaaacgagcacccctgagcatcagggcggcggactgctgagatcgaagatc

SEQ ID NO: 11585 - DNA, 588 bp, synthetic construct
  misc_feature 1..588: note = source = /note="Description of Artificial Sequence: Synthetic coding sequence"
  source 1..588: mol_type = other DNA
atgaggcgctggctcggatgtgtctgcttcgcgctcgtacaagccgattcgcccagcgccccagtgaacgtcactgtgcgccacctgaaagccaattccgctgtagtcagctgggatgtgctcgaggatgaggttgtgattggattcgcgatctcacaacagaaaaaagacgttagaatgctccgtttcatccaagaagtcaatactacgacccgctcctgcgctctctgggacctggaagaggatactgaatacatcgtgcacgtgcaggcgatctcgattcaagggcagtcccctgcctctgaaccagtcctgttcaagaccccgcgggaggcagaaaagatggcctcgaagaacaaagacgaggtcaccatgaaggaaatgggcaggaaccagcaacttcggaccggagaagttctgatcattgtcgtggtgctcttcatgtgggcgggagtgatcgccctgttttgccgacagtacgacatcataaaggacaatgagccgaacaacaataaagagaagaccaagtccgcgtctgagacgagcactccggaacatcagggcgggggcttgttgcgctcaaagatc

SEQ ID NO: 11586 - DNA, 588 bp, synthetic construct
  misc_feature 1..588: note = source = /note="Description of Artificial Sequence: Synthetic coding sequence"
  source 1..588: mol_type = other DNA
atgaggcggtggttggggtgcgtctgcttcgcgctcgtgcaggcagatagtccaagtgccccagtgaatgtgaccgttcgtcatttgaaagccaactccgcagttgtgagctgggacgtgctggaagacgaggtggtgattggattcgcaatatcccagcaaaagaaggatgtgagaatgcttcgcttcattcaggaggtcaacacaacgactcggtcttgcgctctctgggacctcgaagaggatacagagtacatagtgcatgtgcaggccatttccatccagggccagagccccgcctcagagccggtcctgtttaaaacaccgcgcgaagcagaaaagatggcctccaaaaataaggatgaggttaccatgaaggagatgggaaggaaccagcagcttcgcacaggggaggttctgataatcgtagttgttcttttcatgtgggctggggtgatagctctgttctgtaggcagtatgatatcatcaaggataatgaaccaaataataataaggagaaaaccaagagcgcttccgaaacctcgacgcctgagcaccagggggggggccttctcaggagcaaaatc

SEQ ID NO: 11587 - DNA, 588 bp, synthetic construct
  misc_feature 1..588: note = source = /note="Description of Artificial Sequence: Synthetic coding sequence"
  source 1..588: mol_type = other DNA
atgagacgatggctgggctgtgtgtgcttcgcactggtgcaggccgactccccttccgctcccgtgaacgtgaccgtccgacacttgaaggcgaattcagccgtggtctcttgggatgttctcgaggacgaggtggttattggcttcgccataagtcagcaaaagaaggacgtcaggatgctccgttttatccaggaggtgaacactacaacaagatcttgtgctttgtgggaccttgaagaagacacagaatacatagtacacgtgcaggccataagcattcagggccagtccccagcctccgagcccgtcttgtttaaaacaccccgcgaggcggagaagatggccagcaaaaataaggatgaggtcaccatgaaggaaatgggccgaaatcagcaactgaggactggagaggtgctgataattgtggtggtactgtttatgtgggccggagtcatagcgctgttttgccggcagtatgatataatcaaggataatgagccaaacaataacaaagagaaaactaaaagtgcatccgaaactagcacgccagaacaccagggtggcggtctccttaggtcgaagatt

SEQ ID NO: 11588 - DNA, 588 bp, synthetic construct
  misc_feature 1..588: note = source = /note="Description of Artificial Sequence: Synthetic coding sequence"
  source 1..588: mol_type = other DNA
atgcggcggtggcttggatgcgtctgttttgccctcgttcaggccgattccccctccgcaccagtgaacgtaacggtgaggcacctaaaagccaattctgcggtggtctcatgggatgtgctagaagatgaagtcgtcatcggattcgctatcagtcagcagaagaaagatgttaggatgctaagatttatacaggaggtaaatacgacaacaagatcttgtgccctgtgggatctcgaggaagatactgaatacatcgtccatgtccaggccatatcaatccagggacagtctccagcttcagagcctgtcctctttaaaacgccgcgggaagcagagaaaatggcctctaagaataaagatgaggtgacaatgaaagaaatggggcgaaaccagcagctacgaactggagaggtgcttatcatagtggtggtcttattcatgtgggcaggggttatcgctcttttctgtagacagtatgatattataaaagataacgagcccaacaataataaggaaaagacaaaatccgcctccgaaacaagtacacctgagcaccagggaggggggttgctgaggagtaagatc

SEQ ID NO: 11589 - DNA, 588 bp, synthetic construct
  misc_feature 1..588: note = source = /note="Description of Artificial Sequence: Synthetic coding sequence"
  source 1..588: mol_type = other DNA
atgcgccgctggctcggctgtgtctgcttcgctctggtgcaggcagactcacctagtgccccagtcaatgtcactgtgagacacctgaaggcaaattccgctgttgtcagttgggatgtgcttgaggacgaggtggtgatcggttttgctatttcgcagcaaaagaaggatgtacgcatgctgcgctttatacaggaagtcaacacaacgactcgttcctgtgcgctgtgggacctggaggaagacactgaatatatcgtccacgttcaggctatttccatacagggccagagcccggcatctgaacctgtgttgttcaaaactcctagggaagcggagaaaatggcgtctaagaataaggatgaggtcactatgaaggagatggggaggaatcagcaactgagaaccggcgaagtgctgatcatcgtagtcgtgcttttcatgtgggctggggttattgccctcttctgtcgccagtatgacataatcaaagacaacgaacccaacaacaataaagaaaaaactaaaagcgcctctgaaacttcaacccccgaacatcaggggggcggcttactgagaagcaaaatt

SEQ ID NO: 11590 - DNA, 588 bp, synthetic construct
  misc_feature 1..588: note = source = /note="Description of Artificial Sequence: Synthetic coding sequence"
  source 1..588: mol_type = other DNA
atgagaaggtggttgggctgcgtgtgtttcgccctggtgcaagcagattcaccatccgcccctgtgaacgtaactgtgagacatttgaaggcaaacagcgctgtcgtctcgtgggatgtgctggaggatgaagtcgtaattggttttgcaatttcgcagcagaaaaaggatgtccgcatgcttcgctttatccaagaagtcaacacgactacccggtcatgcgccctttgggaccttgaagaggacactgaatacatagtgcatgtgcaggcaatatccatccagggtcaaagccccgcctcagaaccggtcctgtttaagacccccagagaagcagagaaaatggcttccaagaataaagatgaggtcaccatgaaagaaatgggccggaaccaacagctccgaaccggagaggtgctgattatcgtggttgtgcttttcatgtgggcaggagtgatcgcgcttttttgtcggcaatacgacattatcaaggacaacgaaccaaataacaataaagaaaagaccaagtcagcatcggagactagcacgcctgaacaccaggggggagggctccttcgcagcaagatt

SEQ ID NO: 11591 - DNA, 588 bp, synthetic construct
  misc_feature 1..588: note = source = /note="Description of Artificial Sequence: Synthetic coding sequence"
  source 1..588: mol_type = other DNA
atgcgacgttggctgggttgtgtgtgcttcgcactggtgcaggctgattcaccaagcgcacccgtgaacgtgacagtgagacacctgaaagcaaactcagcagtggtttcatgggatgtgttggaagacgaggtggtgatcggattcgcaatctctcagcaaaagaaagacgtacggatgctgcgctttatccaggaggtgaataccacgacaaggtcctgcgccctttgggacctggaggaggatactgaatatatagtccacgtacaggccatatccatccagggacagtcccccgcgagcgaacccgtactattcaagactcccagggaagctgagaagatggccagcaagaacaaagatgaagttactatgaaagagatggggaggaaccagcagctgcggacgggcgaggtcttgataatcgtggtggtgttgtttatgtgggctggcgttattgccctgttttgtcgccagtacgacatcatcaaagataacgagcccaataataacaaggaaaagacaaagtccgcgtcagagaccagcacccccgaacaccaaggagggggccttctaagatccaagatc

SEQ ID NO: 11592 - DNA, 588 bp, synthetic construct
  misc_feature 1..588: note = source = /note="Description of Artificial Sequence: Synthetic coding sequence"
  source 1..588: mol_type = other DNA
atgaggcggtggctcggttgtgtgtgcttcgccctggtacaggctgactcaccgagcgcaccagtgaacgtaacagtcagacacctgaaagcaaatagtgccgtcgtgtcttgggatgttctggaggacgaggttgtaatcggattcgctataagtcagcagaagaaagatgtgcggatgctgaggttcattcaggaggttaatactactactcggagctgtgcactgtgggacctggaggaggacactgagtacatcgtacacgtgcaggcaatctcaatacagggacagtctccagcctctgagccagttctgtttaagactccaagggaggctgagaagatggcatccaagaataaggatgaagtcactatgaaagaaatgggaagaaaccagcagctccggacaggtgaggtgctgataattgtcgtggttttgttcatgtgggctggcgtgattgccctcttctgcaggcagtatgatattatcaaggataatgagcccaataacaacaaggagaaaaccaagagcgctagtgagacatccacccctgaacatcaaggcggcggcttgctgaggtctaaaatc

SEQ ID NO: 11593 - DNA, 588 bp, synthetic construct
  misc_feature 1..588: note = source = /note="Description of Artificial Sequence: Synthetic coding sequence"
  source 1..588: mol_type = other DNA
atgaggcgctggctgggctgcgtttgcttcgcattggtccaggccgatagcccaagcgcacccgttaatgtcaccgtccgtcatctgaaggctaacagcgccgtggtgtcgtgggatgtcctggaagatgaggtcgtgattggctttgctatcagccagcagaagaaggacgttcgcatgttgcgcttcattcaggaagtgaataccaccacgcgctcctgcgctctatgggacctcgaggaggacaccgagtacatcgtacatgttcaggccatttcgatccaaggacagtcccctgcctctgagcccgtcctcttcaaaacgccgcgtgaagcagaaaagatggcaagcaagaataaagatgaggtcactatgaaggagatgggccgaaatcagcaattaaggaccggtgaggttctcattatcgtcgtcgtcttgttcatgtgggctggcgtgatagccttattttgtcgccagtacgacatcattaaagacaacgagccaaataacaataaagagaaaactaaaagcgcgagcgaaactagcactcctgagcatcaagggggcggcctgctgcgaagcaagatt

SEQ ID NO: 11594 - DNA, 588 bp, synthetic construct
  misc_feature 1..588: note = source = /note="Description of Artificial Sequence: Synthetic coding sequence"
  source 1..588: mol_type = other DNA
atgagacggtggctgggctgcgtgtgctttgccttggtccaagcagatagcccctccgcccctgtgaacgttaccgtccgccacctcaaagcgaattcagctgtcgtgtcgtgggatgttcttgaagatgaggtggtgattggattcgcaataagccaacaaaagaaggacgttagaatgcttcgtttcatccaggaagtgaataccactactaggtcgtgtgccctgtgggacctcgaagaggatacggagtatatagtgcatgtgcaggcgatcagcattcagggtcagtcccctgcatctgagcctgtcctgtttaagactcctcgggaagcagagaagatggcgtcgaagaataaggacgaggtcaccatgaaagaaatggggcgaaaccagcaactccggaccggagaggtgctcatcatagtcgtagtgcttttcatgtgggccggagtcattgcacttttttgtagacagtatgacatcataaaagacaatgaaccgaacaacaacaaggaaaagactaagtccgcatccgaaacctcaactccagagcatcaaggcggaggtctgctgcgatccaagatc

SEQ ID NO: 11595 - DNA, 588 bp, synthetic construct
  misc_feature 1..588: note = source = /note="Description of Artificial Sequence: Synthetic coding sequence"
  source 1..588: mol_type = other DNA
atgaggcgttggctaggatgtgtgtgttttgcccttgtgcaggcagatagcccgagcgctcccgtcaatgtaactgttagacacttaaaagccaactcagccgttgtcagttgggatgtacttgaggacgaggtagttatcgggtttgccattagccagcagaaaaaagatgtgcggatgctaaggtttatacaagaggttaacacaacaacccggtcttgtgccctttgggacctggaggaagacactgagtatatagtgcacgttcaggccatatctatccagggacagtcacccgcgagcgagcctgtgctctttaagacacccagagaagctgagaaaatggcttctaaaaataaagatgaagtgaccatgaaggaaatgggacgcaaccaacagctaagaactggcgaggtattgataattgtggttgtgctcttcatgtgggcaggcgtaatcgccctcttttgccgccaatacgacattatcaaggacaacgagcctaacaacaataaggagaagaccaaatctgctagcgagactagcacgccagagcaccagggaggcggcttactcagatcaaagata

SEQ ID NO: 11596 - DNA, 588 bp, synthetic construct
  misc_feature 1..588: note = source = /note="Description of Artificial Sequence: Synthetic coding sequence"
  source 1..588: mol_type = other DNA
atgaggcgctggctcggctgtgtgtgctttgccctggtgcaggcggacagcccgagcgccccggtcaacgtgacggttcggcatcttaaggccaacagcgccgtcgtgtcgtgggatgtgctcgaggacgaagtcgtcatcggattcgccatctcgcaacagaagaaggacgtccggatgctccgcttcatccaagaggtcaacacgaccactcggtcctgcgcactctgggatttggaggaggacactgaatacatcgtccatgtgcaggcgatatccattcaggggcagtcgcccgcgtcggaacctgtcctgtttaagaccccacgcgaagccgaaaagatggcctcaaagaacaaagacgaagtgaccatgaaggagatgggaagaaatcagcagctcaggactggagaagtgctgatcatcgtcgtggtgcttttcatgtgggccggagtcattgcgctgttttgtcggcagtacgatatcatcaaggataatgagccgaataacaacaaagaaaagactaaatcggcctcggagacttccactccggagcatcaggggggaggactgctgcgctccaagatt

SEQ ID NO: 11597 - DNA, 588 bp, synthetic construct
  misc_feature 1..588: note = source = /note="Description of Artificial Sequence: Synthetic coding sequence"
  source 1..588: mol_type = other DNA
atgcggcgctggttgggatgcgtgtgcttcgccctcgtgcaggccgattcgccatccgcgccggtgaacgtcaccgtgaggcacctgaaggctaattccgcagtggtcagctgggatgtgctggaagatgaagtcgtaatcggatttgccatttcgcaacaaaagaaagacgtccgcatgttgcgctttatccaggaagtgaacactaccacccgttcatgtgccctttgggacttggaagaggacaccgaatacatcgtgcatgtgcaggcaatatccatccaggggcagagccctgcgagtgaaccggtgctgttcaagactcctcgggaagcagaaaagatggccagcaagaacaaagacgaggtcacgatgaaggagatgggacggaaccagcaactgagaactggtgaagtgctgatcattgtggtagttctgttcatgtgggcgggagttatcgcgctgttctgcagacagtacgatatcatcaaggacaatgagcctaacaacaataaggagaaaaccaagtcggcttccgagactagcacgccagaacaccagggtgggggcctcctcagatcgaaaatc

SEQ ID NO: 11598 - DNA, 588 bp, synthetic construct
  misc_feature 1..588: note = source = /note="Description of Artificial Sequence: Synthetic coding sequence"
  source 1..588: mol_type = other DNA
atgagacggtggcttgggtgtgtctgcttcgctctggtgcaggcggactcccctagcgctccagtgaacgtcacggtgcgtcacctgaaggcgaatagcgcagtggtgtcctgggacgtgctggaggacgaagtggtgatcggcttcgccatctcccaacagaagaaggatgtccggatgcttaggttcatccaagaggtcaacactactacccggtcgtgcgcgctgtgggatttggaagaagatactgagtacatcgtgcatgtgcaggcaatatcaatccaagggcagtcgccggcatcggaaccagtgctgttcaagacgccccgggaggcagaaaagatggcctccaaaaacaaagacgaggtcaccatgaaggaaatgggacggaaccagcagctcagaactggagaggtgctgatcattgtcgtggtgctcttcatgtgggcgggagtgatcgcactgttctgccggcaatacgacattatcaaggataacgagccaaacaacaacaaagaaaagaccaagtcggcgtcagaaacctccactcccgaacatcaaggaggaggcctcttgaggtcgaaaatc

SEQ ID NO: 11599 - DNA, 588 bp, synthetic construct
  misc_feature 1..588: note = source = /note="Description of Artificial Sequence: Synthetic coding sequence"
  source 1..588: mol_type = other DNA
atgaggcgttggctaggctgcgtgtgcttcgctctggtgcaggcggacagcccatccgcccccgtcaacgtaacggtgaggcacttaaaagccaactctgcagtagtaagttgggacgtgttggaggacgaagtggtcatcggatttgcaatcagccagcaaaagaaagacgtgaggatgctgcgcttcatacaggaggttaataccacaacaagatcctgcgcgctttgggatcttgaagaagataccgagtatatcgtacatgtgcaggctatttcaatacaggggcagtcacccgcttccgagcctgtattgtttaaaactccgcgggaagcagaaaaaatggcgagcaaaaacaaagatgaagtgacaatgaaggagatgggacgcaaccagcagttgcgcacaggggaggtgttgatcattgtggtcgttctattcatgtgggctggggttattgctcttttttgccggcaatatgacattattaaggataatgaacccaataacaataaggagaaaaccaaatcggccagcgaaaccagcaccccagaacaccaggggggaggactgctacgatctaaaatt

SEQ ID NO: 11600 - DNA, 588 bp, synthetic construct
  misc_feature 1..588: note = source = /note="Description of Artificial Sequence: Synthetic coding sequence"
  source 1..588: mol_type = other DNA
atgcgccggtggctcggatgtgtgtgttttgccctggtccaagcagattcccctagcgcacctgttaacgtcaccgtccgccatctgaaggcaaatagcgccgtggtgtcgtgggacgtgctggaagatgaagtcgtcattggttttgcaatttcgcaacagaagaaagatgttcgtatgctgagatttatccaggaagtcaacaccactactcgaagctgtgctctctgggatctggaagaggacaccgaatacatcgtccacgtgcaggccatctcaatacagggccaatcccctgcttccgagcctgtgctcttcaagactcctagagaagcagaaaagatggcgtcgaagaacaaagatgaagtgacgatgaaagagatgggtcgaaatcagcaacttaggaccggagaggtgctgattatagtggttgtgttgttcatgtgggctggggtgattgcactcttctgccggcaatatgatatcattaaagacaatgagccaaacaataacaaggagaaaactaaatcagcctccgaaaccagcaccccagaacatcaaggagggggccttcttcggtccaaaatt

SEQ ID NO: 11601 - DNA, 588 bp, synthetic construct
  misc_feature 1..588: note = source = /note="Description of Artificial Sequence: Synthetic coding sequence"
  source 1..588: mol_type = other DNA
atgaggagatggcttggatgtgtgtgtttcgcgctggtgcaagcggactcaccatcggcccctgtgaatgtcacggtcagacatctgaaagccaactcggccgtagtctcgtgggacgtccttgaagatgaggtggtgattggcttcgcaatttcgcaacaaaagaaggatgtgcgaatgttgcggtttatacaggaggtgaacactaccacccggtcgtgcgcactgtgggatctggaagaggacaccgaatacatcgtgcatgtgcaagcaatcagcattcaaggtcagtcgcctgcaagtgagccagtgctgtttaagacgccaagagaagctgagaagatggcgtccaagaataaagatgaagtcactatgaaagaaatggggagaaaccaacagctgcgtactggtgaggtcctgataatcgtggtggtgctgttcatgtgggcaggtgtgattgcgctcttctgtcgccagtacgacatcattaaagataacgaacctaataacaataaggagaaaacgaaaagcgcctcggaaacttccacccccgagcaccagggtggaggacttctccgatccaagatt

SEQ ID NO: 11602 - DNA, 588 bp, synthetic construct
  misc_feature 1..588: note = source = /note="Description of Artificial Sequence: Synthetic coding sequence"
  source 1..588: mol_type = other DNA
atgcgcagatggctggggtgtgtgtgctttgcactggtccaagcagactcaccgtcggcccccgtcaatgtgaccgtgagacatctcaaggccaactcggcagtcgtgtcgtgggacgtccttgaagatgaagtcgtgatcggattcgctatctcacaacagaaaaaggacgttaggatgcttcggttcatccaagaggtgaacaccactactcggtcgtgcgcactgtgggaccttgaggaagataccgaatacatcgtccacgttcaggcgatctcgatccaaggacaatccccggcgtccgagccggtgctgttcaagactccgcgggaagccgagaagatggcgagcaaaaacaaggacgaagttaccatgaaggaaatgggcaggaaccagcaactccgcacgggagaggtcttgattatcgtcgtcgtgctcttcatgtgggcaggggtgatcgcgctgttctgtcggcaatatgacatcatcaaggacaacgagccgaataacaacaaggagaaaacgaaatcagcctccgaaacttccacccctgaacaccaaggaggaggtctgctccgctcgaagatc

SEQ ID NO: 11603 - DNA, 588 bp, synthetic construct
  misc_feature 1..588: note = source = /note="Description of Artificial Sequence: Synthetic coding sequence"
  source 1..588: mol_type = other DNA
atgcgacgatggctgggatgtgtttgtttcgcactcgtgcaggccgattcaccaagcgcaccagtgaatgttaccgttcgccatctaaaagctaactccgccgtcgtttcgtgggatgtccttgaggatgaagtagttatcggattcgctatctcccaacagaagaaagatgtacgtatgctccggtttatccaggaagttaatactactacgcgatcatgtgccttatgggatcttgaagaagatactgaatacattgtacatgtacaagccattagtattcagggacagtctccggcaagtgaaccagttttgttcaaaactcctagagaagctgagaaaatggcgtccaaaaataaggatgaggtcacaatgaaggaaatgggacgaaaccagcaattgcggaccggagaagtcctcataattgtggtggtactatttatgtgggctggcgttatcgcactgttctgtcgacagtatgacatcatcaaagataatgagccaaataacaacaaagagaagacgaagtctgcgtccgagacttcgaccccagaacaccaagggggcggcttactgagaagtaagatt

SEQ ID NO: 11604 - DNA, 588 bp, synthetic construct
  misc_feature 1..588: note = source = /note="Description of Artificial Sequence: Synthetic coding sequence"
  source 1..588: mol_type = other DNA
atgcgccgatggctggggtgtgtctgcttcgcccttgtgcaagcggactccccgtcggcccctgtcaatgtcaccgttcggcaccttaaagccaacagcgccgttgttagctgggacgtgctcgaagatgaagtggtcatcggattcgccatctcgcaacagaagaaggacgtgcgcatgctgcggtttatccaagaggtgaacactacgaccagatcctgcgctctgtgggaccttgaagaagatactgagtacatcgtccacgttcaggcgatttcaatccagggacaatcgccggcttccgaaccagtgctgttcaagactcctcgggaggcagaaaagatggcgtccaagaacaaagacgaggtgacgatgaaagagatgggcagaaatcagcagctccgcaccggggaagtcttgattatcgtggtcgtgttgtttatgtgggccggcgtgatcgctctcttctgccgacagtacgacatcatcaaagataacgaaccaaataacaacaaggagaaaaccaagtcagcgtccgaaacctcgacccccgagcatcagggtggaggactgctgcgctcaaagata

SEQ ID NO: 11605 - DNA, 588 bp, synthetic construct
  misc_feature 1..588: note = source = /note="Description of Artificial Sequence: Synthetic coding sequence"
  source 1..588: mol_type = other DNA
atgagacgctggctcggatgtgtgtgcttcgctctcgtccaggccgattcgccatcagcaccggttaatgtgaccgtgcgccatcttaaagccaactcggccgtcgtgtcgtgggacgtgctggaggacgaagtcgtgatcggctttgcgatctcacagcagaagaaggatgtgcggatgctgcggttcattcaagaggtgaacaccaccacccgctcatgcgcgctgtgggatctggaggaagataccgaatacattgtgcacgtccaggctatttcaatccaaggacagagcccggcgtccgagccggtgctgtttaagactccgagagaggcggagaagatggcttcgaaaaacaaggacgaagtgacgatgaaagagatggggcggaatcagcagctccggactggagaggtcctgatcatcgtggttgtgctgttcatgtgggcaggagtgattgcactgttctgccggcagtacgatatcattaaggacaacgaaccaaacaacaataaggaaaagaccaagtcggcctccgagacttcgaccccagaacaccaaggaggaggtctgctccgctcgaagatc

SEQ ID NO: 11606 - DNA, 588 bp, synthetic construct
  misc_feature 1..588: note = source = /note="Description of Artificial Sequence: Synthetic coding sequence"
  source 1..588: mol_type = other DNA
atgcgacgctggctggggtgcgtctgcttcgcactggttcaagccgattccccgtctgctccagtgaacgttactgttcggcacttaaaagcaaatagcgctgtggtgtcctgggatgtgctggaggatgaagtagtgatcggatttgccatcagtcagcagaagaaggatgtgagaatgctgagatttattcaagaggtgaacaccaccaccaggtcatgtgctctgtgggatcttgaggaagataccgagtacatcgtacatgtacaggctataagcatccagggccagtccccagccagcgaacctgttttgtttaaaactcctcgggaggccgaaaagatggctagtaaaaataaggacgaggtaaccatgaaagaaatgggcaggaatcagcagctgcgcacaggagaggtgttgatcattgttgtcgttctctttatgtgggctggcgtcatcgccctattttgtcggcagtacgatatcattaaggataacgaaccgaacaataataaggaaaagactaaaagcgccagtgagacatctaccccggagcatcaaggtggcggtctgcttcgatccaaaatt

SEQ ID NO: 11607 - DNA, 588 bp, synthetic construct
  misc_feature 1..588: note = source = /note="Description of Artificial Sequence: Synthetic coding sequence"
  source 1..588: mol_type = other DNA
atgcgtcgatggttaggttgtgtatgttttgcgctagtacaagcggattcgccgtcggcgccggtaaatgtaacggtacgacatctaaaagcgaattcggcggttgtttcgtgggatgtactagaagatgaagtagtaataggttttgcgatatcgcaacaaaaaaaagatgttcgtatgctacgttttatacaagaagttaatacgacgacgcgttcgtgtgcgttatgggatctagaagaagatacggaatatatagtacatgttcaagcgatatcgatacaaggtcaatcgccggcgtcggaaccggtattatttaaaacgccgcgagaagcggaaaaaatggcgtcgaaaaataaagatgaagtaacgatgaaagaaatgggtcgtaatcaacaattacgaacgggtgaagttctaataatagtagtagttttatttatgtgggcgggtgttatagcgttattttgtcgacaatatgatataataaaagataatgaaccgaataataataaagaaaaaacgaaatcggcgtcggaaacgtcgacgccggaacatcaaggtggtggtctactacgatcgaaaata

SEQ ID NO: 11608 - DNA, 588 bp, synthetic construct
  misc_feature 1..588: note = source = /note="Description of Artificial Sequence: Synthetic coding sequence"
  source 1..588: mol_type = other DNA
atgcggaggtggctcgggtgtgtctgtttcgctttggtccaggccgactctcctagtgctcccgtaaatgtgactgtccgacatctgaaagctaactctgcagtggtgtcttgggatgttctcgaggatgaggtggtcattggttttgccattagccagcagaaaaaagatgtacggatgctgcgctttattcaagaggtgaataccactactcgatcatgtgcattatgggatctcgaagaggacacagagtacatagtccacgtccaggctatctcaattcagggtcagagtccagcttccgaacccgttctctttaagacaccccgggaggcggagaagatggcatcaaaaaataaggacgaggtgacaatgaaagaaatgggacgcaatcagcagctgcggaccggcgaggttcttatcatcgtggtcgtcctgtttatgtgggccggagtaatagccctgttctgcagacagtatgacataattaaagataatgagcctaataacaacaaagagaagactaagagcgcttctgagacaagcacccctgagcatcagggaggcggtctgctcaggtcgaaaatc

SEQ ID NO: 11609 - DNA, 588 bp, synthetic construct
  misc_feature 1..588: note = source = /note="Description of Artificial Sequence: Synthetic coding sequence"
  source 1..588: mol_type = other DNA
atgcgcagatggcttgggtgtgtgtgcttcgctctcgtccaggctgattcacctagtgctccagtgaatgtgactgtgcgccacctgaaggctaattctgctgttgtctcctgggatgtgttggaggacgaagtcgtgatcggattcgcaattagccagcaaaagaaggacgtgcgaatgttgcgattcattcaggaggtgaacaccacaacacggtcctgcgccctgtgggacctggaagaggataccgaatacattgtgcacgtacaggccatctctatccagggccagagccccgcttctgagcctgtcctgttcaagaccccccgcgaggccgaaaaaatggcgagtaagaataaggacgaagtgaccatgaaagagatgggcaggaaccaacagctgcggaccggagaagtgctgataattgttgtggtcttgttcatgtgggcaggtgtgatcgcactgttctgccgacagtacgacattatcaaggacaatgagcccaacaataataaagagaaaactaagtctgcctccgaaaccagtacccccgagcatcaagggggcggcctgctcaggtctaagatt

SEQ ID NO: 11610 - DNA, 588 bp, synthetic construct
  misc_feature 1..588: note = source = /note="Description of Artificial Sequence: Synthetic coding sequence"
  source 1..588: mol_type = other DNA
atgaggcgatggttgggctgcgtgtgtttcgccctagtgcaggctgattctcctagtgcaccagttaacgtcaccgtgcgtcacctcaaggctaactctgcagtggtctcctgggacgtgctagaggacgaagtggtaatcggctttgcgatttctcagcagaaaaaggatgtgcgaatgctgcgatttatccaggaggtcaatactacaaccagatcttgcgccctgtgggacttggaggaggacaccgagtacatagtccatgtgcaggcaatctccatccaggggcagtcccctgcttctgaacctgtgcttttcaagacaccacgagaagcggagaaaatggctagcaagaataaggatgaagttaccatgaaagaaatggggcgaaatcagcagctaaggactggtgaggtgttgataatcgtggtcgtgctattcatgtgggccggcgtcatcgccctattctgtaggcagtacgacatcatcaaagacaacgaacccaacaataacaaggaaaaaactaaatcagccagtgagacttccaccccggaacaccaggggggggggttattgaggagcaaaatc

SEQ ID NO: 11611 - DNA, 588 bp, synthetic construct
  misc_feature 1..588: note = source = /note="Description of Artificial Sequence: Synthetic coding sequence"
  source 1..588: mol_type = other DNA
atgcgaaggtggttaggctgtgtgtgcttcgctctggtacaggctgactctcctagcgctcctgtcaacgtcacagtaaggcacttaaaagccaactcagcagtggtatcatgggacgtgttagaagatgaagttgtgattggatttgcaatcagccagcagaaaaaagacgtgcgcatgttgaggttcatacaggaggtcaatactaccacaaggagctgcgccctttgggatctggaagaggatacagagtacatcgtgcacgttcaggctatctcaattcagggtcagtcccccgcctccgaacccgtgctgtttaaaaccccaagggaggcggaaaagatggcctctaaaaataaagacgaggtgacaatgaaagagatgggacgcaaccaacaactgagaaccggcgaggtgttaattattgtggtggtgctgtttatgtgggcaggcgtaattgccctgttttgccgccagtatgatataataaaggataacgagcccaataataacaaagagaagaccaaaagcgctagtgaaacttcaacccccgagcaccagggagggggattgcttcggagcaagatc

SEQ ID NO: 11612 - DNA, 588 bp, synthetic construct
  misc_feature 1..588: note = source = /note="Description of Artificial Sequence: Synthetic coding sequence"
  source 1..588: mol_type = other DNA
atgagaagatggcttggctgtgtatgttttgcccttgtgcaggctgactccccctctgcccctgttaatgtgaccgttcggcatttgaaggctaacagcgctgtcgtgtcctgggacgtgctagaggatgaggttgtaattggattcgccattagccagcagaagaaggatgtcagaatgctgcgcttcattcaggaagttaacaccacaactagatcttgcgccctgtgggacctcgaggaggacacagagtacatagtgcatgtacaggccatcagcattcaagggcagagtccagccagtgagcccgtgctgttcaaaacgcctcgtgaagccgaaaaaatggcatcaaagaacaaggatgaggtgaccatgaaggagatggggcggaaccaacagcttcgcaccggggaggtcctgattattgttgtagtactctttatgtgggccggggttatcgcgttgttttgccgccaatacgatatcataaaggataatgaaccgaacaacaacaaggagaaaacaaagtcagcatcagaaacttctacaccagagcatcaggggggcggcctgctgcgcagtaaaatc

SEQ ID NO: 11613 - DNA, 588 bp, synthetic construct
  misc_feature 1..588: note = source = /note="Description of Artificial Sequence: Synthetic coding sequence"
  source 1..588: mol_type = other DNA
atgcggcgatggcttggctgtgtctgctttgcactcgtgcaagcagattcgccatcggctccagtgaacgtcactgtgagacatttgaaggcaaattccgcagtggtgtcctgggacgtacttgaagatgaagtcgtaattggtttcgctatctctcaacagaaaaaggacgtgcgtatgctcagattcattcaggaagtgaacaccaccacgcgttcgtgtgccctgtgggacctggaggaagataccgagtacatcgtgcatgtgcaggctatttccatacaaggacagtcccctgcaagcgaaccagtgctgtttaagactccgcgcgaagccgagaagatggcatcgaaaaacaaggacgaagtcacgatgaaggagatgggtcgaaaccagcaacttcgcaccggcgaggtgttgattattgtcgtcgttctctttatgtgggcaggagtgatcgcattgttttgtaggcagtacgatatcataaaggataatgaacctaacaataacaaagaaaagactaagtccgcatcggagacttcgacgcccgaacatcagggagggggactcctgcggagcaagatc

SEQ ID NO: 11614 - DNA, 588 bp, synthetic construct
  misc_feature 1..588: note = source = /note="Description of Artificial Sequence: Synthetic coding sequence"
  source 1..588: mol_type = other DNA
atgaggcggtggttgggctgtgtatgttttgcgctcgtccaggccgacagtccaagtgcacccgtgaatgtcacggtcagacatctgaaggctaacagtgccgtcgttagttgggacgtgctggaagatgaggtggtgataggatttgccatttctcagcaaaagaaagatgtaaggatgctgaggttcatacaagaggtcaacactacaacaagaagctgcgcactgtgggacctcgaagaagataccgagtatatcgtgcacgtgcaagctattagcattcaggggcaatctccggcatctgagcctgttctgtttaagacaccacgtgaagcggaaaaaatggcgagcaaaaataaagacgaggtgaccatgaaggagatgggcagaaatcagcaactgcgcaccggtgaggtgcttataatcgtggtggtgctgtttatgtgggcaggtgtaatcgcacttttttgccgccagtacgacattattaaagacaatgaaccaaataacaacaaggaaaaaacgaagtcggcatcagagacttccactccggagcaccagggcggtgggctgctgcggagcaagatc

SEQ ID NO: 11615 - DNA, 588 bp, synthetic construct
  misc_feature 1..588: note = source = /note="Description of Artificial Sequence: Synthetic coding sequence"
  source 1..588: mol_type = other DNA
atgcggcggtggctcgggtgtgtgtgttttgcccttgtgcaggcagatagccccagcgcaccagtgaacgtcaccgttcggcatttgaaggcaaacagcgcagtggtgtcctgggatgtgttggaagatgaagttgtcattgggttcgcaatctcccagcaaaagaaagatgtgcgcatgcttagatttatccaggaggtgaacacgaccacccggtcgtgtgccctgtgggatcttgaagaggatactgagtacattgtccatgtccaggccatttccatccaggggcagagccctgcgtcggaaccggttctgttcaaaactcctcgtgaagcagagaagatggcttcaaagaataaggacgaagtgacgatgaaagaaatgggacgcaaccaacaactgcgaaccggggaagtgctcataattgtggtggtgttgtttatgtgggcaggtgtcattgctttgttctgcagacaatacgacattatcaaggataacgagccaaacaacaataaggaaaagacgaaatccgcgtcagaaacttcgacccctgagcatcaagggggaggactgctcaggtcgaaaatc

SEQ ID NO: 11616 - DNA, 588 bp, synthetic construct
  misc_feature 1..588: note = source = /note="Description of Artificial Sequence: Synthetic coding sequence"
  source 1..588: mol_type = other DNA
atgcggcgctggctgggatgcgtgtgctttgccctggtgcaagccgattccccttcggccccggtgaacgtcactgtgcgccacttgaaggccaactcggcagtggtgagctgggatgtgctcgaggacgaggtggtgattgggttcgccatttcccaacagaagaaggatgtcagaatgctgcgattcatccaggaggttaatactaccactaggtcgtgtgcgctgtgggacctggaagaggacacggaatacatcgtgcatgtgcaggccatcagcatccaggggcagtcccccgcttctgaaccagtgctgttcaagaccccgcgcgaggcggaaaaaatggcatcaaagaacaaagacgaagttactatgaaggagatgggaagaaaccaacaattgcgcaccggagaggtgctcatcatcgtcgtcgtcctcttcatgtgggcaggcgtcatcgctctcttttgccggcagtacgacattatcaaggataatgaaccgaacaacaataaagaaaaaaccaagtcagcgtccgaaactagcaccccagaacaccagggaggtggccttctgcggtcgaagatc

SEQ ID NO: 11617 - DNA, 588 bp, synthetic construct
  misc_feature 1..588: note = source = /note="Description of Artificial Sequence: Synthetic coding sequence"
  source 1..588: mol_type = other DNA
atgagaagatggctgggatgtgtgtgtttcgcacttgtgcaggctgattcgccctcggcccctgtgaatgtcaccgtccggcaccttaaggcaaactcagcagtggtgagctgggacgtgctcgaagatgaagtggtgataggatttgctatttcacaacagaagaaggacgtgcgcatgctgcgattcattcaagaggttaacactactacgagatcctgtgcactgtgggatctggaagaagatactgagtatatagtgcatgtgcaagccatttcgatccaaggacaatcccccgcatcggagcccgtccttttcaagaccccgagagaagcagagaagatggcatccaaaaacaaagacgaagtgactatgaaagagatgggacggaaccaacagcttcgtaccggtgaagtcctcataatcgtggtggtccttttcatgtgggcgggtgttattgcactgttctgtaggcaatacgacataatcaaagataacgagcctaacaataacaaagaaaagaccaagagcgcctcggaaacttcgaccccagaacatcagggaggtggactgcttcgtagcaagata

SEQ ID NO: 11618 - DNA, 588 bp, synthetic construct
  misc_feature 1..588: note = source = /note="Description of Artificial Sequence: Synthetic coding sequence"
  source 1..588: mol_type = other DNA
atgcggcggtggctaggctgtgtgtgtttcgccctagtccaggcagattccccaagcgcgccagttaatgtgaccgtccggcacctcaaagctaactctgcagtggtgagttgggatgtgctcgaggacgaagttgtgatcgggttcgccatttctcagcaaaaaaaggacgtccgtatgctgagattcatccaggaggtgaacacgactactcgcagctgcgcactatgggacctggaggaggacacagagtacatagtccacgtccaggccatcagcatccaagggcaaagcccggccagtgagcccgtgctgtttaagacacctagggaggccgagaaaatggcctctaaaaacaaggatgaagtcacaatgaaggaaatgggacggaaccagcaactcaggaccggggaggtcctgattatagtggtggttctgttcatgtgggccggagttattgctctcttttgccgtcagtatgacattattaaggacaatgagcccaataataacaaggagaagaccaagtcagcatccgagacttctacgcctgaacatcagggtggaggcttgcttcgttccaaaatt

SEQ ID NO: 11619 - DNA, 588 bp, synthetic construct
  misc_feature 1..588: note = source = /note="Description of Artificial Sequence: Synthetic coding sequence"
  source 1..588: mol_type = other DNA
atgcgcagatggctaggttgtgtctgtttcgcactggttcaggccgattccccttcagctcccgttaacgttacagtgcgtcacctgaaggcgaacagtgcagtggtatcgtgggacgtcctcgaggatgaggtggtcattggtttcgccatctcacagcagaagaaggatgtccgtatgttgagattcatccaagaggtcaacacaaccacgcgttcatgcgctctctgggatctggaggaggacaccgagtacatcgtgcatgtgcaagccattagcatccagggccagtcgccagcttcggagccagtcctttttaagacgccacgggaggctgagaagatggcctccaagaacaaggatgaagtgaccatgaaggaaatgggtcggaaccagcagttacgtaccggcgaggtcttgatcattgtcgtcgttttgttcatgtgggcgggtgtcatcgccctgttttgccgccagtatgacatcattaaggataacgagcctaataacaacaaggagaagaccaaatctgcaagcgagacgtctacccctgagcatcagggtggcggactcctgcgctctaaaata

SEQ ID NO: 11620 - DNA, 588 bp, synthetic construct
  misc_feature 1..588: note = source = /note="Description of Artificial Sequence: Synthetic coding sequence"
  source 1..588: mol_type = other DNA
atgcgacggtggctcggctgtgtctgctttgctcttgtgcaggctgattccccttccgctccagtcaacgtgaccgtgcggcatctgaaagcaaattcagcagtggttagctgggatgttctcgaggatgaagtggtgatcggattcgccatttctcagcaaaagaaagacgtgcggatgctgagattcattcaagaggtcaatactactactcggtcctgcgcactttgggatctggaggaggacaccgaatacattgtgcacgtgcaagcaataagtatccaaggtcaaagcccggccagcgaacccgtgttgtttaagaccccaagagaggcagaaaagatggcaagcaagaacaaagacgaggtgaccatgaaggaaatgggaagaaatcaacagttgcgtactggagaggtcctgattattgtggtggtcctgtttatgtgggctggagtgatagcactgttttgtaggcagtacgatatcattaaggataatgagcctaacaacaacaaggaaaagaccaagtcggcttcggaaacctcgactcccgaacaccagggtgggggacttctgcgctctaagatt

SEQ ID NO: 11621 - DNA, 588 bp, synthetic construct
  misc_feature 1..588: note = source = /note="Description of Artificial Sequence: Synthetic coding sequence"
  source 1..588: mol_type = other DNA
atgcggcgctggctggggtgcgtctgcttcgccctcgtgcaagcagatagcccgagcgccccggtgaacgttaccgtgcgccacctgaaggcgaattcagcggtggtgtcctgggatgtgttggaggatgaggtcgtcatcggcttcgctatttcacagcaaaagaaggatgtccgcatgctccgcttcatccaggaagtgaatactaccacccgctcgtgcgcgctgtgggaccttgaagaggacaccgaatacatcgtgcacgtgcaggcaatttccatccagggccaaagccctgcatcggagcctgtcctgttcaaaactccgcgggaggccgaaaagatggcttcaaagaacaaggatgaggtcaccatgaaagaaatgggacggaatcagcagcttcgcaccggagaggtgctgatcatcgtggtggtgctgttcatgtgggccggggtgatcgccctgttctgtcggcagtacgatatcatcaaggataatgaaccaaataacaacaaggaaaagactaagagcgccagcgagactagcaccccggaacaccagggaggagggctgctccggtccaagatc

SEQ ID NO: 11622 - DNA, 588 bp, synthetic construct
  misc_feature 1..588: note = source = /note="Description of Artificial Sequence: Synthetic coding sequence"
  source 1..588: mol_type = other DNA
atgagacgatggctgggctgcgtctgttttgctctggtccaggcagactcaccaagcgcaccagtgaacgtaaccgtgcgacacctgaaggccaattcagcagttgtttcttgggatgtgctggaagatgaggttgtgatcggctttgcaatctcacagcagaaaaaagatgtgagaatgcttaggttcattcaggaggtcaacacgactacaagatcttgtgctctctgggatctggaggaggacaccgagtatatcgtgcatgtccaagccatctcaattcaaggacaatctccggccagcgagcccgtgctgtttaagacccctcgagaggcggagaaaatggcctctaagaataaggacgaagtgacaatgaaggagatgggtagaaatcagcagctgagaacaggcgaggtgctgatcatcgtggtggtgctgtttatgtgggctggagtgatcgctctgttttgcaggcagtacgatataatcaaggataatgaacccaacaataataaagagaaaactaaatcagctagtgaaactagcacacctgagcaccaaggaggggggctcctcaggtctaagatc

SEQ ID NO: 11623 - DNA, 588 bp, synthetic construct
  misc_feature 1..588: note = source = /note="Description of Artificial Sequence: Synthetic coding sequence"
  source 1..588: mol_type = other DNA
atgcgccgctggctgggctgtgtctgctttgccctggtccaggcagactccccctcagccccagtgaacgtgaccgttaggcacttgaaagccaactccgccgtggttagttgggacgtgcttgaggacgaagtcgtaatcggtttcgccatcagtcaacagaagaaagatgttagaatgttgcgttttatccaagaagtgaatactaccactcgcagctgcgctctctgggacttggaggaggatactgaatatattgtgcatgtccaggccattagcattcagggtcaatctccagctagcgaacctgtgctgttcaagacacctcgcgaggcagagaagatggcttctaaaaataaggacgaggtgaccatgaaggaaatgggccgcaaccagcagctgagaactggagaggtgctgatcatagttgtggtgctcttcatgtgggctggtgttatcgcacttttttgccgtcagtatgatatcatcaaggataatgagcccaacaacaataaggagaagaccaagtccgcttcagaaacttctacccccgagcaccagggaggaggattgttgagatccaagatt

SEQ ID NO: 11624 - DNA, 588 bp, synthetic construct
  misc_feature 1..588: note = source = /note="Description of Artificial Sequence: Synthetic coding sequence"
  source 1..588: mol_type = other DNA
atgcgccgctggctgggctgcgtgtgtttcgccctggtccaggccgattcacctagcgcgcctgtgaacgtgaccgtccggcacctcaaggcaaattcagctgtggtttcttgggacgtgctcgaggacgaagtggtgatcgggtttgcgatttcgcagcagaaaaaggatgtgcggatgctgcgattcatccaagaagtcaacaccaccacccggtcgtgcgcgctgtgggacctggaggaggatactgagtacatcgttcacgtgcaggccatcagcatccagggccaatcgccggcatcggaaccggtgttgttcaagacccccagagaagcagagaagatggcctccaagaacaaggacgaagtgacgatgaaggaaatgggacgcaaccaacagctgcgcactggcgaagtgctgattatcgtcgttgtccttttcatgtgggccggagtcattgcactgttctgtcggcagtacgatatcatcaaggacaatgagcccaacaacaacaaggaaaagaccaagtcggccagcgaaacttcaacgccggagcatcaaggaggaggattgcttagaagcaaaatc

SEQ ID NO: 11625 - DNA, 588 bp, synthetic construct
  misc_feature 1..588: note = source = /note="Description of Artificial Sequence: Synthetic coding sequence"
  source 1..588: mol_type = other DNA
atgaggcggtggctcggatgcgtgtgttttgctctggtccaggccgactcaccgtccgccccggtcaacgttaccgtgcggcatctgaaagcaaattctgccgtcgtgtcctgggatgtgctggaggacgaggtggtgatcggattcgccatctcgcagcaaaagaaagatgtgcggatgctgcgctttatccaagaagtcaataccaccacccgctcctgcgcactgtgggacttggaggaagataccgaatacattgtgcatgtgcaggctatctctatccaaggccagtcgccggcctccgaaccggtgctcttcaaaaccccgcgcgaggccgaaaagatggcaagcaagaacaaggatgaagtgacgatgaaagaaatgggacgcaatcagcaacttagaaccggagaggtcctcatcatcgtggtcgttctgtttatgtgggcgggagtgattgcgttgttctgccgacagtacgacatcattaaggacaatgagccgaacaacaataaagagaaaactaagtcagcgtccgagacgagcaccccagaacaccagggaggaggactcctcagatcgaagatc

SEQ ID NO: 11626 - DNA, 588 bp, synthetic construct
  misc_feature 1..588: note = source = /note="Description of Artificial Sequence: Synthetic coding sequence"
  source 1..588: mol_type = other DNA
atgaggcgatggttggggtgcgtctgcttcgccctggtgcaagccgatagcccctccgcccctgtgaacgttaccgtgagacaccttaaggccaattctgccgtcgtaagctgggacgtactggaggatgaggtagtcattggcttcgctatctcgcagcaaaaaaaagacgtcagaatgttgcgtttcatccaagaagtcaacacgacaacacgctcctgcgccctctgggaccttgaggaagacacagagtacatcgtgcatgtccaggcaatctctattcagggccaaagtcccgcaagtgagccagttctgttcaaaactccgcgtgaagcggagaaaatggccagcaaaaacaaggatgaggtgactatgaaagagatgggtcgcaaccagcagcttaggacaggcgaagtcctcattattgtggtggtactttttatgtgggcaggagtgatagcattgttttgccgccagtacgacatcatcaaggataatgaacccaataacaataaggaaaagaccaagagtgcctctgagacctcgacccccgagcaccaggggggcggtctgcttagaagtaagatc

SEQ ID NO: 11627 - DNA, 588 bp, synthetic construct
  misc_feature 1..588: note = source = /note="Description of Artificial Sequence: Synthetic coding sequence"
  source 1..588: mol_type = other DNA
atgcgccgctggctgggatgtgtgtgttttgctttggtccaagcggactcgccgtcggcacctgtgaatgtcacggtccgtcacctgaaagccaactccgcagtagtctcctgggatgtcttggaagatgaagtggttattggatttgcgatctcgcagcaaaagaaggatgtgcgcatgctgagattcatccaggaagtcaataccaccacccgctcctgcgctctttgggacctggaggaggacactgagtacatcgttcatgtgcaggcgatcagcatccagggacagagcccggcgtcggaacctgtgctgttcaaaactccaagagaggcggaaaagatggcctccaagaataaagacgaggtgaccatgaaagagatgggccgcaatcagcaacttagaaccggggaagtgctcatcatcgtggttgtccttttcatgtgggcaggagtcatcgctctgttctgccggcagtacgatatcataaaagacaatgagcccaacaacaacaaggaaaagactaagtctgcaagcgagacttcgactccagagcaccagggtggaggtctgctgagatccaaaatt

SEQ ID NO: 11628 - DNA, 588 bp, synthetic construct
  misc_feature 1..588: note = source = /note="Description of Artificial Sequence: Synthetic coding sequence"
  source 1..588: mol_type = other DNA
atgaggagatggttggggtgcgtttgtttcgcgctggtccaggccgacagcccttccgctcctgtgaatgttactgttaggcacctgaaggctaactctgcggtcgtgtcatgggacgtgctggaggatgaggtcgttatcggctttgctattagtcagcagaagaaggatgtacgaatgctgcgcttcatccaagaggttaatacaaccacgcggagctgtgccctttgggacctggaggaagataccgaatacatagtgcatgttcaggccatatcaattcagggacaaagccccgcctccgaaccggtactcttcaagactccccgggaggcggagaagatggcgagcaagaacaaggacgaggttactatgaaagagatggggcggaaccagcagctccgaaccggggaggtgctcatcatcgtggtggttttgtttatgtgggccggcgtgatcgccctcttttgccggcagtatgacatcataaaagataacgaaccgaacaataataaagagaagacaaagtcagcctccgagactagcacacccgagcaccaagggggtggtctcttgcggtcaaaaatt

SEQ ID NO: 11629 - DNA, 588 bp, synthetic construct
  misc_feature 1..588: note = source = /note="Description of Artificial Sequence: Synthetic coding sequence"
  source 1..588: mol_type = other DNA
atgcggagatggctcggatgcgtttgtttcgccctggtccaggcagactcaccatctgcccccgtgaatgtgactgtacgacatctgaaggccaattccgccgtcgtgtcatgggacgtgctggaggacgaagtggtgatcggcttcgcgatttctcagcagaaaaaggatgttaggatgttgcgctttatccaagaagtgaacaccacgactcgctcctgcgcgttgtgggatctggaagaggacactgaatacatcgtccacgtccaggctatcagcattcaaggccaaagccccgcttcggagccagtcctgtttaagaccccaagagaagcggaaaagatggcatcgaagaacaaggacgaggtgaccatgaaagaaatgggacggaaccaacagctccgaaccggagaagtgctgataattgtggtggtgctgttcatgtgggctggcgtgatcgcgctcttctgcagacagtacgatatcatcaaggataacgagcctaacaacaataaggagaaaaccaaatcagcctcagaaacttcgacgccggagcaccaaggtggtggactcctgcggtcgaagatc

SEQ ID NO: 11630 - DNA, 588 bp, synthetic construct
  misc_feature 1..588: note = source = /note="Description of Artificial Sequence: Synthetic coding sequence"
  source 1..588: mol_type = other DNA
atgcggcgatggcttggatgcgtgtgtttcgcactggtgcaggcagattcgccttcggcaccggtgaacgtgactgtccgccatctgaaggcgaacagcgcagtcgtgtcgtgggatgttttggaggatgaagtcgtcatcggctttgcgattagccagcaaaagaaggacgtgcgtatgctccgtttcattcaggaagttaatactacgactaggtcctgtgcattgtgggatcttgaggaggacaccgaatacatcgtgcatgtgcaggcaatttcgattcaaggtcagagccctgcgtcggaaccagtccttttcaagactcctcgggaggcagagaaaatggcatcgaagaacaaagacgaggtgaccatgaaggaaatgggtagaaaccaacagctgaggacgggtgaggtgctgattattgtggtggtcctctttatgtgggccggagtcattgctcttttttgccggcagtacgacatcatcaaagataatgaaccgaacaacaataaggaaaagaccaagtcagcatccgaaacttctacccctgaacatcaaggtgggggtctgcttcgttcgaagatc

SEQ ID NO: 11631 - DNA, 588 bp, synthetic construct
  misc_feature 1..588: note = source = /note="Description of Artificial Sequence: Synthetic coding sequence"
  source 1..588: mol_type = other DNA
atgaggagatggctggggtgcgtgtgttttgctctggttcaggccgatagcccgtcggcacccgtcaacgttacagtccgccacttgaaagctaatagcgcggtagtgagctgggatgttcttgaggatgaggtagtcattgggtttgccattagccagcagaagaaggatgttcggatgctgcggttcattcaagaagtaaatactaccaccagatcatgcgctctctgggatcttgaagaggacactgagtatattgttcacgtgcaagccatcagcatacagggtcaatcacccgccagcgaaccagttctcttcaaaacaccaagggaggccgaaaaaatggctagcaaaaataaggacgaggtcaccatgaaggagatgggcaggaatcaacagctgaggaccggcgaggtcctgatcatcgtggttgttcttttcatgtgggccggcgtgatagcactattttgtagacaatatgatatcattaaggacaacgagccaaataataacaaggagaagaccaaaagtgcttcagagacaagcacaccagagcatcagggcggcggtctgctgaggtctaaaatt

SEQ ID NO: 11632 - DNA, 588 bp, synthetic construct
  misc_feature 1..588: note = source = /note="Description of Artificial Sequence: Synthetic coding sequence"
  source 1..588: mol_type = other DNA
atgcgccggtggctcggctgcgtttgttttgcgttagtgcaagcggattcgcctagcgcaccggtaaatgttacagtccgacaccttaaggcgaactctgcagtcgtaagttgggacgtattagaagacgaggtggtgataggtttcgccatctctcagcagaagaaagacgtgcgaatgttgcggtttattcaggaagtcaacacgaccacccgctcctgcgcattgtgggacttggaagaagatacggaatatatcgttcacgttcaagctatctctattcagggccagtctccagcttcagaacctgtgctttttaaaacgccgagagaagcggaaaagatggcttcgaagaataaagatgaagtgacgatgaaagaaatgggaaggaatcagcaattacggacgggcgaagtgttaataattgtggtagtcttgtttatgtgggcgggggtcattgcgctcttttgcagacaatatgacattattaaagataacgagccaaacaacaacaaagagaagactaaatcagcgagtgaaacatctacacctgaacatcagggcggaggtctattgagatctaaaatc

SEQ ID NO: 11633 - DNA, 588 bp, synthetic construct
  misc_feature 1..588: note = source = /note="Description of Artificial Sequence: Synthetic coding sequence"
  source 1..588: mol_type = other DNA
atgagacggtggttggggtgcgtttgcttcgccctcgtacaagccgacagtccatccgcacccgtgaacgtgacagtacggcacttaaaggccaatagtgctgtagtcagctgggacgtccttgaagatgaggtggttatcggatttgctattagccagcaaaagaaggacgtgcgcatgctgcggttcatccaggaggtgaatactactacacgtagttgcgctctgtgggatctggaagaggatacagaatatatcgtgcacgtgcaagccatctcaatccagggtcaaagccctgcctccgaacccgttttgttcaaaaccccgcgagaagctgaaaaaatggcttccaagaacaaagatgaggtgaccatgaaagagatgggacgcaatcagcagctaaggaccggcgaggtgctgattatcgtggtcgtactcttcatgtgggcaggcgtgattgcactgttctgccggcagtatgacatcatcaaagacaatgagcccaacaacaataaggaaaagacaaagagcgcgagtgaaactagtacacctgagcatcaggggggcggtctactgaggtcgaagatt

SEQ ID NO: 11634 - DNA, 588 bp, synthetic construct
  misc_feature 1..588: note = source = /note="Description of Artificial Sequence: Synthetic coding sequence"
  source 1..588: mol_type = other DNA
atgagaagatggttaggatgtgtttgttttgcattagttcaagctgattctccatcagctccagttaatgtcacagttagacatttaaaagcaaatagtgcagttgtttcatgggatgttcttgaagacgaagttgttattggatttgcaatttctcaacaaaagaaggatgttagaatgcttagatttattcaagaggtaaatactactactagaagttgtgcattatgggatttggaggaagacactgaatatattgtacatgttcaagctatttcaattcagggacaaagtccagcatcagagccagttctttttaaaactccaagagaagccgaaaaaatggcttcaaaaaataaagatgaagttactatgaaagaaatgggtagaaatcaacaattaagaactggagaagttcttataattgttgttgttttatttatgtgggctggagttatagcattattttgccgtcaatatgatattattaaagataatgaaccaaataataataaagaaaagactaaatctgcttcagaaacatcaacaccagagcatcaaggaggaggtttgttaagaagtaaaatt

SEQ ID NO: 11635 - DNA, 588 bp, synthetic construct
  misc_feature 1..588: note = source = /note="Description of Artificial Sequence: Synthetic coding sequence"
  source 1..588: mol_type = other DNA
atgagaagatggctgggttgtgtgtgctttgcactggtgcaggcggactcgccgtccgcgccggtgaatgtcactgtccgccatctgaaagcaaacagcgcggtcgtttcgtgggatgtgctggaggacgaagtggttatcggcttcgctatctcgcaacagaagaaggatgtcagaatgcttcggttcatccaggaggtgaataccaccacccggagctgcgctctgtgggaccttgaagaagatactgaatacatcgtgcatgtgcaagcaatctccattcaaggacaatcgccggcctcggagccggtgctgttcaagactccacgcgaagcggaaaagatggcatcgaagaataaggatgaagtgactatgaaagagatgggcagaaaccagcaactgcggaccggcgaagtgctcattattgtcgtggtgctgttcatgtgggcaggagtgatcgccctgttctgtcggcagtacgacatcatcaaggacaatgagcccaacaacaacaaggaaaagacgaagtcagcatcggagacgtcaaccccagagcatcaaggaggaggcctcttgagatccaagatc

SEQ ID NO: 11636 - DNA, 588 bp, synthetic construct
  misc_feature 1..588: note = source = /note="Description of Artificial Sequence: Synthetic coding sequence"
  source 1..588: mol_type = other DNA
atgcggcgatggctcggatgcgtgtgtttcgcactggtccaggcggatagcccgtctgccccggtgaatgtgactgttcgccatctgaaggccaactccgcggtggtgtcatgggatgtgctggaggacgaggtggtcattggattcgcgatcagccaacagaaaaaggatgtgcggatgctgcgcttcatccaggaagtcaacactactactaggagctgcgcgctctgggatctggaggaagatacggagtacatcgtccacgtccaggccatctccatccaagggcaatcccccgcatctgagccagtgctctttaagacccctcgcgaagctgagaagatggcatcgaagaacaaggacgaagtgacgatgaaagagatgggccggaaccagcagctgagaaccggcgaagtgcttatcattgtggtggtcctgttcatgtgggcaggcgtcatcgccttgttttgtaggcaatacgacatcatcaaggacaatgagccgaacaataacaaggaaaagaccaaatcggcgtcagaaacctctacgccagagcatcagggtggaggattgctccgctcgaagatc

SEQ ID NO: 11637 - DNA, 588 bp, synthetic construct
  misc_feature 1..588: note = source = /note="Description of Artificial Sequence: Synthetic coding sequence"
  source 1..588: mol_type = other DNA
atgcgtcgctggcttggctgcgtatgcttcgccctggtccaggctgattcaccatccgccccggttaacgtcaccgtcagacatctgaaagcgaattcagccgtcgtgtcctgggatgtgctggaggacgaggtggttattggttttgctatttcccagcagaaaaaggatgtgcgaatgctgcgcttcatacaggaggtgaatacgacgactaggtcatgtgccttgtgggacctggaggaggataccgagtacattgttcatgttcaggcaatcagcatccaaggacagtcccctgctagcgaacctgtcctcttcaaaacccctcgcgaggctgagaagatggcttcaaagaacaaggacgaagttactatgaaagagatgggaagaaaccagcaacttcggaccggagaggtgctgattatcgttgtggtgctttttatgtgggccggagtcatagcacttttctgtcgccagtacgatataatcaaagacaatgaacctaataacaacaaagagaagactaaaagcgcctccgagacctccactcccgagcatcagggcggtggccttctgagatcaaaaatt

SEQ ID NO: 11638 - DNA, 588 bp, synthetic construct
  misc_feature 1..588: note = source = /note="Description of Artificial Sequence: Synthetic coding sequence"
  source 1..588: mol_type = other DNA
atgcgacgctggctcggctgcgtgtgttttgcccttgtgcaagccgactccccatccgcaccggtgaacgtgaccgtgagacatctgaaggccaactctgccgtggtttcctgggatgtactggaggatgaagtggtgatcggttttgctatttcacaacagaagaaggatgtcagaatgcttcgattcattcaggaggtgaataccactacccgctcatgtgccctgtgggaccttgaagaggataccgagtacattgtccatgtccaagcaatctcgattcagggacaatcgcctgcctccgaacctgtcctgttcaaaacccctagagaagctgagaagatggcttcgaagaacaaggacgaagtgacgatgaaggaaatgggcaggaatcagcaactcagaactggggaagtcctgatcattgtggtggtgctgtttatgtgggctggtgtgatagcactcttctgccgccagtacgatatcattaaagacaacgagcccaataacaataaagaaaagacgaagtcggcatcagagacttcgacgccagaacatcaggggggtggtctgcttcgcagcaagatt

SEQ ID NO: 11639 - DNA, 588 bp, synthetic construct
  misc_feature 1..588: note = source = /note="Description of Artificial Sequence: Synthetic coding sequence"
  source 1..588: mol_type = other DNA
atgcgcagatggctgggatgtgtgtgcttcgctttggtgcaggctgacagcccgtccgcgccggtgaatgtgaccgtgcgccacctgaaggccaactccgccgtcgtgtcgtgggatgtgctggaggatgaagtcgtgatcgggttcgccatcagccaacaaaagaaggatgtgaggatgctgcgcttcatccaagaagtgaataccactacccggtcatgtgcactctgggacctggaggaagataccgaatacatcgtgcacgtgcaagctatctcgatccagggacaatccccggcctcagaaccagtcctgttcaaaactccacgggaggcggagaagatggcctccaaaaacaaggatgaagtaaccatgaaagagatgggacgcaatcagcagctgcgcactggagaggtcctgatcatcgtcgtggtgctgttcatgtgggccggcgtgatcgctttgttctgccggcagtacgacatcatcaaagacaacgagccgaataacaacaaggaaaagactaagagcgcctcggaaacctcaactccggaacaccagggaggagggcttctgcggagcaagatc

SEQ ID NO: 11640 - DNA, 588 bp, synthetic construct
  misc_feature 1..588: note = source = /note="Description of Artificial Sequence: Synthetic coding sequence"
  source 1..588: mol_type = other DNA
atgcgccggtggttaggctgtgtttgctttgcccttgttcaagccgattccccgtccgccccagtgaatgtgaccgtgcgccatctgaaggcgaacagcgcggtcgtgagctgggacgtactggaagacgaagtggtgatcgggttcgccatctcccagcagaaaaaggatgtgcggatgttgcggttcatccaagaagtgaatacgacaactcgcagctgcgcgctgtgggatttggaggaggatacagaatacattgtccatgttcaggccatctccatccagggccaatctccagctagcgagccggtgttattcaagaccccacgagaggcggaaaaaatggcgagcaagaataaggatgaggtgacgatgaaggagatgggccgtaaccaacagctgcgtaccggcgaagtgctgatcatcgtcgtcgtgttgtttatgtgggcaggagtcatagctctgttttgtcgacagtacgatatcattaaggataatgagccgaataacaataaagaaaagactaagagcgcttccgagaccagcaccccagagcaccagggagggggccttctccgctctaagata

SEQ ID NO: 11641 - DNA, 588 bp, synthetic construct
  misc_feature 1..588: note = source = /note="Description of Artificial Sequence: Synthetic coding sequence"
  source 1..588: mol_type = other DNA
atgcggcggtggctgggatgcgtgtgcttcgccctggtgcaggcagattcgcccagcgccccggtgaatgtgaccgtgcgacacctcaaggctaacagcgccgtggtcagctgggacgtgctggaagatgaagtggtgatcggcttcgccatttcgcagcagaagaaggacgtgagaatgcttagatttatccaggaagttaacaccaccacccggtcatgcgccctgtgggatctggaagaagatactgaatacatcgtgcacgtgcaggcaatctcaatccaaggacagagccctgccagcgagccagtgcttttcaaaaccccacgcgaggctgaaaagatggcctccaagaataaggacgaagtgactatgaaagagatgggcagaaaccagcagctgcgcaccggggaagtcctgatcatcgtggtggtgctcttcatgtgggccggcgtgatcgcgctcttctgccgacaatacgacattatcaaagataatgaacctaataacaataaagaaaagacgaagtcggcctctgaaacttccactccggaacatcaggggggtggactcctgcgctccaaaatc

SEQ ID NO: 11642 - DNA, 588 bp, synthetic construct
  misc_feature 1..588: note = source = /note="Description of Artificial Sequence: Synthetic coding sequence"
  source 1..588: mol_type = other DNA
atgcgccgttggctaggctgcgtctgcttcgcattagtacaggctgactccccttccgcccccgtcaacgtgactgtccgccacctcaaggccaacagcgctgtcgtttcctgggacgtgctcgaggatgaagtggttattgggtttgcaatttcacaacagaagaaagacgttcggatgctgcgctttatccaagaggtaaatacaaccaccaggtcttgtgcactgtgggacctggaagaggataccgaatacatagttcacgtacaggccatctctatccaggggcagagtcctgctagcgaacctgtcctgttcaaaacgccccgcgaggcagagaaaatggcatcaaagaataaggatgaagtgactatgaaagagatggggcgcaatcagcagctgagaaccggcgaggtgctcattattgttgtggttttgtttatgtgggcgggcgtgattgcattattttgcagacaatatgatatcattaaggacaatgaacccaacaacaataaagagaagactaagagcgcgtcagagacctcgacacccgaacatcagggaggtggccttctccgcagcaaaatc

SEQ ID NO: 11643 - DNA, 387 bp, synthetic construct
  misc_feature 1..387: note = source = /note="Description of Artificial Sequence: Synthetic coding sequence"
  source 1..387: mol_type = other DNA
atgaagacactgcaatttttctttctcttttgctgttggaaagccatttgctgcaacagctgcgagttgacgaacatcactattgctattgagaaggaagagtgtcgattctgtatctcgatcaataccacatggtgcgctggctattgctacaccagggatctagtgtacaaggatccggcccgcccgaaaatccagaagacgtgcacctttaaagaattggtgtatgagaccgttcgtgtgcctggctgcgcccatcatgccgactcactgtacacttaccctgttgctactcagtgccattgtggtaaatgtgacagcgatagcacagattgcacagtgcgcggtctgggacccagctattgctcgtttggagagatgaaggaa

SEQ ID NO: 11644 - DNA, 387 bp, synthetic construct
  misc_feature 1..387: note = source = /note="Description of Artificial Sequence: Synthetic coding sequence"
  source 1..387: mol_type = other DNA
atgaaaacactccagtttttctttctgttctgctgctggaaggccatctgttgtaactcgtgcgaactcaccaatatcacgattgctatcgagaaagaggagtgcaggttctgcatctcgatcaacactacatggtgcgctggatactgctatacccgcgaccttgtttacaaggatccagcacggcccaaaatccaaaaaacctgcacgttcaaggaactggtgtatgagacagtccgtgtacccggttgcgcccatcatgctgattcactttacacttatcctgtagcgacacagtgtcattgtgggaaatgtgactctgatagcacagactgtactgtccgtggccttggaccgtcttattgcagttttggcgagatgaaagag

SEQ ID NO: 11645 - DNA, 387 bp, synthetic construct
  misc_feature 1..387: note = source = /note="Description of Artificial Sequence: Synthetic coding sequence"
  source 1..387: mol_type = other DNA
atgaaaactctgcagttctttttcctattctgctgctggaaggcaatctgctgcaactcctgcgaactgaccaatatcaccatcgccatcgaaaaggaggaatgtagattttgcatcagcatcaacactacttggtgcgccgggtactgctacactagagatttagtgtacaaggatcccgccaggccaaagatccaaaaaacgtgcactttcaaggagttggtatatgagactgttcgggttccaggctgcgcacaccacgcagattccctgtatacttaccccgtggcaactcagtgccattgcgggaaatgcgacagcgatagtacagattgcacagtgcgcggcctcggcccttcttactgctcttttggagagatgaaagaa

SEQ ID NO: 11646 - DNA, 387 bp, synthetic construct
  misc_feature 1..387: note = source = /note="Description of Artificial Sequence: Synthetic coding sequence"
  source 1..387: mol_type = other DNA
atgaagacgctgcagttcttcttccttttctgttgctggaaggccatctgctgcaactcatgcgagctgaccaacattaccatcgcaatcgaaaaggaggagtgtcggttttgcatttctatcaataccacgtggtgcgctggctattgctatacgcgtgatctggtatacaaggatccggcccgtcctaagattcagaagacatgcaccttcaaggagctggtctatgagacagtgcgtgtccctggttgcgcgcaccatgcggatagtctctacacctaccccgtggctacgcaatgccactgtggcaagtgcgatagcgacagtaccgactgcaccgtccgcggccttggcccgtcgtactgttcctttggcgagatgaaagaa

SEQ ID NO: 11647 - DNA, 387 bp, synthetic construct
  misc_feature 1..387: note = source = /note="Description of Artificial Sequence: Synthetic coding sequence"
  source 1..387: mol_type = other DNA
atgaagacgttgcagttctttttcttattctgctgttggaaggccatctgctgtaactcctgtgagttgaccaacatcacaatcgccatcgagaaggaggaatgccgattctgtattagcattaatactacctggtgtgcaggatattgttacactagagacctggtgtataaagatcctgctagacctaagattcagaagacttgcactttcaaagaattagtgtatgaaaccgtgagagtgcccgggtgcgcccaccacgccgatagtctgtatacataccccgtcgcgacacagtgtcattgtggcaaatgtgactcagattccacagactgtaccgtgagaggcctcggcccgtcttattgctccttcggagagatgaaagag

SEQ ID NO: 11648 - DNA, 387 bp, synthetic construct
  misc_feature 1..387: note = source = /note="Description of Artificial Sequence: Synthetic coding sequence"
  source 1..387: mol_type = other DNA
atgaaaacgctccagtttttctttctgttttgttgttggaaagcaatttgctgtaacagctgtgagctgacgaatatcaccatcgccattgaaaaggaagaatgtcgcttctgtatctcaataaacactacctggtgtgcaggttactgctacaccagggaccttgtgtataaggacccggccagacccaagattcaaaagacctgcaccttcaaagaacttgtttacgaaacggtaagagtccctggctgtgctcatcacgcagattccctttacacctacccagtggcgacccaatgccattgtggcaagtgcgattcagacagtactgattgtactgtgcgtggactggggccttcgtactgcagctttggagagatgaaagag

SEQ ID NO: 11649 - DNA, 387 bp, synthetic construct
  misc_feature 1..387: note = source = /note="Description of Artificial Sequence: Synthetic coding sequence"
  source 1..387: mol_type = other DNA
atgaagactcttcagttcttcttcttattctgctgttggaaggccatttgctgcaactcatgtgagctaactaacatcacaattgccatagagaaggaagaatgtaggttttgcatttccatcaacactacgtggtgcgcagggtactgctacacaagggaccttgtttataaagacccggctcgacctaagattcaaaaaacctgcacctttaaggagttggtttacgagacagtacgagttcctgggtgtgcacaccatgctgactcgctttatacatatcctgtcgccactcaatgtcactgcggtaaatgtgactcagactcaacagattgtactgttcgaggactaggtccttcatattgtagttttggcgaaatgaaggaa

SEQ ID NO: 11650 - DNA, 387 bp, synthetic construct
  misc_feature 1..387: note = source = /note="Description of Artificial Sequence: Synthetic coding sequence"
  source 1..387: mol_type = other DNA
atgaaaactctgcagttcttcttcctcttttgctgctggaaggcgatctgttgtaattcgtgtgagctcaccaacatcaccatagccattgaaaaagaagaatgtcggttctgcatctcaatcaacaccacttggtgtgccggatactgttacactagagatctggtttacaaggatcccgcgcgcccgaagatccaaaagacgtgcactttcaaggaacttgtgtacgagacggtgcgcgtgccaggatgcgcacaccatgccgattcgctgtacacctacccggtggctactcagtgtcactgcgggaaatgtgacagcgactcgactgactgtaccgtgaggggattggggccgtcgtactgctctttcggagaaatgaaggag

SEQ ID NO: 11651 - DNA, 387 bp, synthetic construct
  misc_feature 1..387: note = source = /note="Description of Artificial Sequence: Synthetic coding sequence"
  source 1..387: mol_type = other DNA
atgaaaaccttgcagttcttcttcctcttctgttgttggaaagcgatttgctgtaatagctgcgagctcaccaacatcaccatcgctatagaaaaagaggaatgccgcttttgcatcagcatcaacaccacctggtgcgcgggttactgctacactcgcgacctcgtctacaaggatcctgcccggccaaagatccaaaagacgtgcacgtttaaagaacttgtgtacgagacggtcagagtccctggatgcgcccaccatgctgactctctgtacacttacccggtggccactcagtgccactgcgggaagtgcgattcggattccacggactgtactgtgaggggcctgggaccatcgtattgctctttcggcgagatgaaagaa

SEQ ID NO: 11652 - DNA, 387 bp, synthetic construct
  misc_feature 1..387: note = source = /note="Description of Artificial Sequence: Synthetic coding sequence"
  source 1..387: mol_type = other DNA
atgaaaactctgcaattcttctttttgttttgctgttggaaggccatctgttgcaattcatgcgaactcaccaatatcactattgctatcgaaaaggaggaatgcagattctgcatctccatcaacactacctggtgcgccggatattgctacacgagagatctcgtgtacaaagaccccgctagaccaaagatccaaaagacttgtacgttcaaagagctggtgtacgagactgtccgcgtgcctggctgcgctcaccatgcagacagcttgtacacctatccggtcgctacccagtgtcactgcggaaagtgcgattcggactcaaccgactgcaccgtgcgcggccttgggcctagctattgtagctttggagagatgaaggaa

SEQ ID NO: 11653 - DNA, 387 bp, synthetic construct
  misc_feature 1..387: note = source = /note="Description of Artificial Sequence: Synthetic coding sequence"
  source 1..387: mol_type = other DNA
atgaagacgctgcagttcttcttcttgttctgttgttggaaagctatctgctgtaactcgtgcgaacttaccaatatcaccattgcaatcgagaaagaagagtgcagattttgtatatcaataaacactacatggtgtgcgggttattgttacactcgagatctggtttacaaagatccggcacggcctaagatccagaagacgtgcaccttcaaggaactggtgtatgaaacagtgagggtgcccggatgcgcccaccatgccgattcgttgtatacataccctgttgcaactcagtgtcactgcgggaagtgcgactctgactctactgattgcacagttcgtggcctcggacccagttactgttctttcggcgagatgaaagag

SEQ ID NO: 11654 - DNA, 387 bp, synthetic construct
  misc_feature 1..387: note = source = /note="Description of Artificial Sequence: Synthetic coding sequence"
  source 1..387: mol_type = other DNA
atgaagaccctacagtttttcttcttattttgctgttggaaggctatctgttgcaatagctgtgagctcaccaatatcaccatagcgatcgagaaggaggaatgccggttctgtatttctattaacaccacctggtgcgctggttactgctatactagggacctggtttataaagatccagcccgccccaagatacaaaagacatgcactttcaaggagcttgtgtacgaaaccgtacgtgtccctggatgcgctcatcacgccgacagtctgtacacctatcccgtggccacccagtgccactgcggaaagtgtgatagtgattcaaccgactgcacggtgagaggacttggacccagttattgcagctttggtgagatgaaggaa

SEQ ID NO: 11655 - DNA, 387 bp, synthetic construct
  misc_feature 1..387: note = source = /note="Description of Artificial Sequence: Synthetic coding sequence"
  source 1..387: mol_type = other DNA
atgaagacccttcagtttttttttctcttctgttgctggaaggccatctgctgtaatagctgcgagctgactaatatcaccatcgccatcgaaaaagaagagtgcaggttctgcatttccataaacactacatggtgtgccggctattgctacactcgcgatctggtgtataaggatccggccagacccaaaattcagaagacttgtacgttcaaagagctcgtgtacgaaaccgtgcgagtgcctggctgcgctcatcatgctgattctttgtatacctaccctgtagcgacccaatgtcactgtggcaaatgtgacagtgatagcaccgactgtaccgtgcgaggactgggtccgtcatactgttcattcggcgaaatgaaggag

SEQ ID NO: 11656 - DNA, 387 bp, synthetic construct
  misc_feature 1..387: note = source = /note="Description of Artificial Sequence: Synthetic coding sequence"
  source 1..387: mol_type = other DNA
atgaagaccctgcaattcttcttcctcttctgctgttggaaagcaatctgctgtaattcatgcgaactgacaaacataacaattgcaatcgaaaaagaagagtgtcggttttgcatcagcatcaacacaacttggtgcgcaggctactgttacacacgggatctggtgtataaggaccctgcccggcccaagatccagaagacttgtacctttaaagaacttgtctacgagacagtgcgagtcccggggtgcgcacaccacgcggattccctttacacctatccggtggcgacccagtgtcactgtgggaagtgcgattccgatagcacagactgcacggttagaggcctcggtccaagctattgcagtttcggtgagatgaaggag

SEQ ID NO: 11657 - DNA, 387 bp, synthetic construct
  misc_feature 1..387: note = source = /note="Description of Artificial Sequence: Synthetic coding sequence"
  source 1..387: mol_type = other DNA
atgaaaacgcttcagttcttttttctcttctgctgctggaaagccatctgctgcaactcctgcgagctgaccaatatcaccatcgccatcgagaaggaagaatgtagattctgcatctcgatcaacactacctggtgcgccggttactgttacacgcgcgacctggtgtacaaagacccggcaagaccgaagatccaaaagacctgcaccttcaaggagttggtctacgaaactgtgcgggtcccaggatgtgcccaccatgccgactcattgtacacctaccccgttgccacccagtgtcattgcggaaagtgcgactcggactccaccgattgtacggtgagaggactcgggccctcttactgctccttcggagagatgaaagaa

SEQ ID NO: 11658 - DNA, 387 bp, synthetic construct
  misc_feature 1..387: note = source = /note="Description of Artificial Sequence: Synthetic coding sequence"
  source 1..387: mol_type = other DNA
atgaagactcttcagttttttttcctgttctgctgttggaaggccatctgttgcaactcttgcgaacttacaaatatcacgattgctattgagaaggaggagtgccgcttttgtatatcaatcaacacaacttggtgcgctggatattgctacacgcgggatctggtctacaaggaccctgcccgcccaaagatccagaagacttgtactttcaaggagctagtgtacgagacagtgcgtgtccccgggtgtgcccaccacgcagattctctgtatacgtatccagtcgcaacccagtgtcactgcggtaaatgcgatagcgacagtacggactgcacagtgcgcggccttggtccatcttattgctctttcggcgagatgaaggaa

SEQ ID NO: 11659 - DNA, 387 bp, synthetic construct
  misc_feature 1..387: note = source = /note="Description of Artificial Sequence: Synthetic coding sequence"
  source 1..387: mol_type = other DNA
atgaagacactgcagttcttttttttattctgctgttggaaggcaatctgctgcaactcttgcgagttgacgaatatcaccatcgcaatcgagaaggaggagtgccgcttttgtatcagtattaacacaacctggtgcgccggatactgctataccagggatctcgtgtacaaggatccagcccgccccaaaattcagaagacctgtacgttcaaggagctggtgtacgaaaccgttagggtgcctggatgcgctcaccatgcggacagcttatacacttaccctgtggccacccaatgtcactgtggcaagtgtgatagtgactctacagattgcacggtcaggggtctggggccgagctactgcagtttcggagagatgaaagag

SEQ ID NO: 11660 - DNA, 387 bp, synthetic construct
  misc_feature 1..387: note = source = /note="Description of Artificial Sequence: Synthetic coding sequence"
  source 1..387: mol_type = other DNA
atgaaaaccctgcaattctttttccttttctgttgctggaaggccatttgttgtaactcctgcgagctgaccaacatcaccatcgccattgagaaggaagaatgccgattttgcatttcgatcaacaccacttggtgtgcaggatactgttacactagagatctggtgtacaaggatcctgcacggcccaagattcaaaagacttgtacctttaaggaattggtctacgaaaccgtgcgggtgcctggctgtgcacaccacgccgattccctctacacctaccctgtcgcaactcagtgtcactgcggaaaatgtgactccgatagcaccgactgtaccgtgcgtggacttggaccctcctactgttcattcggggaaatgaaggag

SEQ ID NO: 11661 - DNA, 387 bp, synthetic construct
  misc_feature 1..387: note = source = /note="Description of Artificial Sequence: Synthetic coding sequence"
  source 1..387: mol_type = other DNA
atgaagacactgcagtttttcttcctgttctgttgctggaaagctatttgttgcaattcttgtgaacttaccaacataactattgccatagagaaggaggagtgccgcttttgtatctcaattaatacaacctggtgtgccggctactgttatactagagatctagtttataaggaccccgcccgaccaaaaattcagaaaacttgcacctttaaggagctagtctatgaaacagtaagggtgcccggatgtgcccatcacgctgactctctctatacataccctgtggccacccaatgtcattgtggtaaatgtgattcggacagcaccgattgcactgtgagaggcctcgggcccagttactgttccttcggggaaatgaaggag

SEQ ID NO: 11662 - DNA, 387 bp, synthetic construct
  misc_feature 1..387: note = source = /note="Description of Artificial Sequence: Synthetic coding sequence"
  source 1..387: mol_type = other DNA
atgaaaaccctgcagttctttttcttattctgctgttggaaagccatctgctgcaacagttgcgagcttaccaatattactatcgctattgagaaggaggagtgtcgattttgcattagcattaacactacatggtgtgcaggctattgctacacaagggatcttgtctataaagatccagcacgccctaagatccaaaagacctgtacattcaaggagctggtttatgaaaccgtgagggtgcctggctgtgctcaccacgcagattcgctttacacctaccccgtcgccacccagtgtcattgtggaaagtgcgacagtgattccacggattgcacagtacggggtcttggcccatcctattgcagcttcggagaaatgaaagaa

SEQ ID NO: 11663 - DNA, 387 bp, synthetic construct
  misc_feature 1..387: note = source = /note="Description of Artificial Sequence: Synthetic coding sequence"
  source 1..387: mol_type = other DNA
atgaaaactcttcagttcttcttcctcttttgctgttggaaggcgatctgttgtaatagttgtgagcttaccaatatcactattgctattgaaaaagaagagtgtaggttttgcatctcgatcaacactacctggtgcgcaggttactgttacactcgtgacctggtgtacaaggatccagcacgaccgaaaattcagaaaacctgcacgttcaaggaactcgtgtacgaaactgtgcgcgtccctggttgcgcacatcacgccgatagcctgtacacctacccggtggcaacgcaatgtcactgtggaaagtgcgactcagattccactgactgtactgtgcgcggacttgggccatcgtactgtagctttggagaaatgaaggaa

SEQ ID NO: 11664 - DNA, 387 bp, synthetic construct
  misc_feature 1..387: note = source = /note="Description of Artificial Sequence: Synthetic coding sequence"
  source 1..387: mol_type = other DNA
atgaaaacgctgcagttctttttcctgttctgttgctggaaggcaatctgttgcaatagctgcgaactgaccaatatcaccatcgctattgagaaggaagagtgtagattctgtatctcgatcaacactacttggtgtgccggatattgctacacccgagatctggtgtacaaagacccggcccgcccgaagatccagaaaacctgtaccttcaaggaactcgtttacgaaactgtgcgggtgcccggatgcgcacatcacgcggactcgctttacacctaccccgtggcgactcaatgccactgcggtaaatgcgacagcgactctaccgattgcacggtgcgcggcttgggaccatcatactgctcattcggagagatgaaggaa

SEQ ID NO: 11665 - DNA, 387 bp, synthetic construct
  misc_feature 1..387: note = source = /note="Description of Artificial Sequence: Synthetic coding sequence"
  source 1..387: mol_type = other DNA
atgaagaccctacaatttttcttccttttctgctgttggaaagcgatctgctgcaattcctgcgaactgacaaatatcacaatcgcaatcgagaaggaagagtgtagattctgtatcagtataaacaccacatggtgcgccgggtactgctacacgagagacctggtttataaagatccagccagaccaaagatccaaaagacttgtacctttaaagagctggtgtacgagaccgtccgagtgcctggctgtgcccaccacgccgactctctctacacctatcccgtggcgactcagtgccactgtgggaagtgcgactctgacagcacagactgcactgttagaggtctgggaccctcttactgttcatttggagaaatgaaagag

SEQ ID NO: 11666 - DNA, 387 bp, synthetic construct
  misc_feature 1..387: note = source = /note="Description of Artificial Sequence: Synthetic coding sequence"
  source 1..387: mol_type = other DNA
atgaaaactctgcagttcttttttcttttctgttgctggaaggcaatctgctgtaattcgtgcgagctgactaacatcaccatcgctattgagaaggaagaatgccgtttctgtatttcgatcaacactacctggtgtgcggggtactgttacacccgcgaccttgtctacaaggatccagcaagacccaaaatccaaaagacctgtacttttaaggaactggtgtatgaaactgtccgggtgcctggttgtgcacaccatgcggactcgctttacacttaccccgtggcaactcaatgccattgtgggaaatgcgatagcgattcgactgattgcacggtgcgtggactgggaccctcgtactgttcctttggcgagatgaaagaa

SEQ ID NO: 11667 - DNA, 387 bp, synthetic construct
  misc_feature 1..387: note = source = /note="Description of Artificial Sequence: Synthetic coding sequence"
  source 1..387: mol_type = other DNA
atgaaaacccttcagtttttctttcttttctgttgttggaaggcgatttgctgtaatagctgcgaacttactaacatcactattgccatcgaaaaagaagagtgccgtttctgcatttcgattaacaccacctggtgtgcaggttactgttacaccagagatctggtgtacaaagaccccgcaagacctaagatacaaaagacttgtacttttaaggagctggtctacgaaacggtgcgggtcccaggttgcgcacatcatgccgactcgctgtacacttatccagtggccactcaatgtcattgtggaaagtgtgactcggattcgaccgactgcactgtgaggggactgggcccctcatactgttcattcggagaaatgaaagag

SEQ ID NO: 11668 - DNA, 387 bp, synthetic construct
  misc_feature 1..387: note = source = /note="Description of Artificial Sequence: Synthetic coding sequence"
  source 1..387: mol_type = other DNA
atgaagacacttcagtttttcttcctattctgttgctggaaggctatttgttgtaactcttgtgaactgactaacataactattgccatcgaaaaagaagaatgcaggttctgtatctctatcaacactacatggtgtgctgggtactgttatacacgggatcttgtgtataaagatcctgccagaccgaaaatccagaaaacttgtacatttaaggaactcgtgtatgaaactgtgcgggtgcccggatgtgctcaccacgcggattctttatatacatatcccgtagcgacacagtgtcactgtgggaaatgtgattcagattcaactgattgcactgtcagggggctagggccttcttactgctctttcggagaaatgaaagaa

SEQ ID NO: 11669 - DNA, 387 bp, synthetic construct
  misc_feature 1..387: note = source = /note="Description of Artificial Sequence: Synthetic coding sequence"
  source 1..387: mol_type = other DNA
atgaagacattgcagttcttcttcctgttctgctgctggaaagctatctgctgcaatagttgtgaattgactaatattactatcgccatcgagaaagaagaatgtagattctgcatatccatcaatactacttggtgcgcgggatattgttacactcgggatctcgtgtataaagatcctgccagacccaaaattcagaagacctgtacatttaaggaattagtgtacgagactgttcgcgtgcccggctgtgcacatcacgccgattcactgtacacatatcctgtagctacccagtgtcattgtggtaagtgcgactctgactcaactgattgtacagtgcgaggattgggcccttcttattgttccttcggtgaaatgaaggag

SEQ ID NO: 11670 - DNA, 387 bp, synthetic construct
  misc_feature 1..387: note = source = /note="Description of Artificial Sequence: Synthetic coding sequence"
  source 1..387: mol_type = other DNA
atgaaaacgttgcagttcttctttctattttgctgttggaaagcaatctgctgcaactcctgcgagctgacaaacattacaatagcaatcgagaaggaggaatgtagattttgtatctccataaacaccacctggtgtgccggctattgctacacacgcgatcttgtgtacaaggatccagctaggcctaagatccagaagacctgcacatttaaagagctcgtatacgagactgtgcgcgtgcccggctgcgcacaccatgccgacagcctttatacctatcccgtcgccacacaatgtcactgcggaaagtgtgacagcgacagcaccgactgtactgttcgtggtctgggcccaagttattgctcttttggcgagatgaaagaa

SEQ ID NO: 11671 - DNA, 387 bp, synthetic construct
  misc_feature 1..387: note = source = /note="Description of Artificial Sequence: Synthetic coding sequence"
  source 1..387: mol_type = other DNA
atgaaaaccctccagttctttttcctgttctgctgctggaaggctatctgctgtaattcttgcgagttgaccaacattacaatagctatagagaaagaggagtgcaggttctgtatcagcataaacacaacctggtgtgcggggtactgttatacacgggatttggtttacaaagacccagcacggcccaagattcagaagacatgtacgtttaaagaactggtgtacgagacagttagagttcctgggtgcgcccaccatgccgatagcttgtatacttacccagtggccactcagtgccactgtggcaagtgtgactcagattccaccgactgcacggtccgtggacttggaccgtcgtactgctccttcggcgaaatgaaggag

SEQ ID NO: 11672 - DNA, 387 bp, synthetic construct
  misc_feature 1..387: note = source = /note="Description of Artificial Sequence: Synthetic coding sequence"
  source 1..387: mol_type = other DNA
atgaagactcttcagttcttcttcttgttctgttgttggaaagcaatttgttgtaattcttgtgaactcacgaacattactatcgcaattgagaaggaggaatgccggttctgcatctcgataaatacgacgtggtgcgccggttactgctatacgagggaccttgtgtacaaagatcccgcgaggcccaaaattcagaagacctgcacttttaaagaattggtgtacgagacggtgagagttcccggctgcgcccaccacgctgatagcctctacacatacccagtagcgacccagtgtcattgcggaaaatgcgattcagattcgacagactgcacagtcagaggtttggggccaagctattgttcgtttggcgagatgaaagag

SEQ ID NO: 11673 - DNA, 387 bp, synthetic construct
  misc_feature 1..387: note = source = /note="Description of Artificial Sequence: Synthetic coding sequence"
  source 1..387: mol_type = other DNA
atgaaaactcttcaattcttcttccttttttgttgctggaaggctatatgttgcaattcgtgtgaactcaccaatatcaccatcgcaattgaaaaggaggagtgcagattttgtatttcaataaacaccacctggtgtgcgggatactgctatacccgcgatctcgtgtacaaggatccagcccgtcccaaaatccaaaagacgtgcacttttaaggagcttgtgtatgaaaccgtcagagtgccgggttgtgctcaccatgcagactccctctacacctaccccgtggcaacccagtgtcactgcggtaagtgtgattcagacagcactgactgtacggtgcgcggactggggccatcctattgctccttcggagagatgaaggaa

SEQ ID NO: 11674 - DNA, 387 bp, synthetic construct
  misc_feature 1..387: note = source = /note="Description of Artificial Sequence: Synthetic coding sequence"
  source 1..387: mol_type = other DNA
atgaaaacgttgcaattcttttttctcttctgttgttggaaggccatctgttgcaatagctgcgagctgaccaatatcactattgccatcgaaaaggaagaatgccgcttctgcataagcatcaacacgacctggtgcgcgggctactgttatacccgcgacctggtctacaaggacccggcccgaccaaagatccagaaaacctgtactttcaaagaactggtctacgaaactgtccgggtgccgggttgcgcccaccacgcagacagcctctacacttatcccgttgccactcaatgccattgcggcaaatgtgactcggattccaccgattgcaccgtgaggggcttgggaccgtcgtactgctcattcggagaaatgaaggaa

SEQ ID NO: 11675 - DNA, 387 bp, synthetic construct
  misc_feature 1..387: note = source = /note="Description of Artificial Sequence: Synthetic coding sequence"
  source 1..387: mol_type = other DNA
atgaaaacgctgcagttcttcttcttgttttgttgttggaaagccatctgttgcaattcttgtgagctgaccaacattacgatcgcaatcgaaaaggaggagtgcagattttgcatcagtatcaatacaacctggtgcgcaggatactgctacacacgtgatctggtatacaaagatcccgcccgtcccaagattcagaaaacttgcacctttaaggagctggtttatgagaccgtgcgcgtgccaggttgtgcgcatcatgcagacagcctgtacacctatcccgtggctactcagtgccactgcggaaagtgcgacagtgattcaactgactgcactgtccgggggttggggccctcatattgctcctttggagaaatgaaggag

SEQ ID NO: 11676 - DNA, 387 bp, synthetic construct
  misc_feature 1..387: note = source = /note="Description of Artificial Sequence: Synthetic coding sequence"
  source 1..387: mol_type = other DNA
atgaaaaccctgcaattctttttccttttttgctgttggaaagcaatctgttgtaactcctgcgaactcactaatatcactattgcgatcgaaaaggaggaatgtcgcttttgcatttcaattaacacgacctggtgcgccggctactgttacacccgagatcttgtgtacaaggacccagcacgtccaaagatacagaaaacttgcacgtttaaggagctcgtgtacgaaacggttcgggtccctggatgtgctcatcacgccgacagtctctacacgtatcccgtcgcaacgcagtgtcattgtggaaagtgtgattccgattctaccgattgtaccgttagaggactggggccgagctactgcagcttcggtgaaatgaaggaa

SEQ ID NO: 11677 - DNA, 387 bp, synthetic construct
  misc_feature 1..387: note = source = /note="Description of Artificial Sequence: Synthetic coding sequence"
  source 1..387: mol_type = other DNA
atgaagaccctgcagttctttttcctcttttgttgctggaaagcaatctgttgcaactcatgtgaactgacaaatatcaccatcgcaattgaaaaagaggaatgccgcttctgtatctctattaacaccacttggtgtgcgggatattgctatacccgcgatcttgtgtacaaggacccggcacgccccaaaatccagaaaacgtgtacgttcaaagaattggtttatgagacggtgcgcgtgcctggctgtgcacaccacgcagactcactctacacctaccctgtagctacacaatgccattgtggcaaatgcgattcagactctacagactgtaccgtgagaggcctcggtcccagctactgcagctttggagagatgaaggaa

SEQ ID NO: 11678 - DNA, 387 bp, synthetic construct
  misc_feature 1..387: note = source = /note="Description of Artificial Sequence: Synthetic coding sequence"
  source 1..387: mol_type = other DNA
atgaagacccttcagtttttttttctcttctgctgttggaaggccatctgctgtaatagctgcgagctcaccaatattaccatcgccatagaaaaggaggagtgccgcttttgcatcagcatcaacaccacctggtgcgccggatactgctatacgcgggatctggtgtataaggatccagccaggcccaagatacaaaagacctgcacgttcaaagaactggtgtatgagaccgtcagagtacctggctgtgcccaccacgccgactctctttacacataccctgtagcgacgcaatgtcactgcggaaaatgcgactctgacagcactgattgtaccgtgagaggcctcggaccctcatactgctcattcggcgaaatgaaggaa

SEQ ID NO: 11679 - DNA, 387 bp, synthetic construct
  misc_feature 1..387: note = source = /note="Description of Artificial Sequence: Synthetic coding sequence"
  source 1..387: mol_type = other DNA
atgaaaacgttacaatttttttttttattttgttgttggaaagcgatatgttgtaattcgtgtgaattaacgaatataacgatagcgatagaaaaagaagaatgtcgtttttgtatatcgataaatacgacgtggtgtgcgggttattgttatacgcgtgatttagtttataaagatccggcgcgtccgaaaatacaaaaaacgtgtacgtttaaagaattagtttatgaaacggtacgagtaccgggttgtgcgcatcatgcggattcgttatatacgtatccggtagcgacgcaatgtcattgtggtaaatgtgattcggattcgacggattgtacggtacgtggtttaggtccgtcgtattgttcgtttggtgaaatgaaagaa

SEQ ID NO: 11680 - DNA, 387 bp, synthetic construct
  misc_feature 1..387: note = source = /note="Description of Artificial Sequence: Synthetic coding sequence"
  source 1..387: mol_type = other DNA
atgaaaacattgcagttttttttcctcttttgttgctggaaagccatatgctgcaattcctgcgaactgaccaacatcaccattgccatcgaaaaagaggagtgccgcttttgcatctctatcaataccacctggtgcgctggatactgttatacccgcgatttggtctacaaggacccagcgaggcccaagatccaaaagacctgtaccttcaaggagttggtgtatgaaaccgttcgcgtgcctggatgtgcgcatcatgcggactctctgtacacgtatcctgtcgccacgcagtgccactgcggtaagtgcgattctgattcaacggattgcacggtacgcgggctggggccaagctactgctctttcggcgagatgaaggag

SEQ ID NO: 11681 - DNA, 387 bp, synthetic construct
  misc_feature 1..387: note = source = /note="Description of Artificial Sequence: Synthetic coding sequence"
  source 1..387: mol_type = other DNA
atgaaaaccctccaattcttttttctgttttgttgttggaaggcaatttgttgcaacagctgtgaactcactaacattactatagctatcgagaaggaagagtgccggttttgcatctcaataaacaccacctggtgcgcaggatactgttacacccgtgatctggtgtacaaggatccagcgcgacctaagattcagaaaacctgtacctttaaggagctggtgtatgagactgtgcgcgtgccaggatgcgctcaccatgccgattcgctctacacttaccctgtcgcaacccaatgccattgcggcaagtgtgactccgattcgaccgattgcactgtgcgcggtctgggaccatcatactgttcgtttggcgagatgaaggag

SEQ ID NO: 11682 - DNA, 387 bp, synthetic construct
  misc_feature 1..387: note = source = /note="Description of Artificial Sequence: Synthetic coding sequence"
  source 1..387: mol_type = other DNA
atgaagaccctacagttctttttcctcttctgttgttggaaggcgatttgctgtaattcttgtgaactgactaatattacaatcgctatcgaaaaggaagagtgcagattttgtatctccatcaacactacctggtgtgccggctactgctacaccagagatcttgtgtataaagaccccgcaagacctaagatccaaaagacatgcacttttaaagagctggtatacgaaaccgtgcgggtaccaggctgcgcacatcacgccgattctttatacacataccctgtggctactcaatgtcattgtggaaagtgtgactcagactccaccgattgcactgtcagaggcttgggaccatcatattgtagcttcggcgagatgaaggag

SEQ ID NO: 11683 - DNA, 387 bp, synthetic construct
  misc_feature 1..387: note = source = /note="Description of Artificial Sequence: Synthetic coding sequence"
  source 1..387: mol_type = other DNA
atgaagacacttcagttcttctttctcttttgctgctggaaggctatctgttgtaattcatgcgagctcacaaatatcactattgctattgaaaaggaggaatgtcgattttgcattagcataaacacaacctggtgcgcaggctactgctacactagggatttggtgtacaaggaccccgcgaggcccaaaatacagaagacatgcacctttaaggaattggtgtatgagacagtacgcgtgcccgggtgtgctcatcatgcagactccctgtacacatacccagtcgccacccagtgtcattgtggcaaatgtgactccgatagcaccgactgcactgtgcgtggtctgggtccttcctattgtagctttggagagatgaaggaa

SEQ ID NO: 11684 - DNA, 387 bp, synthetic construct
  misc_feature 1..387: note = source = /note="Description of Artificial Sequence: Synthetic coding sequence"
  source 1..387: mol_type = other DNA
atgaaaactcttcaatttttttttcttttttgttgttggaaagctatttgttgtaatagttgtgaacttacaaatataacaattgctattgagaaggaagagtgtcgattttgtatttcaataaatacaacttggtgtgctgggtattgttatactagagatcttgtttataaagatccagcaagaccaaaaattcaaaagacttgtacttttaaagaattagtttatgaaactgttcgagtaccaggatgtgctcatcatgcagattctctttatacttatccagttgcaacacaatgtcattgtggaaagtgtgactcagattctacagattgtacagttcgtggattgggaccatcatattgtagtttcggagaaatgaaagaa

SEQ ID NO: 11685 - DNA, 387 bp, synthetic construct
  misc_feature 1..387: note = source = /note="Description of Artificial Sequence: Synthetic coding sequence"
  source 1..387: mol_type = other DNA
atgaaaactctccagttctttttccttttctgttgttggaaggcaatttgttgtaactcatgcgaactgactaacattacgatcgcaattgaaaaggaagagtgtaggttttgcatttcaattaacaccacctggtgcgcaggatactgttacacccgggacctcgtctataaggatccggccagacctaagattcaaaagacttgtacctttaaggagcttgtgtacgaaaccgtgcgtgtccctggttgtgcacatcacgctgactcactttacacttaccctgtcgcgactcagtgtcattgtggaaagtgtgacagcgattccaccgactgtactgtcaggggactcggcccatcctactgctcgtttggagaaatgaaggaa

SEQ ID NO: 11686 - DNA, 387 bp, synthetic construct
  misc_feature 1..387: note = source = /note="Description of Artificial Sequence: Synthetic coding sequence"
  source 1..387: mol_type = other DNA
atgaagactctccagtttttcttcctgttttgctgttggaaagcgatctgttgcaacagttgcgagctgactaatattaccatcgccatagaaaaggaggagtgcaggttctgtatcagtatcaacactacgtggtgtgctgggtattgttataccagagatctcgtgtacaaggaccccgcgcgcccaaagatacagaagacctgcacctttaaggagttggtgtacgagaccgtaagagtgcccggctgcgcccatcacgctgatagcctttatacgtaccctgtcgccacccagtgtcactgcggcaaatgcgactccgattccacagactgcaccgtacgaggtctagggccgtcttactgttctttcggcgagatgaaagaa

SEQ ID NO: 11687 - DNA, 387 bp, synthetic construct
  misc_feature 1..387: note = source = /note="Description of Artificial Sequence: Synthetic coding sequence"
  source 1..387: mol_type = other DNA
atgaagaccctccagttcttcttcctgttttgttgctggaaagcaatttgctgcaattcctgtgaactgacaaacattaccattgctatcgagaaagaagagtgccgattttgtatcagcatcaatacaacctggtgcgccggctactgctatacccgcgaccttgtgtacaaggatcctgctcgccccaaaatccagaaaacgtgcacgttcaaagaactggtctatgaaacggtccgggtgcctggctgcgcacatcatgctgattctctttatacctatcctgtggcaacccagtgccactgtggaaaatgtgattctgactcaaccgactgtactgtgcgtgggctcggcccaagctactgcagcttcggcgagatgaaggag

SEQ ID NO: 11688 - DNA, 387 bp, synthetic construct
  misc_feature 1..387: note = source = /note="Description of Artificial Sequence: Synthetic coding sequence"
  source 1..387: mol_type = other DNA
atgaaaaccctccagtttttttttctcttttgctgctggaaggccatttgttgtaacagctgtgagctcaccaatatcacaattgccatcgagaaagaggaatgcaggttttgtatcagcattaataccacatggtgtgccggctactgttatactagggatctcgtgtataaggaccccgcacggcccaaaatccagaagacttgtaccttcaaagaactggtatacgaaaccgtgcgggttcccggatgcgcacatcatgccgacagcctgtacacctaccctgtggccactcagtgtcactgcggcaaatgcgattcagactctacagactgcactgttcggggactaggacccagttactgtagtttcggcgaaatgaaggaa

SEQ ID NO: 11689 - DNA, 387 bp, synthetic construct
  misc_feature 1..387: note = source = /note="Description of Artificial Sequence: Synthetic coding sequence"
  source 1..387: mol_type = other DNA
atgaagaccctgcagtttttcttcctcttttgttgttggaaagccatctgctgcaactcatgcgagctaacaaatattacaattgccattgaaaaggaagaatgtagattttgtatcagcatcaacaccacatggtgtgccggatattgttatactcgagacctcgtctacaaagaccctgcacgtcctaagatccagaagacatgtacatttaaagagctggtctatgaaaccgtgcgtgtccctgggtgtgcccaccatgccgacagtctgtacacatatccggtagctacccagtgccactgtggcaaatgcgatagcgactcgacagattgcaccgtgagaggcctggggccatcatactgctctttcggagagatgaaggag

SEQ ID NO: 11690 - DNA, 387 bp, synthetic construct
  misc_feature 1..387: note = source = /note="Description of Artificial Sequence: Synthetic coding sequence"
  source 1..387: mol_type = other DNA
atgaaaacgctgcagttctttttcctgttctgttgctggaaggccatctgctgcaattcatgcgagctgaccaacataaccattgctatcgagaaagaggaatgcaggttttgcatctcgatcaacaccacctggtgcgcaggctactgttacacccgggacctggtgtacaaggacccggcgcggccgaagattcaaaagacctgcacctttaaggagctcgtctacgagactgtgagagtgcctggatgcgcccatcatgccgactcattgtatacctacccggtggcgacccagtgccactgcggaaaatgcgactcagatagcaccgactgcactgtgagaggactcggaccgagctactgctcgttcggagagatgaaggaa

SEQ ID NO: 11691 - DNA, 387 bp, synthetic construct
  misc_feature 1..387: note = source = /note="Description of Artificial Sequence: Synthetic coding sequence"
  source 1..387: mol_type = other DNA
atgaaaaccctgcaattcttcttcctcttttgctgctggaaagcgatttgttgcaactcctgcgagttgactaatatcaccatcgcaatcgaaaaggaagaatgcagattttgcatctccatcaacactacttggtgcgccgggtactgttacacccgggacctggtctacaaggatcccgcccgccctaagatccagaaaacctgtactttcaaggagcttgtgtacgagacggtgagggtcccgggatgcgctcatcacgcggacagcctctacacgtatccagtggccacccagtgccactgcggtaagtgcgattcggacagcaccgactgtactgtgcgcggcctgggaccgtcatactgttcgttcggagagatgaaggaa

SEQ ID NO: 11692 - DNA, 387 bp, synthetic construct
  misc_feature 1..387: note = source = /note="Description of Artificial Sequence: Synthetic coding sequence"
  source 1..387: mol_type = other DNA
atgaaaaccctccagtttttcttcctcttctgctgctggaaggcaatctgttgtaactcgtgcgaactcactaatatcacgattgctatcgaaaaagaggagtgccgcttctgtatctctatcaatactacctggtgtgccggatactgttacacccgtgatctggtgtacaaggatcccgctcggcctaagatccagaaaacctgcaccttcaaagaactcgtgtacgagactgtgcgggtcccggggtgcgcacaccatgccgactccctctacacctacccggtggccacccaatgccactgcggaaaatgcgactccgattccaccgactgtaccgtcagaggactgggcccctcgtactgctcgttcggcgagatgaaggaa

SEQ ID NO: 11693 - DNA, 387 bp, synthetic construct
  misc_feature 1..387: note = source = /note="Description of Artificial Sequence: Synthetic coding sequence"
  source 1..387: mol_type = other DNA
atgaaaaccttgcaattcttctttcttttttgttgctggaaggccatctgttgcaactcttgcgaactcaccaacattacgattgccattgaaaaggaggaatgtaggttctgtatcagcataaacacaacctggtgtgccggctactgttatacccgagacctcgtttacaaagaccccgcgcgccctaagatccagaagacatgtaccttcaaagaactggtgtacgagacggtcagagtgcctggctgcgcccatcacgcagatagcctgtatacctatcccgtcgccactcagtgccattgcggcaaatgcgactccgactctacggactgtacagtccggggcctggggcccagctactgttcgttcggggagatgaaggaa

SEQ ID NO: 11694 - DNA, 387 bp, synthetic construct
  misc_feature 1..387: note = source = /note="Description of Artificial Sequence: Synthetic coding sequence"
  source 1..387: mol_type = other DNA
atgaaaacgctgcagtttttttttctcttctgttgctggaaggccatctgttgtaacagctgtgagctaactaacatcaccattgcaattgaaaaagaagagtgtagattctgcattagtatcaatacaacatggtgcgccggttactgctatacacgcgatctggtatataaggacccggcccgtccaaagattcagaagacatgcaccttcaaggagctagtgtatgagaccgtgcgggtgccaggatgcgcacaccatgctgattctctgtacacatacccagtcgcaacccaatgccattgtggaaaatgcgatagcgattctaccgactgtactgtgagggggttgggcccctcctattgttcttttggtgagatgaaggaa

SEQ ID NO: 11695 - DNA, 387 bp, synthetic construct
  misc_feature 1..387: note = source = /note="Description of Artificial Sequence: Synthetic coding sequence"
  source 1..387: mol_type = other DNA
atgaaaactttgcaattcttcttcctgttctgctgctggaaggcgatctgctgcaatagctgcgagctgactaacatcactattgctatcgaaaaggaggaatgccggttctgtatcagcatcaacactacttggtgcgcgggctactgctacacccgcgacctggtctataaggatccggctcggccaaagatccaaaagacttgcacgttcaaagaacttgtgtacgaaaccgtgcgcgtgcccgggtgtgcacatcacgcggactccctctacacctaccctgtggccacgcaatgccactgtggcaagtgcgacagcgactcaaccgactgcaccgtgcgggggcttggaccatcctactgctcgttcggagagatgaaagaa

SEQ ID NO: 11696 - DNA, 387 bp, synthetic construct
  misc_feature 1..387: note = source = /note="Description of Artificial Sequence: Synthetic coding sequence"
  source 1..387: mol_type = other DNA
atgaaaactctgcagtttttcttcctgttttgctgttggaaagccatttgctgtaacagctgtgagctgacaaatattacgatcgctatcgaaaaagaggaatgtcgtttctgtatctcgatcaacacgacctggtgtgccggatactgttacacgagggacctggtctacaaagacccagccagaccaaagatccagaagacttgtaccttcaaagagctggtctacgaaaccgttagggtccctgggtgtgcacaccacgccgactctctatacacctatcccgttgccacccagtgccactgcggaaaatgtgactccgatagcactgattgtacggtgcgcggcctagggccctcgtactgttcctttggggaaatgaaagag

SEQ ID NO: 11697 - DNA, 387 bp, synthetic construct; identical to SEQ ID NO: 11670
  misc_feature 1..387: note = source = /note="Description of Artificial Sequence: Synthetic coding sequence"
  source 1..387: mol_type = other DNA

SEQ ID NO: 11698 - DNA, 387 bp, synthetic construct
  misc_feature 1..387: note = source = /note="Description of Artificial Sequence: Synthetic coding sequence"
  source 1..387: mol_type = other DNA
atgaaaacgctccagttctttttcctgttttgttgctggaaggccatttgttgtaacagctgcgagcttactaatatcaccatagccatagagaaggaggaatgccggttctgtatctcgatcaatactacctggtgcgctggctactgctacacgcgggatctagtgtataaggatcctgcacgcccgaaaatacagaaaacgtgcaccttcaaagagcttgtgtatgaaaccgttcgggtgcctggatgtgcccaccacgcagattccctctatacgtaccccgtggcaacccagtgtcactgtggaaaatgtgatagtgacagcaccgactgtacagtcagaggactgggtccatcgtattgtagttttggcgaaatgaaggag

SEQ ID NO: 11699 - DNA, 387 bp, synthetic construct
  misc_feature 1..387: note = source = /note="Description of Artificial Sequence: Synthetic coding sequence"
  source 1..387: mol_type = other DNA
atgaaaacacttcagtttttttttctgttttgttgttggaaagcaatatgttgcaatagttgtgaactgactaacataactatagctatagaaaaagaagaatgcagattctgtatttctattaacactacatggtgtgcgggatattgttacactcgcgaccttgtgtacaaagatccagcaagacctaaaattcagaaaacttgcacttttaaagaactcgtctatgaaacagttagggtccccgggtgtgcacatcatgcggactcactatatacttatccagtcgctactcagtgccattgcgggaaatgcgattcagattcaactgattgcacagtaagaggactcgggccaagttattgttcttttggagagatgaaagag

SEQ ID NO: 11700 - DNA, 387 bp, synthetic construct
  misc_feature 1..387: note = source = /note="Description of Artificial Sequence: Synthetic coding sequence"
  source 1..387: mol_type = other DNA
atgaaaactttgcagttcttctttcttttctgctgctggaaagccatctgctgtaactcgtgcgaactgaccaatatcaccatcgccattgaaaaggaagaatgcagattctgtatctcaattaacaccacctggtgcgcgggttactgttacacgcgtgacctggtctacaaggaccctgcacgacccaagatccaaaagacgtgcactttcaaggagctcgtgtacgagactgtgcgcgtcccagggtgcgctcaccacgcagattctctttatacctatccggtggccacccagtgccattgtggaaagtgtgactcggactcgactgattgtactgtgaggggcctgggaccaagctactgctccttcggggagatgaaagag

SEQ ID NO: 11701 - DNA, 387 bp, synthetic construct
  misc_feature 1..387: note = source = /note="Description of Artificial Sequence: Synthetic coding sequence"
  source 1..387: mol_type = other DNA
atgaaaactctccagttctttttcctgttttgctgctggaaggcgatctgctgcaactcttgtgaattgactaatatcaccatagcaatcgaaaaggaagaatgtcggttttgtatttccattaacaccacctggtgcgcaggatattgctacacgcgtgacctggtgtacaaagatcccgcaaggccgaagattcaaaagacctgtacctttaaggagctcgtgtacgagacggtcagagtgccaggatgcgcccatcatgctgactccctgtacacctacccagtggctacgcaatgtcactgtggaaagtgtgactcagattctactgattgcactgtccgcggcctcgggccttcgtactgttcgtttggtgagatgaaagaa

SEQ ID NO: 11702 - DNA, 387 bp, synthetic construct
  misc_feature 1..387: note = source = /note="Description of Artificial Sequence: Synthetic coding sequence"
  source 1..387: mol_type = other DNA
atgaaaacgctgcaattcttcttccttttctgctgctggaaggctatttgctgcaactcatgcgagctgactaatatcaccattgcaatcgaaaaggaagagtgtcggttctgcatctcgatcaatacgacttggtgtgcaggatactgttacacccgcgacttggtttacaaggatccggctagaccaaaaatccaaaagacttgcaccttcaaggaacttgtgtacgaaactgtgcgggtgcctgggtgtgcccatcatgccgattctctgtatacctacccggtggcgactcagtgccattgcggaaagtgcgactcggatagcaccgactgtaccgtgcgcgggttgggaccgagctactgctcgttcggcgaaatgaaagag

SEQ ID NO: 11703 - DNA, 387 bp, synthetic construct
  misc_feature 1..387: note = source = /note="Description of Artificial Sequence: Synthetic coding sequence"
  source 1..387: mol_type = other DNA
atgaaaacgctgcaattcttctttctcttctgttgttggaaggcaatttgctgtaactcatgtgaacttaccaatatcactattgccattgaaaaggaagaatgcagattttgcattagcatcaacactacctggtgcgcagggtactgctacacccgggacctggtgtataaggaccctgctagacctaagatccaaaaaacgtgcaccttcaaggagctggtgtacgagactgtgagagtgccgggatgcgcacatcacgccgattccctctacacctacccagtcgcaactcagtgtcactgtggaaagtgtgactcagactccacggactgtactgtcagaggactgggcccttcgtactgtagctttggtgagatgaaagag

SEQ ID NO: 11704 - DNA, 387 bp, synthetic construct
  misc_feature 1..387: note = source = /note="Description of Artificial Sequence: Synthetic coding sequence"
  source 1..387: mol_type = other DNA
atgaaaaccctgcaattcttcttcctcttctgctgttggaaggcgatctgctgcaactcctgtgagctcactaatatcaccatcgcgatcgaaaaggaagagtgccgcttctgcatcagcattaacactacctggtgcgccggatactgctacactcgggacctcgtgtacaaggacccggcccggcctaagatccagaaaacctgtacctttaaggaactggtctatgaaactgtgcgcgtccctggatgcgctcatcacgctgactcgctgtacacctacccagtggccacccagtgccattgcggtaaatgcgatagcgactccactgactgcaccgtgcgtgggctgggcccgtcgtactgctcgttcggggagatgaaggag

SEQ ID NO: 11705 - DNA, 387 bp, synthetic construct
  misc_feature 1..387: note = source = /note="Description of Artificial Sequence: Synthetic coding sequence"
  source 1..387: mol_type = other DNA
atgaaaactctccagttcttttttctgttttgttgctggaaggctatctgctgcaacagctgcgagctgactaacatcactatcgcaatcgaaaaagaagaatgtcgcttctgcatctccatcaatactacctggtgcgcgggatactgctacacgagagatctcgtgtacaaggacccagcacggccaaagatccagaaaacttgcacgttcaaggagctggtgtacgaaaccgtccgggtgccgggatgcgctcaccacgctgattcgctgtacacttacccggtggccacgcaatgccattgtggcaagtgtgacagcgacagcactgattgcactgtccgtggcctggggccgtcctactgcagcttcggagaaatgaaagag

SEQ ID NO: 11706 - DNA, 387 bp, synthetic construct
  misc_feature 1..387: note = source = /note="Description of Artificial Sequence: Synthetic coding sequence"
  source 1..387: mol_type = other DNA
atgaaaactttgcagtttttcttcttgttctgttgctggaaggccatctgctgtaacagctgtgagcttactaacattaccatcgcgatcgaaaaggaggaatgccggttctgcatctccatcaatacgacgtggtgcgcaggatactgctacacccgggacctcgtctacaaggatccggctcgcccaaagattcagaaaacttgtactttcaaagagctggtgtacgaaaccgtaagggttccgggttgcgcccaccacgccgactctctttacacctatcctgtggcgacccaatgtcattgcggcaagtgcgacagcgattcgaccgactgcactgtgcgcgggctgggcccttcgtactgttcttttggagaaatgaaggaa

SEQ ID NO: 11707 - DNA, 387 bp, synthetic construct
  misc_feature 1..387: note = source = /note="Description of Artificial Sequence: Synthetic coding sequence"
  source 1..387: mol_type = other DNA
atgaaaacgctgcagttcttttttcttttttgttgttggaaagcaatatgttgtaacagctgcgaacttactaacattacgatagcgatcgaaaaggaagagtgccggttctgtatttccatcaacaccacttggtgcgctggctactgttacactcgcgatctggtctacaaggacccagcacggcccaaaattcagaaaacttgcacgtttaaagaacttgtgtatgagactgtgagagtccctggttgcgcacatcatgcagactccctttacacctacccagtggccacccaatgtcattgtggaaaatgcgatagcgattccaccgactgtacggtgaggggactgggtccttcctactgcagctttggagagatgaaggaa

SEQ ID NO: 11708 - DNA, 387 bp, synthetic construct
  misc_feature 1..387: note = source = /note="Description of Artificial Sequence: Synthetic coding sequence"
  source 1..387: mol_type = other DNA
atgaaaacccttcagtttttcttcctgttctgctgttggaaggctatctgctgtaactcatgcgaactgaccaacattacgatcgccatcgaaaaggaggagtgccgcttttgtatttcgatcaatacgacatggtgcgccggttattgctatactcgggacctggtgtacaaggaccccgcaagaccgaaaattcagaaaacctgtacatttaaagagctggtgtatgagacagttagagtgcctggctgcgcccaccatgccgacagcctttacacatacccagtcgccacgcagtgccactgcgggaaatgtgatagcgactcaaccgactgtacagtgagggggcttggacctagttattgtagcttcggtgaaatgaaggaa

SEQ ID NO: 11709 - DNA, 387 bp, synthetic construct
  misc_feature 1..387: note = source = /note="Description of Artificial Sequence: Synthetic coding sequence"
  source 1..387: mol_type = other DNA
atgaagacacttcaattcttttttctcttctgttgctggaaagctatttgttgcaactcctgtgagctgaccaacatcaccatcgccattgagaaggaggagtgccgtttctgcatctcaatcaatacaacatggtgtgctggatattgctacaccagggacttggtgtacaaggatcccgctaggccaaaaatccagaaaacttgcacttttaaggaactggtgtacgagaccgtgcgtgtgcctggttgtgcacatcacgcagatagtctgtacacctatccagtggctactcaatgtcactgcggcaaatgcgatagcgatagcacagattgcaccgtgaggggtctgggaccttcttactgctccttcggagaaatgaaggaa

SEQ ID NO: 11710 - DNA, 387 bp, synthetic construct
  misc_feature 1..387: note = source = /note="Description of Artificial Sequence: Synthetic coding sequence"
  source 1..387: mol_type = other DNA
atgaaaaccctgcaatttttctttcttttttgctgctggaaggctatatgctgtaatagttgcgagctgacgaacatcactatcgcaatcgagaaagaggaatgcagattctgcatttcaatcaatactacatggtgcgccgggtattgctacacgcgagatctggtgtataaggatccagccagaccaaaaattcagaagacctgcacctttaaagagcttgtttatgaaacagtcagggtccctgggtgtgcacaccatgctgatagcttgtatacgtatcccgttgctacacaatgccactgcggtaagtgcgactcagacagcacagactgcactgtgcgaggccttggcccttcatattgcagttttggggagatgaaagaa

SEQ ID NO: 11711 - DNA, 387 bp, synthetic construct
  misc_feature 1..387: note = source = /note="Description of Artificial Sequence: Synthetic coding sequence"
  source 1..387: mol_type = other DNA
atgaaaactctgcagtttttcttcctgttttgctgctggaaagccatttgctgtaactcctgtgagttgactaatatcaccatcgcgatagaaaaggaagaatgtaggttttgtatttcaattaacaccacttggtgtgcagggtactgttacactcgggacttggtctacaaggatcctgcacgaccaaagattcaaaagacttgtacctttaaggaactcgtctacgaaaccgtgcgggttccaggctgcgcgcatcatgcagatagcctgtacacttacccggtggccacccaatgtcattgtggtaagtgtgactctgattcgactgattgcaccgtgcgaggactcggaccgtcctactgtagctttggtgaaatgaaggaa

SEQ ID NO: 11712 - DNA, 387 bp, synthetic construct
  misc_feature 1..387: note = source = /note="Description of Artificial Sequence: Synthetic coding sequence"
  source 1..387: mol_type = other DNA
atgaaaacgttacaattcttttttcttttttgttgttggaaagcgatctgttgtaattcttgcgaactaacaaatattacaatcgcaattgagaaagaggagtgtcgattttgcatttcaatcaacacgacgtggtgcgccggctattgctatacgcgtgatttagtttataaagaccctgcaagacctaaaattcaaaaaacctgtactttcaaagaacttgtatacgagacagtgcgcgtgcctggctgtgcccaccatgctgattccctgtatacttatcctgtcgcgacgcaatgtcattgtggaaagtgtgattccgacagcactgattgtacagtgagaggacttggcccatcctactgctcatttggcgagatgaaagag

SEQ ID NO: 11713 - DNA, 387 bp, synthetic construct
  misc_feature 1..387: note = source = /note="Description of Artificial Sequence: Synthetic coding sequence"
  source 1..387: mol_type = other DNA
atgaagaccttacagttcttcttcctgttctgttgctggaaggccatctgttgcaactcttgcgagttgacaaatataacaatcgcaatcgagaaagaggagtgcagattctgtatttccattaacaccacctggtgcgccggctactgctacaccagagacttggtgtacaaggatccagcgaggcccaagattcagaagacctgtacttttaaggagctcgtgtatgaaactgttagagtgcccggatgcgcccatcacgctgactcactgtacacgtacccagttgccactcaatgtcattgtggcaagtgtgactccgattcaacagattgtacggtgcggggtctcggaccatcttattgttccttcggagagatgaaggag

SEQ ID NO: 11714 - DNA, 387 bp, synthetic construct
  misc_feature 1..387: note = source = /note="Description of Artificial Sequence: Synthetic coding sequence"
  source 1..387: mol_type = other DNA
atgaaaacgctgcaattttttttcctcttctgttgttggaaagccatctgctgtaatagctgcgagctgacaaatatcactatcgcgatcgaaaaggaggagtgcaggttttgcatcagcatcaatacgacttggtgtgcaggatattgttacaccagagacctggtttacaaagaccccgcccgcccaaagattcagaagacatgcaccttcaaggagttggtatacgagacagtgcgagtcccaggctgtgcacatcacgcagatagcctctatacataccccgttgcgacccagtgccactgtggcaaatgcgacagcgattctacagactgtacagtgagaggcctggggccctcgtactgcagttttggtgagatgaaagaa

SEQ ID NO: 11715 - DNA, 387 bp, synthetic construct
  misc_feature 1..387: note = source = /note="Description of Artificial Sequence: Synthetic coding sequence"
  source 1..387: mol_type = other DNA
atgaaaaccctccagtttttctttttgttttgttgttggaaagcaatttgttgtaacagctgcgaactgactaacattacgatagcaatcgagaaggaagaatgtagattctgcattagcataaacaccacttggtgtgctgggtactgttacactcgggatctcgtctataaggatccggcacgtccaaagatccaaaagacctgtactttcaaggagcttgtgtacgagactgtgcgcgtccctggttgcgcgcaccacgccgattcgctgtacacctacccagttgccacccagtgtcactgcggaaaatgcgactcagatagcacggactgcactgtgcggggactcggaccttcgtattgctcttttggcgagatgaaagaa

SEQ ID NO: 11716 - DNA, 387 bp, synthetic construct
  misc_feature 1..387: note = source = /note="Description of Artificial Sequence: Synthetic coding sequence"
  source 1..387: mol_type = other DNA
atgaaaaccttgcagttcttttttctgttctgttgctggaaggccatctgttgcaacagttgcgagctgaccaatattacaattgccatcgagaaggaggagtgtcggttctgcattagcattaatacaacatggtgtgcaggctactgttacacacgggatctggtctataaagaccccgcccggcccaaaatccagaaaacttgtacttttaaagagctggtgtacgagacagttagagtgccagggtgcgcgcaccatgcggactcattgtatacttatccagttgctacacaatgtcactgtgggaaatgcgacagcgactcaaccgactgtactgttagaggcttgggaccaagctactgcagctttggggaaatgaaagag

SEQ ID NO: 11717 - DNA, 387 bp, synthetic construct
  misc_feature 1..387: note = source = /note="Description of Artificial Sequence: Synthetic coding sequence"
  source 1..387: mol_type = other DNA
atgaaaacactccagtttttcttcctgttctgctgctggaaggccatctgctgtaactcctgcgagcttacaaacattacaatcgccattgaaaaggaagagtgtcgattctgcattagcataaacaccacttggtgcgctggttactgttatactagggatctcgtgtacaaggatcctgcacggccaaaaatccagaagacctgtacttttaaagagctcgtgtacgagaccgttagggtgcctggctgcgcccatcacgccgattccctttacacttaccctgtggccacccagtgccactgtggaaaatgcgatagtgactccaccgactgtactgtgcgcgggctcggtccctcctactgcagctttggagagatgaaggag

SEQ ID NO: 11718 - DNA, 387 bp, synthetic construct
  misc_feature 1..387: note = source = /note="Description of Artificial Sequence: Synthetic coding sequence"
  source 1..387: mol_type = other DNA
atgaaaacactacagttttttttcctgttctgctgttggaaggctatttgttgcaattcctgcgagctgactaatataacaatcgcaatcgaaaaggaagagtgcagattttgcatatccatcaacactacctggtgcgccgggtactgttatactagggacctggtctataaggatccagctcgacccaagatacagaaaacctgtactttcaaagaactggtctatgagaccgttagagttcctggctgcgctcaccatgccgactccctgtacacctatcccgttgccactcagtgccactgcggcaaatgcgatagcgacagcaccgactgcaccgtgcggggactaggcccatcttattgttctttcggggaaatgaaagaa

SEQ ID NO: 11719 - DNA, 387 bp, synthetic construct
  misc_feature 1..387: note = source = /note="Description of Artificial Sequence: Synthetic coding sequence"
  source 1..387: mol_type = other DNA
atgaaaaccctgcagttctttttccttttttgctgctggaaggcgatttgttgtaacagctgtgagcttactaacattaccatcgcaattgagaaggaagagtgccgattttgtatttcgattaacactacctggtgtgcaggctattgttacactcgtgatctggtctacaaagatcctgccagaccaaagatccaaaagacttgcactttcaaagaactggtctacgaaaccgtcagagtgcctggttgtgcccaccacgcggatagcctgtacacgtaccctgtcgcaacgcaatgtcattgtggaaagtgtgacagcgatagcactgactgcaccgtgagaggactggggccttcttactgctcatttggtgagatgaaggaa

SEQ ID NO: 11720 - DNA, 387 bp, synthetic construct
  misc_feature 1..387: note = source = /note="Description of Artificial Sequence: Synthetic coding sequence"
  source 1..387: mol_type = other DNA
atgaaaactctccagttcttttttctcttttgctgttggaaggctatttgttgtaactcgtgcgaacttaccaacattactatagccatcgaaaaggaagagtgcagattctgtatttccataaacactacgtggtgtgctgggtactgttacacccgtgacctcgtctacaaggatccagccagaccaaagatccagaaaacctgcacttttaaggagcttgtgtatgaaaccgtgagggtgccaggatgtgcccatcatgcagattcactctacacttaccctgtggccacgcaatgccactgtgggaaatgcgacagcgattcgaccgattgtactgtcagaggactgggaccaagctactgctcattcggcgaaatgaaggaa

SEQ ID NO: 11721 - DNA, 387 bp, synthetic construct
  misc_feature 1..387: note = source = /note="Description of Artificial Sequence: Synthetic coding sequence"
  source 1..387: mol_type = other DNA
atgaagaccctgcaatttttctttctgttttgctgctggaaggctatctgctgcaattcctgcgaattgaccaacatcacgatcgcgattgaaaaggaggagtgtcgattctgtatctccattaacaccacctggtgcgcggggtactgctatacccgggacctggtctacaaggatccggccagaccaaagatccaaaagacttgtactttcaaagagctcgtgtacgaaaccgtcagagtgccgggatgtgcgcaccatgcggatagcctttacacctacccggttgcgacccagtgccattgcggcaagtgtgactcagattcaactgattgcaccgtcaggggactcggcccatcgtactgctccttcggagagatgaaggag

SEQ ID NO: 11722 - DNA, 387 bp, synthetic construct
  misc_feature 1..387: note = source = /note="Description of Artificial Sequence: Synthetic coding sequence"
  source 1..387: mol_type = other DNA
atgaagacgcttcaattcttttttcttttttgttgctggaaggcaatttgctgtaactcttgtgaacttacgaatattactattgcaatagagaaagaagaatgcaggttttgtatctcaatcaatacgacttggtgtgcgggatattgctacacacgcgacctggtatataaagaccctgcacgaccgaaaattcaaaaaacgtgcacattcaaggagctcgtttatgaaacggtgcgggttccaggctgcgcacatcacgcggatagtttgtacacgtatcctgttgctactcaatgtcattgtggaaagtgtgactcagacagtaccgactgcactgtcagaggacttgggccatcttattgttcatttggcgaaatgaaggag

SEQ ID NO: 11723 - DNA, 387 bp, synthetic construct
  misc_feature 1..387: note = source = /note="Description of Artificial Sequence: Synthetic coding sequence"
  source 1..387: mol_type = other DNA
atgaaaactctccaattcttcttcttgttctgctgttggaaggcaatctgctgtaattcgtgcgaactcaccaatatcaccattgcgattgaaaaggaggagtgccgcttttgcatctctatcaacaccacctggtgcgcaggttactgctacactcgggacctggtgtataaggatcccgctcggcctaaaatccagaaaacttgtactttcaaagagctggtgtacgaaaccgtgagagtgccaggctgcgcacaccatgcagattcgctgtatacctacccggtggcgacgcaatgtcattgcggtaagtgcgactccgattcaaccgactgcactgtccggggccttggtccttcctactgctcatttggggaaatgaaggaa

SEQ ID NO: 11724 - DNA, 387 bp, synthetic construct
  misc_feature 1..387: note = source = /note="Description of Artificial Sequence: Synthetic coding sequence"
  source 1..387: mol_type = other DNA
atgaaaaccctccaatttttcttccttttttgctgctggaaggcgatttgttgtaattcttgtgaattaacaaacattacaatcgcaatcgaaaaggaagaatgcaggttttgcatcagcataaataccacctggtgcgccggatattgttacacaagagacctcgtctataaagatcccgcacgacctaaaattcagaaaacctgtacctttaaggagctcgtctatgaaacagtgcgggtgcctggatgcgctcatcatgccgatagtctttacacttaccctgttgccacccagtgccactgcgggaaatgtgatagcgacagtaccgactgtacggtgagggggcttgggccatcctactgttctttcggcgaaatgaaagag

SEQ ID NO: 11725 - DNA, 387 bp, synthetic construct
  misc_feature 1..387: note = source = /note="Description of Artificial Sequence: Synthetic coding sequence"
  source 1..387: mol_type = other DNA
atgaaaaccctgcaattcttctttctgttctgttgctggaaagcaatctgctgcaactcatgcgaactcactaatatcactatcgctatcgaaaaggaggaatgccgcttctgtatctccatcaacactacttggtgtgctggatactgttacactcgcgatctggtgtacaaagacccagcaagaccgaagatccagaaaacttgtactttcaaggagctcgtgtacgaaactgttagggtcccaggatgcgcccatcacgccgactcgctgtatacttacccggtggccactcagtgtcattgtggaaaatgcgattcggacagcaccgattgcaccgtgcggggtttgggaccgagctactgctccttcggagaaatgaaggaa

SEQ ID NO: 11726 - DNA, 387 bp, synthetic construct
  misc_feature 1..387: note = source = /note="Description of Artificial Sequence: Synthetic coding sequence"
  source 1..387: mol_type = other DNA
atgaaaactctccagttcttcttcctcttttgctgctggaaagcaatctgttgtaactcctgtgaactaaccaacatcaccatagctatcgagaaagaagagtgccgattttgcatcagtatcaacaccacttggtgtgccggctactgttataccagggatctggtgtacaaggaccccgcgcggcctaaaatacagaagacatgcacattcaaagaattggtctatgagacagttcgcgtgcctgggtgcgcccaccatgctgactccctgtacacgtatccagtcgctacgcagtgccattgcgggaaatgcgatagcgactcaactgattgtacagtgcgcgggcttggtcccagctactgcagctttggtgagatgaaagaa

SEQ ID NO: 11727 - DNA, 387 bp, synthetic construct
  misc_feature 1..387: note = source = /note="Description of Artificial Sequence: Synthetic coding sequence"
  source 1..387: mol_type = other DNA
atgaaaactcttcaattcttttttctcttttgttgttggaaggccatatgttgtaactcgtgtgaactgactaatatcaccattgctattgagaaagaagaatgccgcttttgtatctcaataaacaccacttggtgcgcagggtactgctacactagggatcttgtgtacaaagaccctgcaaggcccaaaatacaaaagacctgtacctttaaagagctggtgtacgaaaccgtgagagtgcctggctgcgcccaccacgccgattccctttacacttaccctgtggcaacccagtgtcattgtggtaagtgcgactcagatagcactgattgcactgtgcggggtctgggcccatcgtactgttcgtttggagaaatgaaggaa

SEQ ID NO: 11728 - DNA, 387 bp, synthetic construct
  misc_feature 1..387: note = source = /note="Description of Artificial Sequence: Synthetic coding sequence"
  source 1..387: mol_type = other DNA
atgaagacattgcagttcttttttctgttctgttgttggaaagccatatgctgtaatagttgcgagctcaccaatataacaattgcgatcgagaaggaagaatgtagattctgtataagcatcaatacgacctggtgcgcaggctactgttatacccgcgacttggtttataaggacccggccagacccaagatccaaaagacctgcactttcaaggaactggtatatgagaccgtgagggtaccggggtgcgcccaccatgctgatagcttgtatacataccccgtggctactcagtgccattgcgggaagtgtgactctgatagcactgactgcaccgttaggggacttggcccatcatactgttcattcggggaaatgaaggag

SEQ ID NO: 11729 - DNA, 387 bp, synthetic construct
  misc_feature 1..387: note = source = /note="Description of Artificial Sequence: Synthetic coding sequence"
  source 1..387: mol_type = other DNA
atgaaaactctgcagtttttctttctgttctgctgttggaaggctatctgctgcaatagctgcgaattgacgaacataaccatcgcgatcgaaaaagaagaatgtcggttctgcatttcaatcaacactacctggtgcgccggctactgctacactagggatctggtttacaaggacccggcacgacctaagatccaaaagacttgcaccttcaaggagctcgtatacgaaaccgtgcgggtgcccggatgtgctcatcacgccgatagcctctacacctatccagtcgccactcaatgccactgcgggaagtgcgactctgactcgaccgactgtactgtgagaggactcggcccgagctattgttccttcggagaaatgaaggaa

SEQ ID NO: 11730 - DNA, 1257 bp, synthetic construct
  misc_feature 1..1257: note = source = /note="Description of Artificial Sequence: Synthetic coding sequence"
  source 1..1257: mol_type = other DNA
atgtcctttattccagtggccgaggacagcgatttccccattcacaatcttccgtacggtgttttctctaccaggggcgatccacggcctagaattggggttgccattggcgatcagatcctggatttgagcatcatcaagcacctattcactggccctgtgctctcaaagcaccaagacgtttttaatcagcctaccctgaacagttttatggggctgggccaggccgcttggaaagaggccagggttttcctgcagaatctgcttagtgttagtcaggctaggttaagggacgatactgagctgcggaagtgcgcgttcatctcacaggccagcgccacgatgcacttgccagctaccatcggcgattacacagatttctattcgtctcgccagcatgctactaatgtggggattatgttccgtgacaaagaaaatgcgctgatgccaaactggcttcacctgccagtggggtatcacgggagagcgtcaagtgtggtagtttccggcactcctattagacgaccaatgggacaaatgaagcctgatgactccaaaccgcccgtgtacggcgcatgcaagctcctagacatggaactcgaaatggcattctttgtggggcctgggaacagactgggtgagccaatacctatttcaaaagcccacgaacacatctttggcatggtgttgatgaacgattggtctgctagagatatccagaaatgggagtacgtgccattggggccctttctgggtaagtcgttcggcaccaccgtgtcaccttgggtggtccctatggatgcactgatgcctttcgctgtacctaaccccaagcaagacccaagacccctaccatatctctgtcacgatgagccatacacattcgatattaacctgtccgtgaaccttaagggtgaagggatgtctcaagcagccaccatatgcaaaagtaactttaagtatatgtattggaccatgcttcagcagctgactcatcacagcgtgaatggttgtaatctgcgtcctggagacctccttgcaagtggtactatcagcggccctgagccagagaatttcggctccatgcttgagctctcctggaaagggacgaaacccatcgatctgggaaacggtcagaccaggaaatttttactggacggagacgaggttatcataaccggatactgtcagggcgatggctaccgaataggctttgggcagtgtgcaggtaaagtgttgcctgcgttacttccctca

SEQ ID NO: 11731 - DNA, 1257 bp, synthetic construct
  misc_feature 1..1257: note = source = /note="Description of Artificial Sequence: Synthetic coding sequence"
  source 1..1257: mol_type = other DNA
atgtcatttatccccgtcgcagaggactccgactttcctatacataaccttccctatggtgtcttttcaaccagaggggatcctagaccacgaatcggggtggctataggcgatcaaattcttgatctgagcattatcaagcatctgttcactgggccagtcctgtcgaaacatcaagatgtgttcaatcagcctactctgaactcatttatgggtctgggtcaggctgcctggaaggaagcccgggtctttctgcagaatctgctgtcggtgagccaggctcgacttcgcgacgacaccgaattgagaaaatgtgcgttcataagccaggcgagcgcaaccatgcatcttcctgcaactattggagattacaccgacttttacagctccagacaacatgcaaccaacgtcggaatcatgttccgggacaaggagaacgctcttatgcctaactggctgcatttgcccgtcgggtaccacggtcgggcgtcgtccgtcgtggtgtcgggcacccccattagacgccctatgggacagatgaaacccgacgactccaagcccccagtctacggagcctgcaagctgttggatatggaacttgagatggcatttttcgtggggccagggaatagactcggggagccaattcccatttcgaaagcacatgaacacatatttggaatggtgcttatgaacgactggtccgctcgggacattcaaaagtgggagtacgtgccactgggaccttttttgggaaagtcgttcggtaccaccgtgtcgccttgggtggtgcccatggatgcactgatgccattcgccgtgcctaaccctaaacaagatccaagaccacttccttacttgtgccatgacgagccctatactttcgacataaacctgagcgtaaatctcaagggagaaggcatgtcccaggccgcaacgatatgtaagtccaacttcaagtacatgtattggactatgctgcagcagcttacccaccatagcgttaacggctgtaaccttcgtccaggagatcttttggcatctggtaccatttcgggaccagaaccggagaatttcggatccatgcttgagctttcttggaaaggcactaaaccaattgacctgggaaatggtcaaacgcgcaagtttctgcttgacggcgatgaagtgatcattactggatactgccaaggagatggttacagaatcggttttggacaatgtgcaggaaaggtgctgccagcacttctgcctagc

SEQ ID NO: 11732 - DNA, 1257 bp, synthetic construct
  misc_feature 1..1257: note = source = /note="Description of Artificial Sequence: Synthetic coding sequence"
  source 1..1257: mol_type = other DNA
atgtcctttatacctgtagccgaggactccgatttccctatccacaatctgccctacggggtgttctccacgaggggagatccccgccccagaataggggtcgccattggggatcagatactagatctgagcatcatcaagcatctctttacagggcccgtcctcagtaaacatcaggacgtgtttaaccagcccacacttaacagctttatgggtctaggccaagccgcgtggaaagaagcacgcgttttccttcaaaacctcctgagcgtttcccaggccaggctacgagacgacactgaactgagaaagtgcgctttcatcagccaggcatctgccacaatgcatttgcccgccactattggagactataccgacttttacagtagtcgtcagcatgccactaatgtggggatcatgtttagagacaaggaaaatgctctgatgcccaactggctccatttgccggtgggttatcatggtcgcgcaagcagcgtagtggtatcaggcactcccatcaggcgacctatgggccagatgaaacctgatgactccaagcctccggtatatggggcctgtaagttgctggacatggaactggagatggccttcttcgtggggccaggtaatcggctgggagagccaattcccatttctaaggcgcacgagcacatctttggaatggtcctgatgaatgattggtccgcgcgcgatatacagaaatgggaatatgtccctctgggtccctttctcggcaaaagtttcggtacaactgtgtccccttgggtcgtgccgatggacgctcttatgcccttcgccgtccccaacccaaaacaggatccaaggccactgccttacctctgtcatgatgagccttatacattcgatataaatttgtctgtgaatttaaaaggagaaggcatgtcacaggccgcgacaatctgcaagtccaactttaagtacatgtattggacaatgttgcagcagctgacccatcacagcgtcaacggctgtaacttgcggccaggggatttactagctagtggcactatctccggccccgaacccgaaaactttggctcaatgctcgagctgtcatggaagggaactaagccaattgatctgggtaatggtcagacacggaagttccttttggacggggacgaggtgattatcaccgggtactgtcagggggatggctatagaattggttttgggcagtgcgccggcaaagtgctgccagcccttttgccatca

SEQ ID NO: 11733 - DNA, 1257 bp, synthetic construct
  misc_feature 1..1257: note = source = /note="Description of Artificial Sequence: Synthetic coding sequence"
  source 1..1257: mol_type = other DNA
atgtcattcatccctgtggctgaagatagtgactttcccatccacaatctgccttacggagtcttcagcacccgcggtgatccgcggcccagaataggagtggcaatcggcgatcagattctcgacctgagcattatcaagcatctatttactgggcccgttctcagcaagcatcaggatgtttttaaccagccaacactgaattcttttatgggcctgggccaagctgcatggaaggaggctagggtgttcctgcaaaacctgctcagcgtttcccaggcccgactgcgcgatgatacagagctgcgcaagtgtgcttttatcagccaggccagcgcaacaatgcacttacccgccacaatcggcgactacaccgatttctattctagcagacagcacgccactaatgtcgggatcatgttccgggataaggagaacgcactgatgcccaattggctgcatctgccagtagggtaccacgggagggctagttccgtggttgtgtctggaacccctatccgcagacctatgggacagatgaagccagatgacagcaaacctccagtgtacggagcctgcaagctcctggatatggagctcgagatggccttttttgttggcccgggcaacagactgggagaacctataccaatcagtaaggcacacgagcacatctttggcatggtgctgatgaacgattggagtgcccgtgacatccagaaatgggagtacgtgcctttgggacctttcctgggaaagagctttggcacaacagttagcccgtgggtggtccccatggatgcgctaatgcccttcgcggttcctaatccaaagcaggacccccggcccttgccttatctctgccatgatgagccctatacctttgacatcaacttaagcgtgaacctcaagggcgaaggaatgtctcaagctgcaaccatctgtaaatcaaatttcaaatacatgtattggaccatgctgcagcaacttactcatcattctgttaacggctgcaacctgaggccaggcgatttgttggcgtcaggaactatcagcgggccggagcccgaaaactttgggtccatgttggagcttagttggaagggaactaaaccaattgaccttgggaatggacagacacgaaagtttttgttggacggagacgaagtcataatcaccggctactgtcaaggagacggttataggatcggtttcggtcagtgcgcaggcaaggtactgcccgcacttttgccaagt

SEQ ID NO: 11734 - DNA, 1257 bp, synthetic construct
  misc_feature 1..1257: note = source = /note="Description of Artificial Sequence: Synthetic coding sequence"
  source 1..1257: mol_type = other DNA
atgtcatttattccagttgcagaagattctgattttcccattcacaatctcccctacggcgtcttttccacacgcggtgacccacggccgcggattggggtggctattggcgaccagatcctggatctgtccattatcaaacatttatttacaggccccgtactgtcaaagcaccaggacgtgtttaaccagccaacacttaacagttttatggggttgggtcaagctgcgtggaaggaagcgagggtgtttttgcaaaacctgctgtctgtgagtcaggcccgccttagagacgatactgagctccgtaaatgtgcctttattagtcaggcgagtgccacaatgcatctccctgccaccatcggtgattacacagacttttactctagtcggcagcacgcaacaaatgtgggcataatgttccgcgataaagagaatgccctcatgcccaactggctgcatctgccagtgggctatcacggtcgcgctagtagtgtggttgtctctggtaccccaattcggagaccaatggggcagatgaagcctgacgactcaaaaccacctgtctatggagcctgcaaattgctggatatggaactggaaatggcctttttcgtgggccccggcaatcggctgggagaacccatacctatctccaaagctcatgaacacatctttggtatggtcctcatgaacgattggagcgctcgagatattcagaagtgggaatatgttccactaggaccttttctcggaaagtctttcgggactaccgtgtccccgtgggtggtgcctatggacgcactgatgccttttgccgttcctaatcccaagcaggatcctcggcccttgccctatttatgtcatgatgaaccttacacgttcgatattaacctctccgtaaacttgaagggcgagggaatgtcccaggcggcaactatatgcaagtctaattttaagtatatgtattggacaatgttgcagcagcttacgcaccactcagtgaacgggtgtaatctacgccccggagatcttttagcttctggaactatttctggaccggagcccgaaaattttggctcgatgttggagctctcctggaagggcactaagcctatcgatctcggaaacggacagacaagaaaattcctcctggatggtgacgaagtaattattaccgggtattgtcagggggacggctatcggatcggatttggccagtgcgcgggcaaggtcctccccgccctgcttcccagc

SEQ ID NO: 11735 - DNA, 1257 bp, synthetic construct
  misc_feature 1..1257: note = source = /note="Description of Artificial Sequence: Synthetic coding sequence"
  source 1..1257: mol_type = other DNA
atgtccttcatcccagtcgcagaggacagcgacttccccatccacaacctgccgtacggtgtgttctcaacgcgaggcgacccacggccacggatcggagtggccatcggcgaccaaatcctggacctcagcatcattaaacacctgttcacgggcccagtgctctcgaaacatcaggatgtgttcaaccagccgaccctcaactcgttcatgggactcggtcaggccgcgtggaaggaagcgagagtgttcctccaaaatctgctttcggtgtcgcaagcgcgcctgcgggacgacactgaactgcggaaatgtgcgttcatcagccaggccagcgctacgatgcatctgcccgcgaccatcggggactacaccgatttctactcttccagacaacatgctaccaacgtgggaatcatgttccgggataaagaaaacgcactgatgccaaactggcttcacctgcctgtggggtaccacggacgggcttcatccgtcgtcgtctcgggaacgccgattcgacggccgatgggtcaaatgaagcccgatgactccaagccgcccgtgtacggtgcatgcaagctgctggatatggaacttgagatggccttcttcgtgggcccggggaatcggctgggcgagccgatcccgatttccaaagctcatgagcatatcttcggaatggtgctgatgaatgattggtccgcacgggacatccaaaagtgggaatacgtccctctgggaccattccttggaaaatcgttcggaactactgtgagcccgtgggtggtcccgatggatgccctgatgcctttcgccgtgcctaaccctaaacaggaccccagaccgctgccgtacctctgccatgatgaaccatacactttcgacatcaatctctctgtgaacctgaagggagaaggcatgtcccaggcggcaaccatctgcaagagcaacttcaagtatatgtattggaccatgctccagcaattgactcaccactccgtgaatggatgcaacttgcgccctggagatctccttgcaagcggcactatctcgggacctgagccggagaatttcggctctatgctggaactctcgtggaagggaactaagccgatcgacctgggaaacggacagacccgcaaattcctgctggacggagacgaagtcatcatcactggatactgtcaaggcgatggataccgcatcggatttggccagtgcgcgggcaaggttctgcccgccctgcttccatcg

SEQ ID NO: 11736 - DNA, 1257 bp, synthetic construct
  misc_feature 1..1257: note = source = /note="Description of Artificial Sequence: Synthetic coding sequence"
  source 1..1257: mol_type = other DNA
atgtcgttcatccctgtggcagaagatagcgattttccaatccataatctgccctacggggtgttttccacccgcggagatccccgcccccggattggggtggcaatcggtgaccaaattctggatctttcgattatcaagcacttgtttactggacctgtgctctcgaagcatcaagatgtctttaaccaacccaccttgaattcgttcatgggacttggacaggcagcatggaaggaagcacgtgtgtttctccagaatctgctcagcgtgtcacaagcaagattgagagacgataccgaactgaggaaatgtgcatttatctcacaagcaagcgcaactatgcatcttcctgcgactattggtgactacactgacttttactcgtcgagacaacatgccactaacgtgggaatcatgtttagagataaagagaacgcccttatgcctaactggttgcatctgccagtgggataccatggaagagcctcgagcgtcgtcgtatccggaacccccattaggcgaccaatggggcagatgaagccagacgattccaagccacccgtgtacggagcatgtaaactccttgacatggaactggaaatggcatttttcgtgggtccaggcaaccgactcggggaaccaatccctatttctaaggcacacgaacacatatttggcatggtgttgatgaatgactggtcagcccgcgatatccaaaaatgggagtacgtgcctctgggaccgttcctgggaaagtccttcggcaccaccgtgtcaccatgggttgttccgatggatgcacttatgccttttgcggtgccaaacccgaagcaagaccctagacctctcccctacctttgtcacgacgagccatacactttcgacattaacctgtccgtgaaccttaagggagaaggaatgagccaagccgcaactatttgtaagagcaacttcaagtacatgtattggaccatgcttcagcagctgactcatcactccgtcaatggctgcaacctcaggcctggtgatttgctggcttccggaactatttcgggaccagaaccagaaaacttcgggtcgatgctggaacttagctggaagggaaccaagcccattgatctgggtaacggacaaactaggaagttcctgttggatggcgatgaggtgatcatcaccggatactgtcagggggatggataccgcatcggatttggacagtgtgcggggaaagtcctgcctgcactccttccgtcg

SEQ ID NO: 11737 - DNA, 1257 bp, synthetic construct
  misc_feature 1..1257: note = source = /note="Description of Artificial Sequence: Synthetic coding sequence"
  source 1..1257: mol_type = other DNA
atgagctttattccagtggcggaggatagtgactttcctattcataacctgccctacggtgtgttttccacgagaggcgacccaagacccagaattggggtagcaattggggatcaaattctggatctgtcgataatcaagcatctctttaccggaccagtgttgtcgaagcaccaagatgtattcaaccagcctaccctcaactcgtttatgggtctgggacaagcagcatggaaggaagcacgtgtgtttctccagaaccttctgtcagtctctcaagcgcgcctcagggacgataccgaactgcgcaaatgtgcattcatatcccaagcaagcgcaactatgcatttgcctgccaccattggggactacactgacttttacagctcacgccagcatgcgactaatgtgggcataatgtttcgggataaagagaatgcgctgatgcctaattggcttcatttgccagtgggctaccatggcagagcgtcctccgtcgtggtgtcggggactccaataaggcgtcccatgggccagatgaagccagatgattcgaaaccaccagtctacggagcctgcaaactgttggacatggaacttgaaatggcatttttcgttggccccggaaaccggctgggagagcccattcctatttctaaggcgcacgaacatatcttcggaatggtccttatgaatgactggtccgccagagatatccagaagtgggaatacgtgccacttggtccttttcttgggaagagcttcggtaccaccgtgtcgccttgggtggttcccatggacgcacttatgcctttcgcagtccctaatcctaaacaggaccctagaccactcccatacctttgccacgatgagccatacacctttgacattaacctttcagtgaacctgaaaggtgagggtatgtcccaagcggcaactatctgtaagtccaatttcaagtatatgtactggactatgcttcaacagctgactcaccattctgtcaacggttgtaacctgaggccgggagatcttctcgccagcggaactattagcggacccgagccagaaaacttcggatcgatgcttgaactgtcatggaagggtaccaagcccattgatctcggtaatggacaaacccgcaagtttcttcttgacggcgatgaggtgattatcaccggatactgccagggtgatggataccgtatcggttttggccaatgtgctgggaaggtcctgcctgccttgctgcctagc

SEQ ID NO: 11738 - DNA, 1257 bp, synthetic construct
  misc_feature 1..1257: note = source = /note="Description of Artificial Sequence: Synthetic coding sequence"
  source 1..1257: mol_type = other DNA
atgagctttattcctgtcgctgaggatagtgacttccccatccataacttaccatatggcgtattcagcactcgcggggatccccgaccccggatcggcgtggccataggggatcagattctggacttgagcattattaagcacttatttacaggccctgtcctgtcaaagcatcaagacgtgttcaatcaacctacccttaacagctttatgggcctcggtcaggcagcttggaaagaagctcgggttttcctgcagaacctcctctccgtgtcgcaagccagactgagggacgacaccgaactaagaaagtgcgccttcatctcccaggcgtccgccactatgcacctgcctgcgactatcggagactatacagatttctattcctctcggcagcacgcaacaaacgttggcatcatgtttcgagacaaagaaaacgccctcatgccaaattggctccatttgcctgtcggataccatggtcgcgcgtctagtgtcgtggttagcggaactcccatacgccggcctatgggccagatgaagcctgacgactccaagcctcccgtctacggtgcttgcaagctgctcgatatggagctggagatggcttttttcgtggggcccgggaacagactgggagagcccatccctatctctaaagcacacgagcacatcttcggcatggtgctgatgaatgactggagtgccagagatattcagaaatgggaatacgtacccttaggcccattcctgggcaagtcgttcgggacaacagtgtcgccttgggtggtgcctatggacgctctgatgcctttcgccgtgccgaaccccaagcaagaccccaggcccttgccatacttatgccatgatgagccctacactttcgatatcaacctaagcgtaaacctgaagggcgaggggatgtcccaggcagcgacaatctgtaaatcaaactttaagtacatgtattggaccatgctgcagcaactgacacaccacagcgtcaatggctgcaatctgagacccggagatctcctggcatccggaactatttctggtccagaaccagagaacttcggcagcatgctggagctctcctggaaaggcaccaaaccaattgaccttggcaacggtcagaccaggaaatttctcctggacggcgatgaggtgatcatcacgggatactgtcagggagacggatacagaattgggtttgggcagtgtgctggcaaggtgctgcccgccttgttgccatcc

SEQ ID NO: 11739 - DNA, 1257 bp, synthetic construct
  misc_feature 1..1257: note = source = /note="Description of Artificial Sequence: Synthetic coding sequence"
  source 1..1257: mol_type = other DNA
atgtcttttatccccgtagctgaagatagcgattttcccatccataatctgccatatggtgtcttttccacacgaggcgatcctagacctcgaatcggagtggctatcggtgaccagatactggatcttagcatcatcaagcaccttttcacaggacccgtgctgtccaaacatcaggacgtatttaatcagcctacactgaatagtttcatgggactcggccaggcagcctggaaggaggcgagggtattcttacagaacttgctgagcgtcagtcaggctcggctgcgcgacgacactgagctgcgaaaatgtgcatttattagtcaggccagtgccactatgcacctgccggcaaccataggtgattatacagatttttacagcagccgtcaacacgctactaacgtcgggattatgtttagagataaagaaaacgccctcatgcccaattggctacaccttcccgtgggctaccacggacgggccagctcagttgtggtgagtggaacacctataaggcgaccgatgggacagatgaaacctgacgactcaaagcctccggtctatggggcttgtaaactcctggatatggaattagagatggccttttttgttggaccaggcaaccggctgggtgagcccatcccgatatccaaagcccacgaacacatatttggcatggtgctgatgaatgactggagtgctcgggatattcagaagtgggaatacgtgcccttgggtccctttctaggaaaatccttcgggactactgtttccccgtgggttgtgcccatggacgcactcatgccttttgccgtccctaatcctaagcaagaccccagacctctcccgtatctctgccacgacgagccttatacttttgacatcaatctgtccgtgaatttgaagggcgagggcatgtcccaggctgctaccatatgtaaatccaactttaagtatatgtactggactatgctgcagcagctcacacatcacagcgtcaatggttgtaaccttcgacctggcgatctcctggccagtgggactatatccggtccggagcctgagaactttgggtccatgttggaactgagctggaaggggacaaagccaatcgacctgggtaatggacagacacgaaaattcctgctggacggggatgaagttattatcaccggctattgccagggggacggctaccgtatcggctttgggcagtgtgcggggaaggtattgcccgctctgctcccatct

SEQ ID NO: 11740 - DNA, 1257 bp, synthetic construct
  misc_feature 1..1257: note = source = /note="Description of Artificial Sequence: Synthetic coding sequence"
  source 1..1257: mol_type = other DNA
atgtcgtttatccctgtggccgaagattcggactttcctatccacaatctcccttacggagtgttttcaacccgcggcgacccgcgccccagaatcggtgtggccatcggggatcaaatcttggatctgtccatcatcaagcacctgtttactgggccggtgctctcgaagcaccaagacgtctttaaccagccgactctgaattccttcatgggactgggacaagccgcctggaaggaggcccgggtctttctgcagaacctcctcagcgtgagccaggcgaggctgcgcgacgacaccgaacttcggaagtgcgccttcattagccaagcaagcgcaaccatgcacctgcctgccaccattggagactacactgacttctacagctcacgccaacatgcgactaatgtgggaatcatgttccgggataaggaaaacgcattgatgccgaactggctgcacctgccggtgggataccatggacgggcctcgtctgtggtggtgtccggaactccaattagacggccaatgggacaaatgaaaccagatgattcgaagccgcctgtctacggtgcctgcaagttgctcgacatggaactggagatggcattctttgtcggcccgggaaatcgcctgggtgaaccaatccccatctcaaaagctcatgaacatatcttcgggatggtcctcatgaatgactggagcgccagggacattcagaagtgggagtacgtgccgctcgggccgttcctcggaaagtctttcgggaccaccgtctcaccatgggtggtcccgatggacgccctgatgcctttcgccgtccctaacccaaagcaggacccgcggccactcccatacctgtgccatgatgaaccgtacaccttcgacatcaatctgtcagtgaacctcaaaggcgaaggcatgtcgcaagccgctacgatctgcaagagcaactttaagtatatgtattggacgatgcttcagcagctcacccatcactctgtgaacggatgcaatctgcgcccaggagacttgttggcctccggaaccatctcaggaccggagcctgaaaacttcggatcgatgctcgagctgtcctggaaggggaccaagccgattgacctcggaaacggccagactcggaaatttcttctggacggtgacgaggtgataatcaccggttactgccagggagacggatacagaatcggcttcggacaatgtgcgggaaaggtcctgccggcactgctccctagc

SEQ ID NO: 11741 - DNA, 1257 bp, synthetic construct
  misc_feature 1..1257: note = source = /note="Description of Artificial Sequence: Synthetic coding sequence"
  source 1..1257: mol_type = other DNA
atgtcctttattcctgtggcagaggattcagattttccaatccacaatttgccttatggagtcttctccacccgcggagatccgagaccccgtatcggggttgctatcggcgaccagattctggaccttagtattattaagcacttgttcactggccctgtgctgtcgaaacatcaggatgtttttaatcagcctaccttgaatagttttatggggcttgggcaggcggcctggaaggaggctagagtctttctgcagaacttgctgtcggtgtctcaggcacgcctgcgggatgatacggaattgcgaaaatgcgctttcatcagccaggcttctgccaccatgcatcttcccgctacaataggggattataccgatttttatagttctcggcaacacgccaccaacgtcgggattatgtttcgcgacaaggagaatgcactgatgcccaactggttgcatctgccggtgggttatcatggtcgcgcctcctcggtggtggtgtcaggaacacctattcggaggcctatggggcagatgaaacccgatgactcgaaacccccagtgtacggcgcatgcaagttactggacatggagttggaaatggccttcttcgttgggcccggcaatcgcctgggagaaccaatccccatatccaaagctcacgagcatatattcgggatggtactcatgaatgattggagcgcacgggacatccagaaatgggaatatgtgcccttgggtccttttctcgggaagagctttgggactactgtgagcccctgggtggtcccaatggatgcactaatgcctttcgctgtgcccaacccaaagcaggatccaagacccctgccatacttatgtcacgatgaaccatacacatttgatataaacctctccgtgaacctgaaaggagagggcatgtcccaagctgccaccatatgcaagtctaatttcaagtacatgtattggacaatgttacagcagctgactcaccactccgtgaatggatgcaacctgagaccaggggacctgttagcgagtggaaccatctcagggcctgaaccggagaattttgggtcgatgctagagctgagctggaaggggaccaaaccaatcgatctgggaaacggacagacaagaaagttccttctggacggggacgaggtgataattactggatactgccaaggtgacggctatcgcatcggcttcggccagtgcgcaggaaaagtgctgcccgctcttctgcctagc

SEQ ID NO: 11742 - DNA, 1257 bp, synthetic construct
  misc_feature 1..1257: note = source = /note="Description of Artificial Sequence: Synthetic coding sequence"
  source 1..1257: mol_type = other DNA
atgtccttcattcccgtggcggaggattcggattttccaatccacaatctcccctacggagtgttctcgacccgcggagatccacggccacgaattggtgtggcaatcggagatcaaattcttgatctgtcgatcattaagcatttgtttaccggacccgtcctcagcaaacatcaggacgtgtttaatcagccgaccctgaactcgttcatgggtctgggccaagctgcatggaaggaggcgagagtgtttctgcaaaatctgctttcagtttcgcaagcaagactgcgcgatgatactgaactcagaaaatgtgcattcatttcacaagcaagcgcaactatgcaccttcctgcaactattggtgactacacggacttttacagctccaggcagcacgcgaccaatgtgggtattatgtttagagacaaagagaatgctcttatgcctaactggcttcaccttccggtgggttatcatggtcgtgcatctagcgtggtggtgtcggggacgcctatacgccgacccatgggccagatgaaaccagatgactccaagccaccagtgtacggtgcatgcaaattgctggacatggagctggagatggcctttttcgtgggaccaggaaatagactgggtgaaccaatacctatttcaaaggcacatgaacacatttttggaatggtgcttatgaacgactggtcggcccgcgatatacagaagtgggaatacgtgccattgggtccttttctcgggaagtcgtttggcactactgtctcaccatgggtcgtccccatggacgcactgatgccgtttgccgtgcctaacccaaagcaagacccacgtcctttgccctacctttgtcatgatgagccctacacctttgacattaatcttagcgtgaatctcaagggtgaaggaatgtcgcaagcagccaccatttgcaagtcgaatttcaagtatatgtattggaccatgcttcagcagctgacccaccattccgtgaacggctgcaacctgcgaccaggtgatctccttgcttctggaaccatcagcggacccgaacctgagaacttcggatccatgctggaactgtcctggaaaggtaccaagcccattgatctgggaaatggacagactcggaagtttcttcttgacggcgatgaagtgatcattaccgggtactgtcagggagatggatacagaattggattcgggcaatgtgcgggaaaggtgctccctgcccttttgccctcg

SEQ ID NO: 11743 - DNA, 1257 bp, synthetic construct
  misc_feature 1..1257: note = source = /note="Description of Artificial Sequence: Synthetic coding sequence"
  source 1..1257: mol_type = other DNA
atgtcattcattcccgtggctgaggacagcgatttccctatccataacctgccgtacggtgtgttttcaactcgaggggatcccaggcccaggataggggtcgctatcggggaccaaatccttgacctttccatcattaagcatctcttcacgggcccagtgctgtcaaagcaccaagatgtgtttaatcagcccaccctgaacagctttatgggactggggcaagcagcctggaaggaggcacgcgtctttcttcagaacctgctgtcggtgagccaggcccgcttgcgggatgatactgagctccgcaaatgtgcatttatctcacaggcaagcgcaaccatgcatcttccagcaactattggtgattacacggatttctactcgagcaggcaacatgccaccaacgttggaattatgtttagggataaagagaatgctctgatgccgaactggctgcatctccctgttggctaccacggtagagcatcctccgtcgtggtgtccggaactcctattcggcgtcctatgggccaaatgaaaccagatgatagcaagcctccagtgtacggcgcgtgcaaactccttgatatggaactggaaatggcattcttcgttggtcccgggaatcggttgggtgaaccaatcccaatttcgaaggcacacgagcacatatttggaatggtgcttatgaacgattggtcagcaagagatattcaaaaatgggaatacgtgcctttgggaccatttctgggaaagagctttggcaccactgtgtcgccctgggtagtgcctatggatgctcttatgccgttcgctgtcccaaaccctaagcaggaccccaggcccctgccctacctgtgtcatgacgaaccgtacacttttgacattaacctttccgtgaacctgaaaggtgaagggatgtcccaggccgcgaccatttgcaagagtaatttcaagtatatgtattggacgatgttgcagcaactgacccatcattcggtgaatggatgtaacctcaggccaggcgacttgcttgcctctgggactatcagtggacccgagcctgagaattttggctcgatgctggaactgtcgtggaagggaacgaagcctatcgacctggggaatggacaaaccagaaagttcctgctggacggtgacgaagtgattatcaccggttactgtcagggagacggttaccgcatcggattcggccaatgtgccggaaaggtgctgccagcactcctgcctagc

SEQ ID NO: 11744 - DNA, 1257 bp, synthetic construct
  misc_feature 1..1257: note = source = /note="Description of Artificial Sequence: Synthetic coding sequence"
  source 1..1257: mol_type = other DNA
atgagcttcatcccagttgccgaagatagcgacttcccaatccacaacctgccctacggggtgttttccaccaggggggacccaagaccaaggatcggtgtcgctatcggcgatcagattctggatctgagcatcatcaagcacctgtttactggccctgtgctcagcaaacaccaggacgtctttaaccagcctaccctgaattcatttatgggcctgggacaagctgcctggaaggaggcccgcgttttcctgcagaacttgctgtcagtatctcaagctaggctgagagatgataccgagttgaggaagtgtgccttcatctctcaggccagcgccacaatgcaccttcctgcaacaatcggagactacaccgatttctatagttcacgtcagcatgctaccaacgtcggaatcatgtttcgcgataaggagaacgccctgatgcccaactggctgcatctgccagtgggctaccacggacgcgcatcttctgtcgtcgtctccggcacacccatcaggcggcctatggggcagatgaagcctgatgatagcaaaccccctgtttacggcgcctgcaagctccttgatatggagcttgagatggcatttttcgtggggccaggcaacaggctgggtgagccaatccccatatctaaggctcatgagcacatctttgggatggtcctgatgaacgactggtctgctagagacatccagaaatgggaatacgtacctctgggacctttcttgggaaaaagcttcggcacaaccgtcagcccttgggtggttcctatggacgcactgatgcccttcgccgtccctaacccaaagcaagatccacgccccctgccatatctctgtcacgacgagccatacacattcgatattaacctgagtgtcaacctgaagggggagggaatgtcccaggcggccactatttgcaaatccaacttcaaatacatgtactggacaatgctgcaacagctgacccaccactctgtgaatggctgtaacctacggcctggagatcttctggcctcgggcactatctctgggccagaaccggaaaatttcggcagtatgctcgaactctcatggaagggtaccaaaccaatcgacctcgggaacggacagaccaggaagttcctgctggacggcgacgaggtgatcatcactgggtactgtcaaggagacggctatcgcatcggttttggtcagtgtgctggaaaagtgcttcctgctctgctgcccagt

SEQ ID NO: 11745 - DNA, 1257 bp, synthetic construct
  misc_feature 1..1257: note = source = /note="Description of Artificial Sequence: Synthetic coding sequence"
  source 1..1257: mol_type = other DNA
atgtccttcataccagtcgcagaggactctgacttcccaattcacaaccttccttatggcgtgttttccacgaggggcgatccccgcccccgcatcggagtcgctatcggggatcagatcttggatttaagcattataaagcacctgtttacaggcccagtactatccaagcatcaagacgtctttaaccaaccaacgttgaacagttttatgggtttgggacaggcagcttggaaggaagctagagttttcctgcagaaccttctctcggtgtctcaggcacgattgcgtgacgacactgaactgcggaaatgtgcattcatctcccaagcctctgcaactatgcacctgcccgcgacaattggtgattacacagatttttattccagcagacagcatgccactaacgtggggatcatgtttcgagacaaagagaatgccctgatgcccaattggctgcacctgcccgtgggatatcatggcagggcgtcaagtgtggttgtgtccggaacaccaattcggcgtcccatgggacagatgaagccggacgatagtaagcctccagtgtatggcgcttgtaagctacttgacatggagttggagatggcattttttgttggtccaggaaacagactgggcgagccaatccccataagcaaggcccacgaacacattttcgggatggtgctgatgaatgactggtccgcccgtgatatccagaagtgggagtacgtgcccttgggcccttttctgggcaaaagctttgggaccaccgtaagcccttgggtagtgccaatggacgcactcatgccttttgcggtgcccaatcccaagcaggaccctcgacctctgccttatctgtgccatgacgagccctacacatttgacatcaatcttagcgtgaatttgaagggtgagggaatgtctcaggccgccacgatttgcaaatctaattttaagtacatgtactggactatgctccaacagcttactcatcacagtgtgaacgggtgcaatctccgtcccggcgacctgctcgcgtcagggacgatatctggccccgagccagagaacttcggctcgatgctcgagctgtcatggaagggaactaaacccatcgacctcgggaacggccaaacacggaaattcctgttggacggcgacgaagtcatcattaccggatattgccagggggacgggtatcggatagggttcgggcaatgtgcagggaaggtgctgcctgccctgctgccaagc

SEQ ID NO: 11746 - DNA, 1257 bp, synthetic construct
  misc_feature 1..1257: note = source = /note="Description of Artificial Sequence: Synthetic coding sequence"
  source 1..1257: mol_type = other DNA
atgtccttcatccctgtcgcggaggattcagacttcccgattcacaacctcccatacggagtgttttccactcggggcgacccacgtccaagaatcggcgtggcaatcggcgatcagatcctcgacctgtctatcatcaagcatctcttcaccggacctgtgctgagcaagcatcaggacgtgttcaaccagcccaccctgaactccttcatgggactgggccaggccgcttggaaggaggcacgggtttttctccagaacctcctttcggtgtctcaggcccgcctgcgggatgacaccgaactgcggaagtgcgccttcatctcacaagccagcgcgaccatgcaccttcccgccaccatcggagattacaccgacttctactcctcccgccaacacgccaccaatgtggggatcatgttccgggataaggaaaatgcactgatgccgaattggctccacctcccagtggggtaccatggtcgcgccagcagcgttgtcgtgtccggaacgccgatcaggcggccgatgggccagatgaaaccggacgactcgaaaccgcctgtctacggagcctgcaagctgctggacatggaattggagatggcattcttcgtcggaccaggaaatagactcggtgaacccattccgatctcgaaagcccacgaacacatcttcggtatggtgctcatgaacgactggtcagccagagacatccagaaatgggagtacgtgccactcggaccgtttcttggaaaatcgttcggaactactgtctccccatgggttgtgcctatggacgctctgatgcctttcgcggtgccaaacccaaagcaggatcctagaccgcttccctacctgtgtcacgatgaaccttacacttttgacataaatctgtcagtgaacctgaaaggagagggtatgtcacaggcagccactatctgtaagagcaacttcaagtatatgtattggaccatgcttcaacagctcactcaccatagcgtcaacggatgtaacctccggcctggagacttgctggcgtccgggactatctcgggcccggagccggagaacttcgggtcaatgctggaactgtcatggaagggaaccaaaccgattgacctcggcaatgggcagacgagaaaattcctgctggacggcgatgaggtgatcatcaccgggtactgccagggggacgggtaccggatcgggttcggacaatgcgccggtaaggtgctgcctgcacttctgccatcc

SEQ ID NO: 11747 - DNA, 1257 bp, synthetic construct
  misc_feature 1..1257: note = source = /note="Description of Artificial Sequence: Synthetic coding sequence"
  source 1..1257: mol_type = other DNA
atgtcgtttatacctgtagccgaagatagcgacttcccgattcataaccttccttacggcgtgttttctacgagaggagatcccaggcctcgaatcggggttgctatcggtgatcagatccttgacctgtccataataaaacatctctttaccgggcctgtactctccaagcaccaagatgttttcaaccagcccaccctgaatagtttcatgggactggggcaagctgcttggaaagaagcaagggtgttcctccagaatttattgtctgtgagccaggcaaggcttcgagatgatacagagctgcgcaagtgcgcttttatctcccaagcatccgctacaatgcatctccctgccacaattggcgattacaccgatttttattcttccaggcaacacgcaacaaacgttggcatcatgtttagggacaaggagaacgcactgatgccgaactggctgcacctgccggtgggatatcatggtagagccagtagcgtcgtcgtgagtggaacgccaatcagaaggcccatgggtcagatgaagcccgatgatagtaaaccacccgtgtacggagcctgtaagctgctggacatggagcttgaaatggccttcttcgttgggccaggaaatcgcctgggcgagccaataccaatcagcaaagcccatgaacatatcttcggaatggtgttgatgaacgattggtctgcgagagatatacagaaatgggagtatgtcccgctgggtcccttccttggcaaatcatttggcactaccgtgtcgccatgggtggtgcctatggacgcacttatgccgttcgccgtcccaaaccctaaacaagaccctcggcccctgccttatctctgccatgatgagccttataccttcgatatcaatctgagcgtcaatttgaaaggtgagggcatgtctcaagctgcaaccatttgcaagagcaacttcaagtacatgtattggacaatgctgcagcagttgacacaccatagcgtcaacggatgcaacttgcggccaggcgatctgttagcgtctgggacaatctcgggacctgagccagagaattttggctctatgctcgaactatcttggaaagggaccaagcctattgacctcggcaacggtcaaacaagaaagttcctactggatggcgatgaagtgattatcaccgggtactgtcagggggacggctatagaattggatttgggcaatgcgcaggtaaagtgctgcccgccctgcttcctagt

SEQ ID NO: 11748 - DNA, 1257 bp, synthetic construct
  misc_feature 1..1257: note = source = /note="Description of Artificial Sequence: Synthetic coding sequence"
  source 1..1257: mol_type = other DNA
atgagctttattccagtcgcagaagattcagattttcccattcacaacttaccgtatggagttttttcgacacgaggtgatccgcgacctcgaataggggtcgctataggcgatcagatcttggatcttagtataatcaagcatctatttactggtccagtcctctctaaacaccaggatgtcttcaatcaacctactctgaattcatttatgggattgggtcaagcagcctggaaagaggcgcgtgtctttttgcagaacctgctctcggttagtcaagcgcgattgagagacgatactgaattgcgcaaatgtgcctttattagtcaagcttctgctaccatgcatttgccggccaccattggggattacacagacttttattcatcgagacagcatgcaactaatgttggaataatgttccgtgataaggagaatgcactcatgcctaattggcttcacttgccggttggttatcatggccgtgcttcatcagtggtggtatcagggacaccgattcgcaggccaatgggacaaatgaagcccgacgattcgaaaccaccagtgtatggagcatgcaaactgctggacatggagctggagatggccttcttcgtaggaccaggcaaccgcttgggagagcctattcctatttctaaagctcacgagcacattttcggaatggtgcttatgaatgattggagcgctcgtgatatacaaaaatgggaatatgtaccgcttggcccctttcttggaaagtcatttggaacaacagtctcgccatgggttgtgccaatggatgctctaatgccgtttgccgtcccaaatccaaaacaagatccacgaccattgccatatttgtgtcatgatgaaccgtataccttcgatatcaatctttccgtaaatttaaaaggagaaggaatgtctcaagcagcgactatttgcaaatcaaatttcaagtatatgtattggactatgctccagcaattgactcaccactcggttaatggttgtaaccttcgaccaggagatctcttggcgtcaggaacgatttctggaccagagcccgaaaacttcggatccatgctcgagctttcttggaaaggtactaagcctatcgatctcggtaatggacaaactagaaaatttctactcgatggggatgaagtaattatcaccggctattgccagggagatggctatagaattggatttggacaatgcgccggaaaagtccttccggctcttctcccgtct

SEQ ID NO: 11749 - DNA, 1257 bp, synthetic construct
  misc_feature 1..1257: note = source = /note="Description of Artificial Sequence: Synthetic coding sequence"
  source 1..1257: mol_type = other DNA
atgtcattcattcctgtggccgaagactctgacttcccaatccataacctcccttatggagtcttctcaacgaggggtgatccacgtcctcgcataggggtcgccatcggcgaccagatactggatctgtccatcattaagcacctgtttaccggaccggtcctgagtaagcatcaggatgtgttcaaccaaccaacgctgaatagcttcatgggtttggggcaagccgcttggaaagaagcccgtgtttttctccaaaacttgctgtccgtgtcccaagctcgtctacgtgacgatacggagctccggaagtgcgcatttatctcacaggctagtgctacaatgcatttgcccgccaccatcggggattataccgatttctactcttcccgtcaacatgcaactaatgttggtatcatgttcagagataaggagaacgctttgatgcccaactggcttcatttgcccgttggttaccatggtcgagcgtcctctgtggtggtttccggtactccaatccgccgaccgatgggtcaaatgaagccagacgattctaagcctcccgtctacggtgcttgcaagcttttggacatggaactagagatggctttttttgttggaccgggcaacaggctcggagagcctatcccaatctccaaagcacacgaacacattttcggtatggtgctcatgaacgattggagcgcgcgggacattcaaaaatgggagtatgtccctctcggacccttcttgggcaagtcctttggtacgaccgttagcccatgggttgttccgatggatgctttgatgcctttcgctgtgccaaaccccaagcaggatcctcggccactgccctacctttgtcacgatgagccttacacctttgacattaacttgtcggtgaatctgaagggggagggcatgtctcaggctgctacaatatgtaaatcgaactttaagtacatgtactggactatgcttcaacaacttacgcatcattcagttaacggctgcaacctacgtcccggcgatctgctcgcttctggaacaatatcgggtcccgaaccggagaacttcgggtccatgttggaactgagttggaaaggaacgaaaccaatcgatttggggaacggccagacgcgaaagttcctgctggatggcgatgaggtcatcatcactgggtattgtcaaggtgatgggtatagaatcggtttcggtcagtgcgccggaaaagttcttccggcactgttgccctct

SEQ ID NO: 11750 - DNA, 1257 bp, synthetic construct
  misc_feature 1..1257: note = source = /note="Description of Artificial Sequence: Synthetic coding sequence"
  source 1..1257: mol_type = other DNA
atgtcttttattccagttgctgaagattctgattttccaatacataatcttccatatggtgttttttcaacaagaggagatcctcgtccacgaataggagtagctattggagatcaaattttagatttatctattattaaacatcttttcacaggaccagtattgtcaaagcatcaagacgttttcaatcaacctactttaaattcatttatggggcttggacaagctgcatggaaagaagctagagtttttttacaaaatttattgtcagtatctcaagctcgtcttagagatgatacagaattaagaaaatgtgcattcatttcacaagctagtgctactatgcacttaccagctacgataggagattatactgatttttattcatcaagacaacatgctactaatgtgggtattatgtttagagataaggagaatgctttaatgcctaattggttacatttaccagtaggatatcatggaagagcttcatctgttgtcgtatcaggaactccaattagaagaccaatgggacaaatgaaacctgatgactctaaacctccagtatatggagcttgtaaattacttgatatggaacttgaaatggcttttttcgttggaccaggtaaccgtttaggtgagccaatacctatttctaaagcccacgaacatatatttggtatggtgttaatgaatgattggtcagcaagagatatacaaaaatgggaatatgttccattaggaccatttttagggaaaagttttggtactacagttagtccatgggtagttccaatggatgctcttatgccatttgcagttcctaatccaaaacaagatccaagaccacttccatatctttgtcatgacgaaccatatacttttgatattaatttaagtgttaatctcaagggagagggtatgtcacaagcagcaactatttgtaaaagtaacttcaagtatatgtattggactatgttacaacaattaacacatcattcagtaaatggttgtaatcttcgacctggagatttattagcatctggaacaatttctggaccagaaccagaaaactttggatcaatgttagaattatcatggaaagggactaaacctattgatcttggaaatggacaaactcgaaagttccttttagacggagatgaggttattattacaggatattgtcaaggagacggatataggatcggatttggacaatgtgctggaaaggtattaccagcattattaccaagt

SEQ ID NO: 11751 - DNA, 1257 bp, synthetic construct
  misc_feature 1..1257: note = source = /note="Description of Artificial Sequence: Synthetic coding sequence"
  source 1..1257: mol_type = other DNA
atgagcttcatcccggtggctgaggattctgatttccccatccataacctcccctacggagtgttctcaactagaggagatccgcggccacgcatcggagtggcgatcggcgaccagatcctggacctctcgatcatcaagcatctcttcaccggacctgtgctgtccaaacaccaagatgtgtttaaccagccgactcttaattccttcatgggcctgggccaggcggcgtggaaggaagcacgggtcttcctgcaaaatcttctcagtgtgtcccaggcgcggctgcgtgacgatactgagctccgcaaatgcgcttttatctcgcaagcctcagccacgatgcacctccccgccaccatcggtgactacactgatttctactcgtccagacagcacgccaccaacgtgggcatcatgttcagagacaaagagaatgcgcttatgcctaactggttgcaccttccggtcggataccacgggcgggcctcgtccgtggtggtgtccggaacccctatcagaaggccgatgggccagatgaagccagacgacagcaagccgccagtttacggggcctgcaagctgctggatatggagctggagatggcctttttcgtgggaccggggaatcgcctgggagaaccaatcccaatcagcaaagcacatgaacacatcttcggcatggtgttgatgaacgattggtcagcccgggacatccagaagtgggagtacgtgccactggggcctttcctgggcaaatcattcggtactactgtctcgccctgggtggtcccgatggacgctctcatgccgttcgcggtgccaaatcctaagcaggatccacgcccattgccgtacctgtgtcacgacgaaccgtataccttcgatattaacctgagcgtcaacttgaagggagaagggatgagccaggcggccactatctgcaagtccaatttcaagtatatgtattggactatgctgcaacaactgacccaccactccgtcaatggatgcaatctgcggccgggagatctccttgcctcgggaactatttcaggaccagaacccgaaaactttggatcgatgctggaacttagctggaagggaactaagcctatcgacctgggaaacggccagacccggaagttcctgctggacggcgacgaagtcatcatcaccggctactgtcaaggcgacggctacaggatcggatttgggcaatgcgccggaaaggtgttgccggcccttctgccgtcc

SEQ ID NO: 11752 - DNA, 1257 bp, synthetic construct
  misc_feature 1..1257: note = source = /note="Description of Artificial Sequence: Synthetic coding sequence"
  source 1..1257: mol_type = other DNA
atgtccttcatccccgtcgcagaggactcggacttccctattcataatcttccctacggcgttttcagtacgcgcggtgacccccgacctcgcatcggagttgcaatcggggatcagatcctggatctaagcatcatcaagcatttgttcaccggacccgtcctcagtaagcaccaggatgtgttcaaccagcccacgcttaacagttttatgggactcggccaggccgcgtggaaggaggcgcgcgtcttcctgcagaatctacttagcgttagccaagcacggcttcgggacgacacagagttgcgtaaatgtgcgttcatttcacaggcttccgctacgatgcacctgcctgctaccattggcgactataccgatttctatagttcccgacaacacgccaccaacgttggcataatgttccgtgataaggaaaacgctctaatgccgaactggctacacttaccggtcggttatcacggccgcgcctcctcagttgtcgtatcgggcacacctatccgccgacctatgggtcagatgaagccggatgactctaagcctccagtctacggcgcttgcaagcttctggacatggagcttgagatggccttcttcgtcggtccgggtaaccgtctcggcgagccgatccccatctctaaggcacacgagcacatttttggcatggtcctgatgaacgactggtctgcgcgcgatattcagaagtgggaatacgttcccctcggtccctttcttggcaagtcttttggaaccacagtctccccttgggtcgtccctatggatgcactcatgccctttgctgtccccaaccccaagcaggacccccgcccccttccctacctgtgtcatgatgagccttacacgttcgacatcaacttgtccgtgaacctgaagggtgagggaatgtcgcaagccgcaactatctgtaagtctaatttcaagtacatgtactggacaatgctccaacagctcacacaccattccgttaacggttgcaacctacgccccggtgaccttctggcttcgggaacaatttccggcccggaacctgagaactttgggtctatgttggaactttcttggaagggcactaagcccatcgacctgggcaatggacagaccaggaaattcctgcttgacggcgatgaggtcattatcactggatactgccagggtgatgggtaccggattggttttggccagtgcgctggtaaggtgctccctgctctactcccgagc

SEQ ID NO: 11753 - DNA, 1257 bp, synthetic construct
  misc_feature 1..1257: note = source = /note="Description of Artificial Sequence: Synthetic coding sequence"
  source 1..1257: mol_type = other DNA
atgtcattcatcccagtcgccgaagatagcgactttcctatccacaaccttccgtacggagtgttctcgacccggggcgacccgcggccgaggatcggagtggcgatcggggatcaaattctcgacctgagcatcatcaagcatctgtttactgggccggtgctgtccaaacatcaagacgttttcaaccaaccaactctgaacagctttatgggactggggcaggccgcttggaaagaagctcgggttttcttgcagaatctgttgtccgtcagccaagcccgccttcgggacgacactgagctccggaagtgcgccttcatcagccaagcatcggccaccatgcacctgcctgccaccatcggagattacaccgacttttactcgtcgagacaacacgctaccaacgtggggatcatgttccgggacaaggagaacgccctcatgcccaattggctccacctccctgtcggataccacggacgagcaagttccgtggtagtcagcggaacccctatacgaaggcccatggggcagatgaagccagatgactccaaaccgccggtgtatggcgcctgcaagctgctcgacatggagctcgaaatggcgttcttcgtgggaccaggaaatcggttgggtgagccgattccaatctccaaggctcacgaacacatctttggaatggtccttatgaacgattggagcgcgcgcgacattcagaagtgggaatacgtcccactgggaccattcttggggaagtcattcggcacgaccgtgtcgccgtgggtggtcccgatggatgctctgatgccgttcgccgtgccgaacccgaagcaagatccgcgacctctcccgtacctgtgccatgacgaaccatacactttcgatatcaacctgtcagtgaacctgaagggagaagggatgtcacaggccgcgactatctgcaaaagcaacttcaaatacatgtactggaccatgctccagcagctcactcaccattcagttaatggttgtaatctgcggccgggagatctgctcgcatcgggaaccatctccggaccggaacctgagaattttggatccatgctggaactgtcatggaaaggaactaagccgatcgatctgggcaatggacaaacccgcaagttcctgctggacggtgacgaggtcatcatcactggttactgccagggagatgggtaccgcatcggatttggacagtgcgccggaaaagttctgccagcactcctcccaagc

SEQ ID NO: 11754 - DNA, 1257 bp, synthetic construct
  misc_feature 1..1257: note = source = /note="Description of Artificial Sequence: Synthetic coding sequence"
  source 1..1257: mol_type = other DNA
atgtcctttattcctgtggccgaggacagtgacttcccaattcacaatctgccatatggtgttttctctactagaggagatccacgcccgcgcataggcgtcgccatcggagatcagattctcgacctttcaataattaagcatctcttcacgggacccgtgctgtccaaacatcaggatgtattcaaccaacctacactgaattcatttatgggcctcggacaagcagcctggaaggaggcacgcgtcttcctccagaacctgctcagcgtgagccaggctagactcagagatgacacagaactgagaaaatgcgctttcatttcccaggcttctgcgaccatgcatctccctgccacaattggtgattataccgatttctactccagtagacagcacgccacgaacgtgggcattatgttcagagataaggaaaacgcccttatgccgaattggctgcaccttcctgttggctaccacggacgcgccagcagcgtggtcgtgtcaggcacgccgatcaggagacctatgggtcaaatgaagccagacgactcaaagccaccggtatacggcgcctgcaagctcttggacatggagttggaaatggcattttttgtcggccccggtaataggcttggtgaacctattccgatctcaaaggcccatgagcatatttttggcatggtgctgatgaacgattggagcgcgagggacattcagaaatgggaatacgttccactgggccctttcctgggaaaatccttcggtaccaccgtgtccccctgggttgttcccatggatgctctgatgccattcgctgtgcctaatccaaagcaagatccccgcccactgccttatttgtgccacgacgagccttacactttcgacataaatctgtctgtgaatctgaaaggagaaggaatgtctcaggcagcgaccatctgtaagagcaacttcaaatatatgtactggaccatgcttcagcaactgacacaccactccgtgaacggatgcaacttgagacccggagatctgctcgcctctggaaccatcagcggccccgagcccgagaactttggaagtatgctggaactgtcttggaagggcaccaagccaatagacctcggaaacggccagacccgcaagttcctgctggacggagatgaagtgatcatcaccggctattgtcagggcgacggatatcgcattggtttcggccagtgcgccggcaaagtgcttcctgctctgttgccatcc

SEQ ID NO: 11755 - DNA, 1257 bp, synthetic construct
  misc_feature 1..1257: note = source = /note="Description of Artificial Sequence: Synthetic coding sequence"
  source 1..1257: mol_type = other DNA
atgtcattcatccctgtcgcggaagattccgacttccccatacataacctgccttacggcgtgtttagtacacggggcgatccccgcccccgaatcggagtggccattggagatcagatcctggacctgtcaatcataaagcacctctttaccggacccgttctgtcaaagcaccaggatgtgttcaatcagcccaccttgaacagctttatgggcctgggtcaagcagcatggaaagaagcccgtgtatttctgcagaatctgctgtctgtgtcacaagcaagacttcgtgacgatacagaactgaggaagtgtgcctttatttcgcaggcttcagctactatgcatcttcccgctacaatcggagactatacagacttttactcatccaggcaacacgccacaaacgtaggtataatgtttcgcgacaaagagaacgcacttatgcccaactggttgcaccttcctgtcgggtaccacgggagggcttcgagtgtggtagtttctggaacacctattcggaggccaatgggtcaaatgaagcccgacgactccaagccacctgtatacggagcctgtaaattacttgacatggagctcgagatggctttttttgtagggcctgggaaccggcttggtgaaccaatccctatctccaaggcccacgagcatatattcggaatggtactaatgaatgactggagtgctcgtgacatacagaaatgggagtacgtgcccttaggacctttcttggggaaatcctttggaacaacagtatccccatgggtggtccctatggatgcgctgatgccttttgcagtccctaatccaaagcaggatcccagacccctgccgtatttgtgtcatgatgagccatacaccttcgacataaatctgtctgtaaatttgaagggggagggcatgtcccaggccgccacaatatgtaagtccaattttaagtatatgtattggactatgttgcagcagcttacccatcacagcgtgaatgggtgtaatttacggcctggcgacctgctggccagcggaactattagcggaccggagcctgagaactttggatctatgttggaactcagctggaagggtaccaagccgattgacctaggcaacgggcagactaggaaattcctgctggatggcgatgaagtgatcattactggctactgccagggagacgggtatcgtataggctttgggcagtgtgctggtaaggtgctccctgccctactgccttcc

SEQ ID NO: 11756 - DNA, 1257 bp, synthetic construct
  misc_feature 1..1257: note = source = /note="Description of Artificial Sequence: Synthetic coding sequence"
  source 1..1257: mol_type = other DNA
atgtcgtttatccctgtggccgaggactccgactttccgattcataacctgccgtacggagtgttctcgaccagaggcgaccctagaccgcggattggcgtcgccataggggaccagatcttggatctgtcgatcattaagcatctgtttacgggcccagtgttgagcaagcaccaggacgtgttcaaccaaccaaccctgaacagcttcatggggctcggccaggctgcttggaaagaggcgcgcgtgtttctccaaaatctcctgtcggtgtcccaggcccgccttcgagacgacaccgagctgaggaagtgcgcctttatctcccaagcctcagctaccatgcacctgcccgccactattggagattacaccgatttctactcctcccggcagcacgcaaccaacgtgggaatcatgttcagggacaaagaaaacgcgctgatgccaaattggctccatctgcccgtgggataccacgggcgggcatcgagcgtcgtggtcagcggaactccgatcaggcgcccaatggggcagatgaagccggacgattctaagccacctgtctacggtgcttgtaagctgttggacatggagcttgagatggccttttttgtcggaccgggaaacagactgggagaaccgatcccaatttccaaggcacatgaacacattttcggaatggtgctgatgaacgactggtcggcccgggacatccaaaagtgggaatacgtcccactggggccgttcctcggcaagtcgttcgggaccactgtgtcaccgtgggtggtgccaatggacgcccttatgcccttcgcagtgcctaatcctaagcaagacccccggccgctgccatacctctgccacgatgaaccgtacacctttgatatcaacttgtccgttaacttgaagggagaaggaatgtcgcaagcagccacgatctgcaaatcgaactttaagtacatgtattggactatgctccagcagctgactcatcactccgtcaatggatgtaatcttcggccgggagacttgttggcgagcggcaccatctcgggcccagaacccgagaatttcggttcaatgcttgaactgtcgtggaaagggactaaaccgatcgatctcggcaacgggcagacgagaaagttcctgctcgacggagacgaggtgatcattacgggctactgccaaggcgatggataccgcatcgggtttggccagtgcgcaggcaaagtgttgcctgccctcctgccgtcc

SEQ ID NO: 11757 - DNA, 1257 bp, synthetic construct
  misc_feature 1..1257: note = source = /note="Description of Artificial Sequence: Synthetic coding sequence"
  source 1..1257: mol_type = other DNA
atgtcgtttatccccgtggccgaggactccgactttcccatccataatctcccttacggagttttctccactcggggagatcctcgcccacgcattggtgtggcaattggtgaccaaatcttggacctctcgatcatcaagcacctgttcaccggccctgtcctgtcgaaacaccaggacgtgttcaaccagccgactctgaacagcttcatggggctgggacaggccgcgtggaaggaagcaagggtgttcctgcagaatctcctgagcgtgtcccaggctagactgcgcgacgacactgaattgcgaaagtgtgcctttatctcgcaagcgagcgccaccatgcatctgccggctactatcggtgactacacggatttctactcgagcaggcagcacgccaccaacgtgggaatcatgtttcgcgacaaggaaaatgccctgatgcctaactggctccacctgcctgtgggataccacggaagagcctccagcgtggtcgtctcagggaccccaattcgcagaccaatgggtcagatgaagccggacgactcaaagcctccggtgtacggcgcctgcaagttgctcgacatggaactcgaaatggcattcttcgtcggaccgggtaaccggcttggagaaccgatcccgatcagcaaagcgcatgagcatatcttcggcatggttctgatgaacgattggtccgccagggacatccaaaaatgggagtacgtgcctctgggacccttcctcggcaagagcttcggcaccaccgtgtcaccatgggtggtgcctatggatgctctgatgccatttgccgtgccaaacccaaagcaggatccgcgtcctcttccgtacctttgtcacgacgagccatacacttttgatatcaacctgagcgtgaacctgaaaggagaagggatgtcacaagcggcgactatctgcaagagcaatttcaagtatatgtactggaccatgctgcagcaactgacccaccatagcgtgaacgggtgtaatcttcgaccaggcgacctgctggcctcgggcacgatctcgggaccggagcccgaaaacttcggatcgatgctcgagctgtcgtggaagggaaccaagcctatcgacctgggaaatggccagacccgcaagttcttgctcgacggagacgaagtcattatcaccggatactgccaaggcgatggctacaggatcggattcggacagtgtgctggcaaggtgctcccggctctgctcccttca

SEQ ID NO: 11758 - DNA, 1257 bp, synthetic construct
  misc_feature 1..1257: note = source = /note="Description of Artificial Sequence: Synthetic coding sequence"
  source 1..1257: mol_type = other DNA
atgtccttcatcccagtcgctgaggactcggacttccctatacacaacctgccgtacggcgtgttctctacccgcggagatccacgcccacgaatcggagtggcgataggagatcagatcctggatcttagcatcatcaaacatttgttcacgggcccggtcctttcaaaacatcaggatgtgttcaaccaaccgaccctgaactcattcatgggactgggtcaggcagcctggaaggaagccagagtgttcctgcaaaacctgttgtcagtgtcgcaggcacggctgcgcgatgacaccgaacttaggaagtgcgctttcatctcgcaagcctcagcgaccatgcacctccctgcaactattggcgattacaccgacttttactcctcccgtcagcacgccacgaatgtcggaatcatgtttagagataaagagaacgccctgatgccgaactggctgcatctgccggtcgggtaccatggaagggcttcctccgtggtcgtgtcgggaactcccatccgccgccctatggggcaaatgaagccggacgactcaaaaccgccagtctacggagcgtgcaagctcctcgacatggagctggagatggcgttcttcgtgggaccgggtaatcgcctcggagaaccaatccctatctcaaaggctcatgagcacattttcggcatggtactgatgaatgactggtccgcacgcgatatccagaagtgggaatacgtgccgttgggcccgttcctgggaaagtccttcggtaccaccgtgtcaccgtgggtggtccctatggacgctctgatgccctttgcggtcccgaaccccaagcaagatcctaggccgttgccgtacctgtgccacgacgagccgtacaccttcgacatcaatttgagcgtgaacttgaagggtgagggtatgtcccaggctgccactatctgcaaaagcaatttcaaatacatgtactggaccatgctgcagcagctgactcaccactccgtgaacggctgtaacctgcgcccaggcgacttgctcgcatcgggcactatatcgggacccgagccagaaaactttggttcaatgctcgaactcagctggaagggaacgaagccaatcgatctgggtaatggacaaactcggaaatttctccttgacggtgacgaagtgattatcactgggtactgccagggcgacggatatcgcatcggattcgggcagtgtgccggaaaggtgcttccggccctcttgcctagc

SEQ ID NO: 11759 - DNA, 1257 bp, synthetic construct
  misc_feature 1..1257: note = source = /note="Description of Artificial Sequence: Synthetic coding sequence"
  source 1..1257: mol_type = other DNA
atgagctttattccagtcgcagaagattccgatttcccaattcacaatctcccatacggtgttttttcaacccgtggcgacccaagaccacggatcggtgtggcgatcggcgaccagattctggatctttcgattatcaagcacctgtttaccggaccggtgctttccaagcatcaagatgttttcaaccaaccaactcttaactccttcatgggactgggtcaagcagcgtggaaggaagcgagagtgttccttcaaaatcttctgtccgtctcccaggcacgtctgagagatgatactgagctgcgcaagtgtgccttcattagccaagcctcagccacgatgcacctcccggcaaccatcggagattacaccgatttctacagctccagacaacatgcaactaacgtgggaattatgtttcgcgataaagaaaacgcacttatgccaaattggctgcacctccctgtgggatatcatggacgcgcatcgtccgtcgtcgtgtcgggcactcctatccgccgacccatgggacagatgaagcctgatgactcgaaaccccctgtgtacggtgcctgtaagttgctggacatggaactggagatggcatttttcgtgggcccggggaatcgtctgggggaacctattcctatttccaaagcacatgaacacatctttggaatggtgcttatgaacgattggtcggccagagatatccagaaatgggagtacgtccccctcgggccttttctcggtaaatcctttggaactacggtcagcccttgggtggtccctatggatgcactcatgccttttgcagtgcctaatccgaagcaggatccaaggcctctcccatatctctgccatgatgaaccatataccttcgacattaatctctcggtcaacctgaagggtgaaggtatgtcgcaggcagccactatttgtaagagcaatttcaaatacatgtactggaccatgcttcaacagcttacccatcacagcgtgaatggttgtaacctgcggcctggcgatcttcttgcgtcgggtaccatttctggcccagagcccgaaaacttcgggagcatgctggaactgtcatggaagggcactaaaccaatagatctgggcaatggacaaaccagaaagtttttgctcgatggagatgaagtcataatcaccggatactgtcagggtgatgggtacagaatcggttttgggcaatgcgcaggaaaagtcttgccagcactgctcccaagc
